United States Patent Application Publication US 2007/0161031 A1 - sequence listing, part 13

SEQ ID NO: 15681 - DNA, 2300 bp, Homo sapien
gacaagagtctctctctgtcgcctagtctggagtgcagtggtgcaatctcggctcactgcagactctgcctcccgggttcaaactattctcctgcctcagcctcccaagtaggtgggactaaggcgcccaccaccacacccggctaatttttatattttattagagacagggtttcaccatattggccaggctggtctggaactcctgaccttgtgatccgccgacctcggcctcccaaagtgctgggattacaggcgtgagccaccacacccagcccctgttttgtttttgttttgcttgtttcttagggttgtttttctatttatggtaaaggcattggctttccatttgtagcatcaatagaatatttcctgtttacaataaccttatgtcatagtaaatggtaaagggatttaaagcagtggttttcagctcccagaggcctgagtgagtttgggcacactctgtgtgatcaggcagaaggcctgtgggaagtttagctgaggacagggccaggaaaggtgatggacagtgggggtctgtcctggtcaccagacccctgcgtcctgcccacctgcttggagctccccacccatcacacatgatgctgccaagccctctgggtattgtgggcaaataccttaggagagaagctgctgaactttgtttcttgaaatgcacagattccttggacatccctgagaggtcaatcatgaaggtcaacttggttttctccccctcatttgggttcagaatttaaagtccacacacacaggcagtaagatgattatagataaggacatcatcactcggtttcggatgttaaaatgtctaggtgggttaggggtgatttgagatcacacaaccttgtgccacaaagaggaattcccaggccagagggagacattttattgccatgttatgatcttatcattgagttgaaaggcaatcttgtttcattttggattctttcttatgtttatgtcttataagggcactttgaatttccaagcaaataataattttgaattagcttttaatcattgacttctagcacagttatatgatcagaaacgtgctgtgtgatttgattgctctcaaatatattgagatttgctggaacaaaataagtcaggttaatttttgtaaatgtaccatgcatgcttaaaatgaatgtatctacatttgttcctgagatacaggttgatggacggatggctacatggatgtgatggagatggtttactatcgggaccttccgcatcctgctgatgttttgttgcttaggatatgaatggctgagcggaggctgtaaaacctggcactctgcttgggtatgaggttcttcctgccatcctgccatcatttgttttttatgttttgtcaccaaaagtgaccttgaggaaccctgggagctcaggaaggaaggagcgcccagaagcagggacagggagctggttggggaggaccagaaatcaggtttgtgaaggttccagagaggacctgtccttgcgaggagtgtgggagactgagatgggggaggggtcattggaatgatgcgggcgctacttggcattgtccattgtgaggcaccaccggggtcatcagggattggtggagagggagtataaagccccaggtttgctaagggagggcccagaccgaagaaggtttggcggatagcagaacctttttgtctccctctaattgctcctaagcctcacgctcccttgccccgcgtgtcctgttgcttccctgatcttctccgtgacctgtagctaaaccttccaccagcgcttgagaacttaatttgaaccggatcctttcccagacccctttcttcttctcctcctcctcctccacctcctccaggtgcccaacagcccccttctcctttcccttcccttacttccccccttcccctccccttccccttcccctccccctccccttcccctccccctccccttcccctccccctcccctgcccctccccaactcagatccggccccggtccccgtccccttccctcccccctgccctaagccacctccacctctgtcctggccgcctcagggcaccctgaaaggatcatgacatgcggctgcgcttttggctcctcatttggctcctgctgggatttatcagccatcagcccacccctgtgagtagacgctggacccgcggggtttcttcctttttactgggctgtgtcacgcggcatgaaattacacagctcaggccttgtaatcccagcactttagggggccgaggtgggcagatcacttgagtccagga

SEQ ID NO: 15682 - DNA, 2300 bp, Homo sapien
agccaggcgtgatggtgggcacctgtaatcccagctactcgggaggctgaagcaggagaaccacttgaacccaggaggcggaggttgtgagctgagatagagccactgcactccagcctgggcaacagagcaagactctgtctcaaaaaaaaaaaaggaggcggggtgcggtggctcacacctgtaatcccaggattttgggaggccgaggtgtgtggatcacaaggtcaggagatcgagaccatcctggctaacacggtgaaaccccatctctactaaaaatacaaaaaattagccaggcatggtggcaggtgcctgtagtccaaggtactcaggagactgaggcaggagaatggcgtgaacctgggaggtagagcttgcagtgagccgagatcatgccactgcactccagcctggggggcagagcgagactccatctctataataataataataataataataataataataataataataaaggagaggataaaatctgtaagtggtaggcagccgccaggctaatgaaaacagatattttttttcatttttttaaattctaattttcacttaaaaagtagaattttggccaggcgcagtggctcacgcctgtaatcccagcactttgggaggccaaggtgggaagattacttgaggtcaggagttggagaccagcctggacaaaatggtgaaaccctgtctctactaaaaatacagaaattagccaagtgtggtggcacgcacctgtaatctcagctatttgggaggctgaggcaggagaatcacctgacccttctaggagatggaggttgcaatgagccgagatcttggcaatgagccgagatggtgccactgcactccagcctgggtgacagagcgagactgtatctcaaaaaaaaaaaaaaaaaaaaaagaatttcatcattggtagcactgtcagttgtttttcttgatgtgaccgactcagttcatttttgaaacaatgtctgccagctacccaagtctgaataataataatttggctgggcgtagtggctcacgcctataatcccagcacaacatggtgaaaccccatctctgctaaaggcacaaaaattagcccagtgtagtggtgtgcacctgtaatcccagctacttgggatgctgaggcatgaaaattgtttgaatccaggaggcagaggttgcagtgagccaagattgcgccactgcactctatcctgggcgacggagtgagactcagtctcaaaataataataaattgttcttggttcttccatgtataaatggtgttccatgacaggtggtggttggctcatcccacaactccatctctgagagcctttccagaggtaaccattggatttatgattaatctaaacactttatccattcttctcattttgacacgcagaatattaagaagaaatatattcaacggttgagatttaataaaattgatcatttttactgcttcaacaaggacattctgaaatgaaactgtggccaggtgtggtggctcacacctataatctcaacactttgagaggccaaggtgggaggatcgcttgagcccaggagttcgagacaagccagggcaacatagtgaggacctcatctttacaaaaaataaataaataaataaacattagccgggcatggtggtacacacctgtagtcccagctacttgggaggctgaggtgggagggttacttgagcctgggagttcgaggcttcaatgagcccagattgtcactgcactccagcctaggcgacagagcaagaacctctctcaaaataataatagaaagaaagaaagagaaagcaagcaagcaagaaggaaagagaaacaaaacttgcctttcctttttttttttttttttttaccatgagcacatactggtgccagttttctatctgttgcctcccagttccaaatccatttattgcactgcttgctaccagatgtggaactggcaaacatttcttctttgccagtagagggcgccggaggaacaccacaggaggaaggggcttgtcctggttcctcctctgtcccacccccgtggcaggcagccctgcaccggacacacagtggcattcaacttcctgcctgccagccccagtgtgtggttcccagcctgacaaccttggcaccccagcaccccagcaggaggggtttctgcttgtggtcccctggccaccagcctcggccagctggttgtggaccagccgtgacctggggcaacccagccaacctcaccgtccaatgggctgcagccacctctctccagtgagg

SEQ ID NO: 15683 - DNA, 2300 bp, Homo sapien
tggatccactcaccttacagatatttcattgagtgcctgcagtgtgctagagtactgcagagcaagaaataagtcaagatcctaacccttagggagctgacattagcaggaagacagaattaaaggagctgttagaatacagtgggataaattgctcggcgagcacacaggaggggaaactagcacatctgaaggcaggagcgaggcagggcgaaggactattacccaaaaagtaaggcagtgttgtagctaggtgtgcatgtgtttggtgcaggggctgggaagagttccaatgctaacatttagagcgaagagattgagacattgagagtttcgctgggattaagaccacatggacttaacagctccactccattctccacgttgcaaagagtaaacctttaaaaatgcaaatctgacctcttttcacttgtttttttgtttgttttggggggaaggagtcttgctctgtcacccaggctggagtgcagtggtgcgatctgggctcacggcaacctccgcctccttggttcaagtgattctcctgcctcagcctcctgagtagctgggattacaggcatgcaccaccacgcctagctaatttttgcatttttagtagagacagggtttcaccatgttggccaggctgatctcaaactcctgacctcaaacctcccaaagtactgggattacagaccatgcccagcctcttttcactttcttaaataagctccccactgctttgaggataatgtccgtgtctcttacaagacttgggagcctttaaaacctgatcccagattagctacctcttcccccctttaattttatgcttaggacaagctgagtttttcttagtttgtcatatcctatttccctgcctagaaacccatctccccctgccctcttatcagtttttttttataatttaaatttttttttttttgtagagacaaagtctcactttgttgcctaggctggtctcaaactcctggccttaaacgatccttctgcctcggactcccaaaatgttaggattacaggtatgagccactgcgcccggccctcctgtcccttatctgggtctcccaaaactggattaagattaggtgtcactcccatttgctcttgtagtcctctgtgcttcacctactagatctcgtcaaattctctgaattcaccactagcatgaactcctccagagcaggaagcagtttaattatccttgtgtccaaaacaactaactgaatactccaatgcccaactcattttgaatgaatgaagctgccttcattgcagggtcgggtggaggattttgaactcggaactttggccttcagtctttgttattacagtttaaagattcattctcgggcatggaggaacaatttaggtcaaaatcacaaaaatctgaaataatttaggacgaggcgtaaatttatctgcaaagatcaacacgctcaaacgaatcactaatgctcatcagtcttttacttaaagcaaacaaggtggagggtagctccttgcgaaacctaccacctgcctaaaagcgcagtggctcgggtggtccagtcccggagactttcttggcacttaaggctctgcccacgggccgccaagtggcggaagagcctcacgcacgacgtgccgcctcacactcccgcggaggcatcgcgacgcagcgacggcgtgggcggagaggccggcccttcctctggcgccttcggctcctccccctgcgcctcacacgctcattgtgaagcgacagcggccgccggcttctaaggcggtttgagaccttaagaccctaaatccttggcgcgcgtgagcgcccgcgccgctccttacccactcccagggctaggggtgcgaggttcaccgacttgattctctcccactttcccgccgggagctaaccgcgccggtgtgcgcggcacctcgcgccactgctcgctcctggccccccccccccccccccccccccgggagctcccacccgcgcgctcctccctctccgctccccggcgacgcgcacgcgcgccagcccggctcgcgccctctcgctttcctccagccgcgagaccccctccccttccgcctcgcggcgcttcctcgcgccgcggtcttctctctccacccccgacaccgcggggctccccccgcccgcccacggcgggccccggctgcccgatccccctcgcttcccgcgctctccagcggggccccagccccggccccctctctccctcccttctctctaattccccttccggacgctgccatcatgttgaagcctcagc

SEQ ID NO: 15684 - DNA, 2300 bp, Homo sapien
ttgctgcgtagcttgagttgactggaacagaatccctgccactcctttaagcattccagttgtcgatgatgcccatgaggccatttacctgcttgtgttacctgccttgagcttctagacatttaagttggtgactctggttgtatagtgtgtaaactttcttgctgttttgagtaaggcccttgtactcactgctgttgaccagcagtaaccatcctacagctcccccttttcttccagtgggccggatgtatcccccgcgttctcccaagtctgctgcccctgccccaatctcagcttcctgtccagagcctcccatcggctcggcagtgccaacctcttcagcctccatccctgtgacctcatcagtctcagatcctggagtgggctccatttctccagcttctccaaagatctccctggcccccacagatggtaagagctaggtgtttgagtgctgtgaatgcatatttagtgtgatttgtggttctggacagaaggacctttaggcatttctctttacttgaacagtaaaagaactctctaccaaggaacctgggagaactctggagccccaggagctggctcggatagctgggaaaggtgagggtggttttttttctgctgaggattaatgctcctttgtctgggggagagtatttcagttaggaagtttgttggaattcagaggcaaacaatgtctatcagtccttggattataatttcacttctgtgatcctcaagagtttctcttttttctttgctttcttgtcctctgttcttttggcactgtgtagccaccttagagaaagaatgttttgtattttcttctttttgactgttttctcatagtccctggtcttcagaatgaacagaaacgattccaactggaagaactgagaaagtttggggcccagtttaaggtgagagaagagtgagctgggatattagcagggtaaaggggttgggagtggttcgtagatgaggcaaaggactagataggagtcaaagagatgagatcaaaaaaggatgaaagaagaaagccaggactagggtctgggtcagactggactgtgtgtgtttctctcttccagcttcagcccagtagctcccctgagaacagcctggatccttttcctccccggatcttaaaggaggagcccaaaggaaaggagaaagaggttgatggtctgttgacttcagagcccatggggtctcccgtctcctccaagacagagtccgtatcggataaggaggacaaaccacccctggcaccatcaggaggcactgaggggccagagcagcccccaccaccttgtccaagccaaactggcagccccccggtgggcctcatcaagggagaagacaaagatgagggccctgttgctgagtgagtggagcggggtggggctctgggaggatggcaggagggatgagagcaagccgtgaagatttactgtactttctctcacagacaagtaaagaaatcaacgttgaaccctaatgctaaggagttcaatcctacaaagcctctgctgtctgtggtgagctgggacaggagaatgtggactttggtttctgtggggagacttgggcagtgcttatagatgaatagggggaggaacacttcacttccaggaccacttgcctggcaggcagtgtgaggagatgtcataaaaatgtaaggatggcacctttggggctggcttggggaaaatggactcaggtctctaggtttgggtgatcaggggatcagggatcccagtgagtctgatgaggggttaacaggcttttctttggttcttggcatttggctgagggagtattggagtggggtagtcatgaacagaggccagctgacttggcttgagcccctgtatttggaaggtttgtgatcttggacgtcacttacattctctgcctcacctgtaactttagaatactcatctcctcatagggtttaatgtgaggctttatcaagataagtgcagaatatgtttggtatgcagcatttcacgaatgttaattattaccactctaggcatggccaggagtagaggggaaaatacaaaataaaattgtcctcccttgtttttgcagaataaatccaccagtaccccaacttctccggggccccggactcattcaactccctccatcccggtgctgacagcaggccagagtgggctatacagcccccagtacatctcctacatacctcagatccacatgggaccagctgtgcaggtatgcagagagactggccgggcccagggttagcggggtgggatttggttgcg

SEQ ID NO: 15685 - DNA, 2300 bp, Homo sapien
ggaaagagggagaaccagtgctgagcacaccagagggggctggcacacagcccagagcagagggaccaggcgcaggactcaccataaagggcttggggggtaggctgctctgcagaagggtactgaggggtagaggatgacacgatggcctggggatggctgcccgacgtcagcatgcgtgggttgctctgaagcatgggggcaaacaccggctggcgggacagagagaggagtggttggcacagccgccagctgggaaggtgtcctcctgccagtcactgcgtgcacagcaccgcttgggcctcctcacaatcaccctattgattcaacattcataacgatcccacccagcagacactattttctctacacttcagagatacagatgtccaatgccttgttacaggtaccaccagagccagggctcaagcccaagtctgacaccgccaataccacagagggccgatcccacctacaacactgcctgccacccctagccagctcccaagtctctggagaagatgggatccctagcaggggccctggatcctcactgccctcctgggccgcagtcacctgtgaggggtagtgggccatgggctgcatcatggctggctggcctgggaactgctgagggttgtaggggatgtaggaagaatagggcgtggcagccaccagaggcgggccagcagccgcggcggcctgcatcatcggcggggctgaggctggctggtgttggtccgagcgctgcggaggaagggagcctggaagaggaggaggagaggagagctcaagctccacctgccagtaggcccttggcagcctcgccgcctgcccctcccagccctgctcaccttttgctccccggtacttgccctgctgcccaggcactgaattggatacaggatatggatacatctgaggtgcctggggatgaggacacagatgaggctgaatgactcgctcacgaatgcccagacaggcctgacctggtccctcaaccagcgcaaccaaatcccaccccgctaaccctgggcccggccagtctctctgcatacctgcacagctggtcccatgtggatctgaggtatgtaggagatgtactgggggctgtatagcccactctggcctgctgtcagcaccgggatggagggagttgaatgagtccggggccccggagaagttggggtactggtggatttattctgcaaaaacaagggaggacaattttattttgtattttcccctctactcctggccatgcctagagtggtaataattaacattcgtgaaatgctgcataccaaacatattctgcacttatcttgataaagcctcacattaaaccctatgaggagatgagtattctaaagttacaggtgaggcagagaatgtaagtgacgtccaagatcacaaaccttccaaatacaggggctcaagccaagtcagctggcctctgttcatgactaccccactccaatactccctcagccaaatgccaagaaccaaagaaaagcctgttaacccctcatcagactcactgggatccctgatcccctgatcacccaaacctagagacctgagtccattttccccaagccagccccaaaggtgccatccttacatttttatgacatctcctcacactgcctgccaggcaagtggtcctggaagtgaagtgttcctccccctattcatctataagcactgcccaagtctccccacagaaaccaaagtccacattctcctgtcccagctcaccacagacagcagaggctttgtaggattgaactccttagcattagggttcaacgttgatttctttacttgtctgtgagagaaagtacagtaaatcttcacggcttgctctcatccctcctgccatcctcccagagccccaccccgctccactcactcagcaacagggccctcatctttgtcttctcccttgatgaggcccaccggggggctgccagtttggcttggacaaggtggtgggggctgctctggcccctcagtgcctcctgatggtgccaggggtggtttgtcctccttatccgatacggactctgtcttggaggagacgggagaccccatgggctctgaagtcaacagaccatcaacctctttctcctttcctttgggctcctcctttaagatccggggaggaaaaggatccaggctgttctcaggggagctactgggctgaagctggaagagagaaacacacacagtccagtctgacccagaccctagtcctggctttcttctttcatccttttttgatctcatctctttga

SEQ ID NO: 15686 - DNA, 2300 bp, Homo sapien
tctacttccctcgattatcaagagccacttcccagacacaaagcagagctctgggtgcccatccagccccaccctctgcagcagctgccctgcctgaccccgcgttcacctcaagggcacagagagcagagcctacgatgactggggtctcctcccctttatagccaaactcggtgagcagctcccggatctccagttccaccagttccaccatctcagagtcctggacagcgtcagccttgttcacatacaccaccacatgctccaccccaatctgtagatgccagagagacagggacaatatacagaggggcccaactccccactcttcccttttgcatccttacccaggctctgagtacctgtctggccagtaataagtgctctcgggtctggggcatggggccgtcattggctgctaccaccaggatgcagccgtcgaggggtgcagtgcctgtgatcatattctggagaggagaaggaaaggaaacagccaagttcaacgagctcttcagttcacatccatatagccaagtgtagcagttagaaactcaggcccacctttctctaccatctcctcaccacccattctgcgtggccaagaccacaaacctgccatctcatacccaaacactgaatatcttaatctcctccccacaagcctaacatttatcctgacaagaggcagcttctggccctgtctccagtgtcccagcaaccctcaccttaacataatctgcatgacccgggcagtctgtgtgggcgtagtggcgggcggcagtgctatactccacatgagccgcattgatggtgataccccgagctcgctcctccggggcattgtcaatctcctcgtacttcttgaacttagccccacctccctcagctagaactaaaggaggaaaagaacacacctctcagctaaagttccagtgctagaggcagagcttagaccacgcccctgaaccctcccacctaaatacataacctcctccaatctctaactcttccagcagagagaactgtgggtcagaaagaaatgttagagggccttaagggtctgccctgtgacttctttagggtacagcctctgcttgcagagcattccccacgactttgtgatccccaagccattggtggatcacaaagttcttcctgttcaggagaaatttgtctcttgcatctcccaatccacctgtcgcacaaattcgggctcttggggccacagtaaactcctccagcagacactctgctggccttgcctccctggctccaggtcccatcagtagatagggcgctgctggacgccccaaccccactcactcttcgtgatggctgcagtcagcgtggtcttcccgtggtccacatggccgatggtacccacattcacatgtggcttgtcgcgcacgtaagtcttcttggcctccacggccaggccgcggcacaagagaggcaatgccggggctttcagcagccgcaacagaccctgcagcaggaaggtccggccggcggcgagacctgccgggaccgaagcttggagtcaggcagggaaggggtcagaccgaacccagccacctaccactcccccaaagtgttcctgggccgccatcgccctccctgaccactcaccgctgaagtggggcgtcgcgcgcagcagggtggcggccgccattgtggtcatactcgcgccccggtaaccggggagccgggaccaggagcccgagcgcacagaagaagaagggcgcctgcggctggaaggcacttccggcggaagttagagctgggagggcaagtccgggcccctctagccgccagtgtctatggccgtctcagccgacgtcgggcgcgcggctgaagacgtcatggagggggctggtgtctcgagggcggagtatgatggagaggttttccaccactcgcgcctctcgggctgaggggcaacgtagttctctctggcggtcgcagggggcactgaggagcgtcccctaaatcaccggcgccgcgaaggctcatgggcgtagtagttctcaggtcggcgggctgtggaggtgatcagagtgggagtcaggcgggctaggccggacccggagggaggggctcgggctccgggaggcagctgcggctccgactgctcaggaacctcctcctgggcccggcagagagagaccccgagtcccccggagtccgactcgctacgcgggtcttgcgagatatctggccgcctctgccgcagctggaggtaggggaccaggtcctggacgcctttcggggatggggtgaagtgtgacctccctcttcgc

SEQ ID NO: 15687 - DNA, 2300 bp, Homo sapien
aaaaaaaatttttttttttggagacggagtctcgctgtgtcgcccagggtggagtgcagtggcaccatctcagctcactgcaagctccgcctcccgggtgcaaacaattatcctgcctcagcctcctgagtagctggtactacaggtgcacactgccacgcccagctaattttttgtattttagtagagacagagtttcaccgtgttgcccaggctgttctcgaactcctgaactcaagcaatccacccgcccggcctcccaaagtgctaggattacaggtgtgagccaccacgcctggccaaaatatttttatagagatggggtctttcttggctgagcgtggtagctcacgcctgtagtcccagcactttgggaggccacaatgggcggatcacttgaggtctggagttcgagagccgtctggccaacgaggtgaaaccccatctgtactaaaaatactaaaattagccaggcgtggtggcacatgcctgtagtcccagctactcaggaggctgaggtgggagaattgcttcaacccaggaggtggaggttgcagtgagccgagatcgccccattgcactccagcctgggcgacagagtgagactctgtctccaaaaaaaaaaaaaaaaaaaaaaaaaagatggggtctttctctgtcactcacggtggggtgcagtgtcatgatcatacctcaccacagccttgaactcctgagctcaggcgatcctcctgcctcggcctcctgagtaggaggggctatagctgcatgctactgtgcctggctaattttaaatttttttttgtagagatagggtctcctaatctgcccaggctggtcttgaactcctggcttcaaaccgtcctcccacctcagcctcccaaactgctgggactataggctggcactatagccaccgtgcccagcctcttctcagttttagaagagtgtttgttatatagcttcccagtctgtgcatagaccccacggaatcataacctccaggggaggaattagggaatctatttgaaacaaacactgtccactgagtctcaggatctgatgagttccgaaacattagccagggttaagcagccataattaacactttggagtgccctgtggaagctgccatgagatgatggatgtgaaagttaagggacattgactacccttgcacccattcattcaacattcactgcatgctccaccctgttaggtgctggggacaccgacagattaaaggagactcaggctccccttaaaggctcccctagctggctcctcatccttggctcctcatctgcaaaattagatgggtggggcgatgcccaacggaactgctccttaggctgctgagggactacaggggtgggcagcgaagctgtctgtcttgtgggctctggccctgtgaggtctagcagtacagggtccccgcaagctgcctgacctcacagggcccaacactgactcctacccagttcatctcctctcagggctagatgtcaggctctccctatgaagtggatactactattcccattttacagattagaaaacaaagtctcagcgaagagggaggtcacacttcaccccatccccgaaaggcgtccaggacctggtcccctacctccagctgcggcagaggcggccagatatctcgcaagacccgcgtagcgagtcggactccgggggactcggggtctctctctgccgggcccaggaggaggttcctgagcagtcggagccgcagctgcctcccggagcccgagcccctccctccgggtccggcctagcccgcctgactcccactctgatcacctccacagcccgccgacctgagaactactacgcccatgagccttcgcggcgccggtgatttaggggacgctcctcagtgccccctgcgaccgccagagagaactacgttgcccctcagcccgagaggcgcgagtggtggaaaacctctccatcatactccgccctcgagacaccagccccctccatgacgtcttcagccgcgcgcccgacgtcggctgagacggccatagacactggcggctagaggggcccggacttgccctcccagctctaacttccgccggaagtgccttccagccgcaggcgcccttcttcttctgtgcgctcgggctcctggtcccggctccccggttaccggggcgcgagtatgaccacaatggcggccgccaccctgctgcgcgcgacgccccacttcagcggtgagtggtcagggagggcgatggcggcccaggaacactttgggggagtggtaggtggct

SEQ ID NO: 15688 - DNA, 2300 bp, Homo sapien
gctaagctattagggtttaagcttggagctacaagaagctattttgccactaagagaggagagcctgcctgagggtgaagccaaatgcatagggaaggcagaaccagagatggtgagccacaggttcctgatatcttctggcccctgtgttcacctgtctgaatctgtccgctctggacttttcgattacttgggccatagcttcctttactgtttaggccagctggagccgggtcaatcagacactggatgggtggaggatctcactgtgctcatgctttcaactaccctccgtactttaattgttctcgatttctctaactggccttgatgtctcttcttagctccagactatatgcccacagacgtcccaaaagcacgtctggaattgacctcattattattattgttattatttttgagatggagtctcgctcttttgcccaggctggattgcagtggcgcagtcttggctcactgcaacttccgactctggggttcaagtgattcttctgcctcagcctcctctcaagtagctgggagtacaggcgcctgccaccaagcccggctaaaatttttgtatttttattgcagatggggtttcaccatgttggtcaggctggtctcaaactcctgacctcaagtgatccgcccgcctcggcctcccaaagtgctgggattacaggcgtgagccactgcgtccggccttgacctcaattctttttttttttttttttttttgatagggagtctagctctgttgcccgcgctggagtgccgtggcgccatctcggctcaccgcaacctctgcctcccgggttcaagctgttctcctgcctcggtctcccaaggggctgggattacaggcgcctgccaccacgcccggctaaattttttgtatttttagtacagacggggtttcaccatgttggtcaggctggtctcaaactcctgacctcaagccatccgcccgcctcggcctcccaaagggctgggattacaggcgtgagccagcgctcccggccctgacctcattttttttttttctatttttaaaatagggattctagttctgttgcctgggctggagtgccgtggcgccatctcggctcaccgcaatctctgccttccggattcaagctattctcttgcctctgcctccggagggactgggactacaggcgcgcgccaccatgcccggctaatttttgtatttttagtagagacggggtttcaccatgttggccaggctggtctcgaactcctgacctcaggtgatccacctgcctcggccttccgaagtgctgggattacaggcatgagccactgcgcccggccctgacctcattatttctacccaccccctcccccaccactaccaccatcttcatctccagcctcagagatgcaaactcctggaccgcctgcccctttcctcagataaaccaaggtcgtaagttcaggctccgcctccccgcagggcctccccaaggtcacccgcttctttcctcgctcagctccttggtggcgttgtccgcgtgcccctccacagcggggccggcgctctaggctgcagcgggccgttcacacagcctcatcatctcgctggtttccggtgctcggcggctactctagccctcagccgggccctgggactctatcccctaaggccggttctctatggtcgacatcgcccctttgtcccgaatttcctccgggaggacgctctggtgggatccaagcacttcccccgctgcgtctgtggtcgcttttaggtgcaactggagaaggcactgaagccctacgagattcacaccgtcttcggtctcctggggtcggcgccgagtgggaggatggcggaagtaagtatgaaggtgcccttccctcccgccgctgttctctatggtctcttccttcagcgacgggaaagggggtcctgacgcctgcgcggaaccgggctgggcgctcgtcgcgtagtgggtgggggcgcagggagcgggagccgccgccgccgccgccgccgccggagctaacctcggggaccgagatgcaggtgggaccggaaccggaacccccctcttcaagtaccttttccctctccgcgacccggccctggcgcccgagaggattcctgggtgggggtgggcgtggagggccgggggctggagaggcactcggccccggagagtgcagcagacagggctggtcccgaggtggatgcggccccggaaaatgggcggctggggggtgtccagggagtagggtcggatcggagtatatggaccaccgggcccggaggg

SEQ ID NO: 15689 - DNA, 2300 bp, Homo sapien
tatggaccaccgggcccggagggtccgagccgagagcggagcctgcaccctccacctcccgcccttcgggaaatatcagaactgagccaggaggcaggtgcaccgggaaaatgtgtctgagtcctgcttggcagaagagaaactgagtcaccagcttaggagtcgcagggtcagcgggcctgaagggggctgggtctgtctgcggtgcggaggattgggtgggcctgtgtgagccgaggtggccgctggctggagattggtttgcacttcttggctgggttcccccgtgctccatgactcctgcatctcctgattgtttctcgttggtttggagttgtccctgcggttggagccatctgagcttgtagggtcgaggcccaggaggaaggggagggttcaccgacttacagcctggctgtaggtttgaacaggagtctgaggtcgctgagggtttggggaggctttcctgagctgctctggccccagtcctggggctgtcaccttccagtattgcgtggcgggaggagcgctaacaagagccaagggttgtaaattccacacccagctctgccactttctagttgtaagaccttgagagggctcctcctttctctaatttctattttagaaaattggaacaataatattcttctcccacatgaagatagtaacaatggcagtcgttcagcggatgcttactttgcgttcagcgctgacataccccattccatgtaattctctcaacatttcgaggggagggatcattagctttgtttaacagatagaaaaacggaggctcagagaggacgtggaatttgttcaagataacatcgctcataaggtggctggactgggtgctcataaggtggtttgagccctggtctgactcaagtccatggccttaaccagaaggctaacctgcctttagggcatactccccagtgggagaagaggaaggtgaaaaatcctagggccccagctctccctgtgatgttttgtttacgtgaggccagcaaagacttgacctgagccaacccagtttctcctctggggcccctgcggcctctggccccagactgaagggataccaaagaagtgggctgtagctatttcacatctccttcacgcagtgcgtgggtgctggactctggggtcagctttcaagacaattactgttttggtccatcatgcatccatcctcattaatgaatcggccccctccaaagagttggaccctaagatgcgtgaggcaggctctctaaggtctagaatcccagctcctctctagccccctgcgagctggggcggtgaggtgctatggctgaggctggcccagccgggccctggggacagggactatgaagtggggaaaacagtagacttggagttctgaaacttttctgagcttcggtttcctcatctgttcgagaggtctttgaaacctctcagggaaaggtaagataaccaagtgggagcctctagaatggctcatgggaagtgtgacatgaatattggaggatccgatgtagagggggggtgatctggaaaagttcccttttttagggggaaggtgctccaaagccctctactgctggatccaaagctaaggaaagtgggggcaaatgtggcaggctcggggcaggttagacgctggggagccagttggctggggcctgcagggtgccaggatctgggagagggaagggaggtgttgggctcccttccccattgctctctgcggagtctgaagtagggtcggacgtctctggctgggggtgggatgcagcctccggtgcgccctcagcagtgaccctcgtgtgtgcctctctcttcctttcgcagctgctgccgcccacccctcgtcttctggctgcctccctctttgtgccccacaggctccccctctccacctcctggggcccatcatgaatggtgccccttccccagaggacggggcctccccctcgtctcccccgctgcccccacccccgccccctagttggcgggagttctgtgagtcccacgcccgggctgcggctctggactttgcccgccgttttcgcctctacctggcctcccacccccaatatgcggggcccggggccgaggctgccttctcccgccgttttgctgagctcttcctgcagcactttgaagccgaggtggcccgggcctctggctccctgtcgccacccatcctggctcccctgagccctggtgcggagatttcgccacatgacctgtcccttgagagctgcagggtgggtgggcccctggctgtgctgggcccttctcgatca

SEQ ID NO: 15690 - DNA, 2300 bp, Homo sapien
ccatgtttgggcattcccactgctgtaagacagtagcccctgtcactcctccaggtgccggtggggagacgccggccagcgccaaaagccttggcgggtgtgagcctgagtccagcggagacggtgggtgctgggccgggtggaggtgccgggggctgtgtctcttggaagagaggctgctaatgctctcctgcacccccaattcagcccactgtcccccactcccctcaggtcacagcaggattctgcttcaggggaggggtttgttggaactgtgaaaaggaggcaggaaggagcaccttgtcctcaactcacccaggaggccgcgcctcacccaagtccaggcagaagggatgcatctgggaggctgaaccctcaagttccatccacccctgctgccatccccctccccaaaagtgggggcctcccttttctttgctctgctgtctcctattctgtcctctgcttcggagtttgagccccagaatggaaagcagccttaagaagccacacttaggaagtccacatgcctctgctcatttcaggaaacaggcctagacagaggacggacttgagcccagggcaccaggccccttcccctcactgacctttcaccctgactctcatccagcctttctgcctgcctgtcctccccttcctgcacccctggtaccctccctcggctcctccagcagctgccctggtggtaaccaagagacgcccccatcctggagcaggggtggggaggggcagctcagagcagctgcttctctgaggaagctgacaccaaggccagcattcagcaacaacttgtggctttgcacccagcgccggggtccccgcccacctggctccctgctgtccctcttccccactgctgctcggacttccctctgaccctggtggctctgtgtctctgctccctttccccctaggtctagacatctgtccttatttcccccagacctgtccccagaagtccacccttccccattcctttggtctggagcccctgcttggtccagcttccccaggccccgacacctttctgtggggtctgcctagctcctgcacgcacacagcatgggcctgatcctgttcccctcgtggacagatgcagcagggcagagtgcagcgcagaccacaggcctctggggctggccacagaaaccccgttggttagagcacagtgtgggatgaggtgaccctcagtgcacgacttggggtgacccctgcccccatcctgagacagttacccctccccctctgccatcagcacattctgtagcctcttgggttacttggctgccttggtgtcccattttcttgggggtggggtggggattccctatccaggatgggggggccctcagggctctgttcccagaggctgagttagagcgatggggaagggggggggcagttttggggagagacaggcagtgctggctttgctcaccagggcctggacactaaatcccttgttgatggctgtggcaacccctccctagggtagggttaccatcttcggccctgtccccttgactctctcccctcacttccccttgtccctctaggagccactcacttcctctagcccccaaaagatgttctcccttcatcagtcccccaaaggcttggggtatctctgccactgcttcagcaaatggggtgaggaggaaggagactgcggcaatggaaacaggctccgggcagatgaggcaggaaggggggtgtgaggaaagggacaggtgaggccggggatggaagagggctccgggaagaactggggggatgagtttggaatgggaaattcaatgcagctggggaagtcgaggcaatgggggggcagggtcagtagcagatgacagaaagtgaagtctctccctaccccacttccctggggctggggctacctttgcgtccctcatgagtgacatctcaggctgcagccccactgttccccctctgtcagcagaaatatctctcttttctgaccacctcctgctggagtctcagccagccaatccctgatctggtggaggggggagcccggcctccccctgctccctcataaggaccagctgggggccggggggtggccggctgctcaagtgggacgggggtcagagctttgtggagggaagaaaaacctggagggggcaggagagtaaaaagaagaaacccaggcagacaggcagttggacacactgaggaagaccccccacgagtgggaaccccctggaaggaacacaccggccccggcccccaggaagggagcacaatggaggccgctcatg

SEQ ID NO: 15691 - DNA, 2300 bp, Homo sapien
ttgtccctctaggagccactcacttcctctagcccccaaaagatgttctcccttcatcagtcccccaaaggcttggggtatctctgccactgcttcagcaaatggggtgaggaggaaggagactgcggcaatggaaacaggctccgggcagatgaggcaggaaggggggtgtgaggaaagggacaggtgaggccggggatggaagagggctccgggaagaactggggggatgagtttggaatgggaaattcaatgcagctggggaagtcgaggcaatgggggggcagggtcagtagcagatgacagaaagtgaagtctctccctaccccacttccctggggctggggctacctttgcgtccctcatgagtgacatctcaggctgcagccccactgttccccctctgtcagcagaaatatctctcttttctgaccacctcctgctggagtctcagccagccaatccctgatctggtggaggggggagcccggcctccccctgctccctcataaggaccagctgggggccggggggtggccggctgctcaagtgggacgggggtcagagctttgtggagggaagaaaaacctggagggggcaggagagtaaaaagaagaaacccaggcagacaggcagttggacacactgaggaagaccccccacgagtgggaaccccctggaaggaacacaccggccccggcccccaggaagggagcacaatggaggccgctcatgctaaaaccacggaggaatgtttggcctattttggggtgagtgagaccacgggcctcaccccggaccaagttaagcggaatctggagaaatacggcctcaatggtaagtgtcccttggaagagcggctggtaattaatgccctcctgcacccccaaaacacacgcacacgcatgcacgcgtttctcccttcagggtttcttaaggaagagctgggccgttgtccaatgctcgcagggggaagaagatactgagaaaacagagtcccgagatccagagttttgggaggttttaatgggatgaacttgatgaacctcaaggtggcctgattctcttagccacaaagtcttgggtgtggggggcatgaggctgaaccccaaatgaatctgtccttttcttctttttcctgggtagagctccctgctgaggaaggtaagttactggaatccctgaactctcataaatgaccaccccccaccccgccctgtcccactccctcctccctgcctctttagattctttgagcaaatatcccttcccaaaaggcaaatctccctccctaaaggttagagtcctgtccggggcagaagtctcccaggcgctttctccttgaagcagccaacccttgaactgccccccactttgccgagtctgtttctggactccaggcgagcttcttagcccttctctgggcaccaagctgtctgcccaccaccctagagcctccccactgcaggccggagtccagggcgctccatcccagaccttcacccactagaccttaacccggggccctccccttgcctcctcccccagggaagaccctgtgggagctggtgatagagcagtttgaagacctcctggtgcggattctcctcctggccgcatgcatttccttcgtaagtgtgggagggtctctgggggctggctgggggtgtgaggctgggatcgggcgaatgcggggctcgcagtcactggatcctcccgtccgagtcccgagcatcccattgtacagacggggcgggctggcgcgcagcagcgggtgtgattcgcgtcctcctctctcctcccctgcaccccagaggcaggttttattttaagctttaagggtgttctcagccaaaacaccgaagctaagccaccctcgcggcttcaagagcttggagagctcgggttacccacccgaactccgggctccgggtcccgccgcgatgccggctgcggcgcggggggccactgccactcccggcatgcgccgggcggacggccgctccaccaatccccgcgcccgtcggcgcccctgccccgccctccccagcctcctgacgctgattggtcgaggggaggactcgctcctagtggcgggaaagcgcggcggtgtgatgatgactccaaggagcccggcgcccggtcagggagggcactggcatccctcattacccgcccagcctggccttagcccttccccgcgctccctaggcacccccacccccgcagggcatctccagggctctgcctcctctcccgccctgggggctactccccatcccgcggtccatctgcatgtc

SEQ ID NO: 15692 - DNA, 2300 bp, Homo sapien
ctctattaaaaaaaaaatttttttaattacctggttaaattcataggggtctgggtaaaaagtaaaatacatttttaaaaatgttaaaagaaaagagatgaactggacatggtgacacacacctgtagacccagctactggggagcctgaggtgggaggatcacttgaacctaggagttggaggctgcagtgagccatgatcccaccactgcactccagcctgcatgacaagcaaggccctgtctctaaaaacaaaaaacaaaaacacacacacacacacacaaaagagagaaagaatgaaccttgggaatcatctagcaaatgtgatctgtggttggtaacaaggtgagccacttgaaccagaacaggagccaatgccactcagcacataggggagttcagctgttgtgttttctgtagcaagactgtctcgagacagttgatctgtgttctggcaaagactccttacttctactagaccagcgccagaatggcaccacagtccctcctttcattttgtacagaggatttcttctaagttgtgggtcacgtagtggcactgccaaaagcagaaagcagtacctcacttccagttcacgttctttctatgaaacacacattttggctgggcatggtggctcccatctgtaatcccagcattttgggaggccaaggcaggcagatcacaaggtcaggagtttgagaccagcctggccaatatggtgaaactccatctctactaaaaatacaaaaattagctgggcttggtggtgggcacctgtaatcccagctactctggaggctgaggcaggagaatcgcttgaacctgggaggcggaggttgcagtgagcagagatcgtgccactgcactccagcctgggcaacagagcgagactccatcccctgcgcccgcccccccccccccgaaaaagacacaatttggggccacgtgtcagggctcacacctataatgccagcactttgggaggccaagcctggcagatcacttgaggttaggagtttgagaccaacctggccaacatggtaaaaccaagtctctactaaaataaaaaaattagccaggcgtggtggtgcgcccttataatcccagctactcaggaggctgaggcggagaatcgcttcaacttgggaggtggaggttgcagtgagctgagatcatgccattgccactgcactccagcgtgggtgacagagcaagagtccatctcaaaaaacaaaacaaaaacaaaaacaaaaaaaaggaaagacacgatttgggctgggcgtggtagcttatgcctgtaatcgcagcacattgggaggccgaggctggaggatctgttgagcccaggagtttgagaccagcctgggcaacatagcaagatcctttctctactaaaaattaaaaaaaaaaaattagctggacatgttggtgcatgcctgtagtcccagctacttgggagggtgaggtaggaggatcgcttgagcctggtagattgaggctgcagtgagctatgatcgcaccgttgtaccactgcactccagcctgggtgacagagcaataccctgtctcaaaaaaaaaaagatacgatctgacccatgatgggcctggcaccatcagcacctgcaggtgcttagatgaatgagatgtttcctgcctctgagcttccaaggccccactgaggtctgacaccaggccctgaggcggcaagcccagggttcaggcttcccacccctccccaccacttcctgacctttcaccccatccccaccccccaccagcttcctccaggggagttttccagatccccacctgacctgtggctctctgctgtatctccccagacggacctgacattcgtgggtgtagtgggcatgctggaccctccgcgcaaggaggtcacgggctccatccagctgtgccgtgacgccgggatccgggtgatcatgatcactggggacaacaagggcacagccattgccatctgccggcgaattggcatctttggggagaacgaggaggtggccgatcgcgcctacacgggccgagagttcgacgacctgcccctggctgaacagcgggaagcctgccgacgtgcctgctgcttcgcccgtgtggagccctcgcacaagtccaagattgtggagtacctgcagtcctacgatgagatcacagccatggtgagagggcccaggcagctgcagccttagtgtccacggagatgaccagatgactgtgctggggagagtggggcccagggccagagggccctggtaagatgcaagaagggtggggattc

SEQ ID NO: 15693 - DNA, 2300 bp, Homo sapien
agtgatcctcctgccattggcctcctaaagtgctagcattataggcataagccaccacactcagccagaggtggttattttagttagggtgatcagggaaggcctcactgaggaggtaacatttgagccgagacctcagctccaagcttggtggaaaacacttggttttatacttgatgaaaaagtaagtgcgtgtttagttttgttcaaaactgccatactctttttgcagagtggctataccatttcacattcccatcaacaaaatatgagaaacctagtttctccacatactcaccagcatttggtgttagcattcttattttagccattccaagaagtgcgtagtgatgaaagcaattgtggttttaatttgtatttcccgaataaatagctaatgatgtttaacatcttttcatgcacatattgccacctgtgacagcagtgaaatatccgttcatatcctttgtccattttctttatttcaagttctggggtacatgtgcacgatgtgcaggtttgttacacagggaaacatctgccatggtagtttaccgcacccattaacccatcacctaggtatcaagcccaggatgcattagctactcttgctgatgctctccctcccccctcccaacacccaccccacaggcccccatgtgtgttggtcccctccctgtgtccatgtgttctcattgttcagctcccacttataagtgagaacatgcatgtttagctttctgttgctgcattaatttgctgaggataatagcttctagcttcatccatgtccctgcaaaggacatgatctcgttcctttttatggctgtatagtattccatggtgtatatgtaccacattttctttatccagtctatcattgatgggcatttgggttgagtccatgtctttgctattttgaatagtgcttcaatgaacatactcgtgcatgtatctttgtaatagaatgatttatattcctttaggtatatacccagtaatgggatttctgggtcaaatggtatttctggttctaggtctttgaggaatcaccacactgtcttccacaatggttgaactaatttacattcccaccaacagtgtaaaagcgttctacctttggccattttcaaactgcattatctgttttacaaaaatcgctccagctgctttacggagaattaattaattaaagggtggagtcgacactgcggaagttcaggagaagtgatgggagctgggacggagtgttagcgctggagatggagaaaaaggggcacattctggaatagtcagcacattggaagtagagtttacgggacttgcaggaggacacgtagaatcaaggacttccaggttcctggcgtgtcctttacagagggaaaaaaggtttgagggaaggggaaccaaggctctggacataaatctgaattgcctgtcaccgtccgggtggaggtcacagataaagagcctgatctagacacaggcggagaggagaggagggatttgagggcgttgggaggaggaaaggggggccagcaggaagcggtgactggctgagtaacaaaatgggggtggggacgtgcaagtttcagactccgactaactacgcggggactccgaggcgctcagaaaaatgaagccgacccggccctgccccgagggacgctccaagagggcggaggtgcagggagggccccgccacaattcgcggtaacgcaagccaggctcgggcggaagggcggccggagccgatcaaaggctggctccgggcaggggcagcgagggagcgagggggagctctccgcaggccggtgtcccggaggaggcataattggagcagggcttccaaggtcacggagagacgccgggcaagacctcttaaggatcctcttccgggcttgaaaggcaggcgtcctcccgaaccgcgcgacccagccaagaagagccggggcggggccggggccggggccgggggccgactcgggaatcttcggccgaggctcggcaatccccccatcctccgtccggggcctccagcccggggccgatccggaaacagccgagcggatccggaaacagccgagaggacccggaagcggtgcgctccgtcaccagggagtgcgggaatccgccgtttgcgctgaggcaatggcggcagctgcgccggtggccgcggacgacgatgagcggcggcggcggccgggggctggtacgtgagggggcgtccgtgcaagcggggaacggtgatgctgggggcggggccgagccagccacctgcggatggggggtggagaggg

SEQ ID NO: 15694 - DNA, 2300 bp, Homo sapien
ttttttttttttttttagacagggtctttctctccctcaggctggagtgcagtggcacaatcatgctcactgcagcctcagcctccagggctcaagtagatcttcccgcctcagcctcttgagtagcttggactacagatgcacatcaccatgcccagctaatttttttttttttttgagacagagtcttgctctgctgcccaggctggagtgtaatggcatgatctcagctcactgcaacctctgcctcccgggttcaagcaattctcctgcctcagcctcccaagtagctgggactataggcgcatgccaccatgcccggctaattttttgtatttttagtagagacagggtttcaccatgttagccaggatggtcttgatctcctaacctcgtgatccgccctcctcagcctcccaaagtgctgggattacaggcgtgagccaccgtgtccggccatgcccagctaattttttaattttttgtagagatgaggtctcactatgttgttcaggctggtctcgaacccctgggctcaagtgatcctcctgccattggcctcctaaagtgctagcattataggcataagccaccacactcagccagaggtggttattttagttagggtgatcagggaaggcctcactgaggaggtaacatttgagccgagacctcagctccaagcttggtggaaaacacttggttttatacttgatgaaaaagtaagtgcgtgtttagttttgttcaaaactgccatactctttttgcagagtggctataccatttcacattcccatcaacaaaatatgagaaacctagtttctccacatactcaccagcatttggtgttagcattcttattttagccattccaagaagtgcgtagtgatgaaagcaattgtggttttaatttgtatttcccgaataaatagctaatgatgtttaacatcttttcatgcacatattgccacctgtgacagcagtgaaatatccgttcatatcctttgtccattttctttatttcaagttctggggtacatgtgcacgatgtgcaggtttgttacacagggaaacatctgccatggtagtttaccgcacccattaacccatcacctaggtatcaagcccaggatgcattagctactcttgctgatgctctccctcccccctcccaacacccaccccacaggcccccatgtgtgttggtcccctccctgtgtccatgtgttctcattgttcagctcccacttataagtgagaacatgcatgtttagctttctgttgctgcattaatttgctgaggataatagcttctagcttcatccatgtccctgcaaaggacatgatctcgttcctttttatggctgtatagtattccatggtgtatatgtaccacattttctttatccagtctatcattgatgggcatttgggttgagtccatgtctttgctattttgaatagtgcttcaatgaacatactcgtgcatgtatctttgtaatagaatgatttatattcctttaggtatatacccagtaatgggatttctgggtcaaatggtatttctggttctaggtctttgaggaatcaccacactgtcttccacaatggttgaactaatttacattcccaccaacagtgtaaaagcgttctacctttggccattttcaaactgcattatctgttttacaaaaatcgctccagctgctttacggagaattaattaattaaagggtggagtcgacactgcggaagttcaggagaagtgatgggagctgggacggagtgttagcgctggagatggagaaaaaggggcacattctggaatagtcagcacattggaagtagagtttacgggacttgcaggaggacacgtagaatcaaggacttccaggttcctggcgtgtcctttacagagggaaaaaaggtttgagggaaggggaaccaaggctctggacataaatctgaattgcctgtcaccgtccgggtggaggtcacagataaagagcctgatctagacacaggcggagaggagaggagggatttgagggcgttgggaggaggaaaggggggccagcaggaagcggtgactggctgagtaacaaaatgggggtggggacgtgcaagtttcagactccgactaactacgcggggactccgaggcgctcagaaaaatgaagccgacccggccctgccccgagggacgctccaagagggcggaggtgcagggagggccccgccacaattcgcggtaacgcaagccaggctcgggcggaagggcggccggagccgatcaaagg

SEQ ID NO: 15695 - DNA, 2300 bp, Homo sapien
tatatatatatatatatatatatatatatatatatatagagagagagagagagagagagagagagagagagagagagaaagaaagagagcaggctcttgttgcccaggctggagtgcagtggtgccatcttggctcactgcaacctccatccccctgatcctcccgcctcagcctcccaagtagctgggaccacaggcatgtgccaccacacccagctaattttttgtatttttggtagagatgggttttgccatattgcccaggctggtctccaactcctgagcacaagcaatctgcctgccttggccccacaaagtgctgggaggtgtgagtcacctcgcctggcctgagatatatttttttaaataataatatatagatttttgaagcactggggggcacagggaaggcctctttgaagaagtaccatttgaactgagacctaagtgatgaaaagaaccagtccagcaaagaaccagagcccccagcagagatccaggaaaaagggctgcaagtgcaagggccctgaggcagggaagcacttggcaaggagagtggtggaggcacgaggtggaaaatgtaggtaggtcagcaacactcggcctactaggccttgggttggagtttttattttagctagatgaaaagcaactgacattttttgttttttaaaaaatttctatagagatgggttctcgctgtgttgcacaggctggtctcaaattcctgtcctcaaaggatcctctcgcctcggcctcctaaagtattgggattacaggcatgagcctctgtgcctggctgtaactgacatgttttaagcaggggaatgacatgctctagtgaaagccagtctgggcagctgggtagctaatgaggggattagagagattttgttgaatgaaaggcagattgagtcctgctactcgcccccttcattccccttcattcatgcctcattcttccgcctcccagccgcctcaactggccaaagggaagtggaggccctgccacctgtagggagggtcccctggggcttgcccacagcaaacaggaagtcacagcctggtgagatgggcctgggaatcagccactgagaaagtgggtctcttgggtccctgaattctttttctgagtccctgcagcagtgaaaaagacacagaggcacatagagagtgacagagaaagagagagacagagaggagaggcatggggcagaataagaacagatttaggagttagaactcctgggttcttttaaaacaatttttcttttagagacagggtcttgttgtgttgcccggactggagcacagtggctattcccaggcataatcatggtgcactgcagccttgaactcctgggctcaagcgatccttctacctcagcctcccaaggacctgggaccataggcgtgtaccactgtgcctggcttttgcctggttttaaactgaggcagtatgacttgagctcttaggcattaattgaagctgtatctcattaactgagggcttatgatgtgctggacactgggctaatagtgctgaacatattgtcatttttaatcttcacaaacaatatttgtataggactgttttcttttcttttttttttttgaaacagagtctcactctggtgcccaggctggagtgcagtggtgtgatctcggctcactgcaacctccgcctcctggtttccagtgattctcctgcctcagcctcctaagtagctgggattacaggtgtgcgccaccatgcccggctaatttttttttttttttttgagaaggagtctatgtgcccagcattgttctagagcacttgcaattagtggtgaacaacacggtctctactccaaggggctcacattcttgtgcagaaaacagaaatgaacaaataaacacacaagatcatttcccgtggtagtgagagctgggatgaaaataaaacagcgtggcagggaggaggcaagtgttgtgagtctggagggttcctggagaatggggcctgaggcgtgaccaccgccttcctctctggggggactgcctgccgcccccgcagacacccatggttgagtgccctccaggcccctgcctgccccagcatcccctgcgcgaagctgggtgccccggagagtctgaccaccatgccacctcctcgcctcctcttcttcctcctcttcctcacccccatggaagtcaggcccgaggaacctctagtggtgaaggtggaaggtatgtccaaagggcagaaagggaagggattgaggctggaaacttgagttgtggctgggtgtccttgg

SEQ ID NO: 15696 - DNA, 2300 bp, Homo sapien
gggattacaggcgtgagccaccacgcctggccccagtctaactttatgatggtaagtggggtgaccacctgtgttattgaattggcttgtatggtaggggtgagtagacacaaacttttcatatctttaggacaggaggtagcctgcatcttggagcaagactgaagccaagcttttccctcctaggggaaatgggagacaagagagctaactgccttgacgacggcatttcgtcagggctcccaggtccttgaattcctgaatttggagactggcaagtggcttatgtagccatcatgaagatttacatatgccaggctgggtgctgtggctcacacctgtaatccccgcactttgggaggccgagccaggtggatcacttgaggtcaggagttcaagaccggcctgggcaacatggtgaaaccccgtctctactaaaaatacaaaaattagctgggcaaggtggcaggcaacagtaatcccagctactcgggaagctgaggcaagagaatcctttgaaccctgaaggtggaggttgcaatgagctgagatcgcaccattgcactccagcctgggcaacagagcaaaactccgaatcaagaaaaagaaaaaaataaaataaatagtcgggcgcagtggctcacgcctgtaatcccagcactttgggaggccaaggcgggggcggaggggggtggatcacctgaggtcaggagttcaagaccagcctgaccaacatggtgagaccccatctccactaaaaatacaaaattagctgggcatggtagtgcacgcctgtaatcaatcccagctacttggagactgaggcacgagaattgcttgaatctgggaggcagaggttgcagtgaaccgagatcgagccattgcactccagcctgggcaataagagcgaaactccatctcaaaataaataaataaataaaattaaataaatgaataaaataaaatttaaaaataaataaatacataagatttttttttgagatggagtctcactctgttgcccaggctggagtgcagtggtacaatcttggctcagtgcaacctctgcctcctgggttccagcgattctcctgcctcagcctcccgagtagctgagattataggcgcctgccactacgcctgtctaatttttgtattttagtagagacagggttttaccatgttggtcaggctggtctcgaactcctgacctcaggtgatctgcccacctcggcctcccaaagtgctggattataggcgtgagccaccacgcccagccttattatttctatctttctttctttttttgagagagagtctcgctctgtcggccaggctggagtgcagcggcaggatctggctcactgtaacctctgcctcccgggctcaagcaattctcctgcctcagcctcctgagtagctgggattacaggcgcacgccaccacgcccgcctaatttttgtatttttagtagagacggggtttcaccgtgttggccaggctggtcttgaacttctgacctcgtgattcgcctgcctcggcctcccaaagtgctgggattacaggcgtgagccaccgcgcgcggccagccttattatttctttaaagcatttttgagacagggtctcgccctgtcacccaggctggggtgcagtggtgcgatctccgcctcccgggctccagcgaaactcccacctcagcctcctgagtagttgggaccacagaggggtgccaccacgcccgggtaatttttgcattcttagtagagacgcggtttcgccacattggccaggctggtctcaaactcctgagctcaaccaatctgcccgcctcagcctttcaaagtgccaggattacgggcgtgaggcaccgcgcctggttaaatccgcggtttccacagggaattccaggcccgccttccttctcccggaaaccttaccgctcgaggactacatttcccaggatgccctgcgactaaccaagccggaagacggttgtcttggttgggcgggtccgggagaggctcgtctgtggagaggtggcccagccaatgggtgaggccgactgaatcgaaagctacggtgattgtgccgaggtgattggaatctttggcgccttggtttcagaggtgggcgcatgatgagcgggtacagagaccaatgaaaaggcgggaaggcggatcccgcgcgtggggcgcgaagagttgctgacgagcaggctgtttgtccaatgcaaggcgaaagtcgctgaagggggcggggcgaggcgagaggaggcgggcgtgtgttgtggaggaaagt

SEQ ID NO: 15697 - DNA, 2300 bp, Homo sapien
aatgggagacaagagagctaactgccttgacgacggcatttcgtcagggctcccaggtccttgaattcctgaatttggagactggcaagtggcttatgtagccatcatgaagatttacatatgccaggctgggtgctgtggctcacacctgtaatccccgcactttgggaggccgagccaggtggatcacttgaggtcaggagttcaagaccggcctgggcaacatggtgaaaccccgtctctactaaaaatacaaaaattagctgggcaaggtggcaggcaacagtaatcccagctactcgggaagctgaggcaagagaatcctttgaaccctgaaggtggaggttgcaatgagctgagatcgcaccattgcactccagcctgggcaacagagcaaaactccgaatcaagaaaaagaaaaaaataaaataaatagtcgggcgcagtggctcacgcctgtaatcccagcactttgggaggccaaggcgggggcggaggggggtggatcacctgaggtcaggagttcaagaccagcctgaccaacatggtgagaccccatctccactaaaaatacaaaattagctgggcatggtagtgcacgcctgtaatcaatcccagctacttggagactgaggcacgagaattgcttgaatctgggaggcagaggttgcagtgaaccgagatcgagccattgcactccagcctgggcaataagagcgaaactccatctcaaaataaataaataaataaaattaaataaatgaataaaataaaatttaaaaataaataaatacataagatttttttttgagatggagtctcactctgttgcccaggctggagtgcagtggtacaatcttggctcagtgcaacctctgcctcctgggttccagcgattctcctgcctcagcctcccgagtagctgagattataggcgcctgccactacgcctgtctaatttttgtattttagtagagacagggttttaccatgttggtcaggctggtctcgaactcctgacctcaggtgatctgcccacctcggcctcccaaagtgctggattataggcgtgagccaccacgcccagccttattatttctatctttctttctttttttgagagagagtctcgctctgtcggccaggctggagtgcagcggcaggatctggctcactgtaacctctgcctcccgggctcaagcaattctcctgcctcagcctcctgagtagctgggattacaggcgcacgccaccacgcccgcctaatttttgtatttttagtagagacggggtttcaccgtgttggccaggctggtcttgaacttctgacctcgtgattcgcctgcctcggcctcccaaagtgctgggattacaggcgtgagccaccgcgcgcggccagccttattatttctttaaagcatttttgagacagggtctcgccctgtcacccaggctggggtgcagtggtgcgatctccgcctcccgggctccagcgaaactcccacctcagcctcctgagtagttgggaccacagaggggtgccaccacgcccgggtaatttttgcattcttagtagagacgcggtttcgccacattggccaggctggtctcaaactcctgagctcaaccaatctgcccgcctcagcctttcaaagtgccaggattacgggcgtgaggcaccgcgcctggttaaatccgcggtttccacagggaattccaggcccgccttccttctcccggaaaccttaccgctcgaggactacatttcccaggatgccctgcgactaaccaagccggaagacggttgtcttggttgggcgggtccgggagaggctcgtctgtggagaggtggcccagccaatgggtgaggccgactgaatcgaaagctacggtgattgtgccgaggtgattggaatctttggcgccttggtttcagaggtgggcgcatgatgagcgggtacagagaccaatgaaaaggcgggaaggcggatcccgcgcgtggggcgcgaagagttgctgacgagcaggctgtttgtccaatgcaaggcgaaagtcgctgaagggggcggggcgaggcgagaggaggcgggcgtgtgttgtggaggaaagtgtgccatggcggagcctgtggggaagcggggccgctggtccggaggtagcggtgccggccgagggggtcggggcggctggggcggtcggggccggcgtcctcgggcccagcggtctccatcccggggcacgctggacgtagtgtctgtggacttggtcaccgacagcgatgaggaaattctggaggtcgc

SEQ ID NO: 15698 - DNA, 2300 bp, Homo sapien
gcaagttctttgggaacactggagccagcagggtgttctctgaatcttatcagggatgccctgtctttgtcctcccccactgatgcattttttgcaaacaactcaagggcggggaataggaatctagtctaataaggaaataatccagtgggcaaatggagaccttggaccaagactcttgtaccatgagggagtacagtggggtgattaaaagcaaacaggagccatctggcctgggtttgaatctcagttctctcttttttttttttttttttagacagagtttcgcttttgttgcccaagctggagtgcaatggcacgatctcggctcgctgcaacctccacctcctgggttcaagcgattctcctgcctcagccttcccagtagctgactaattcccaccacgcctggctaattttttgtatttttaatagagatggggtttcaccatgttggcctggctggtcttgaactcctgacctcaggtgatccgcccatcttagcttcccaaattgctgggattacaggcgtgagccactgtgcccggcctcagctctatctcttaatagctgtgtgatcttaggcgagtttcttttttcttgttttgagacagagtctcactctgtcacccagggtggagtgtagtggcgcaatcttagctcactgcaacctccatctcccaggttgaagccattctcctgcctcagcctcccgagtagcagggattacaggcgcccgccaccatgtctggcttttttgtatttttagtagagatggggtttcatcatgttggccaggctgatctcgaactcctgaccttaggtgatctgtctgccttggtcacccaaagtgctgggattacaggcgtgagccaccacgcccagcctgggcaagtttcttaatttctcagtgcttcaatttcctcattatcaaagtggggataatagtagaccccattttggtgctgattttggtgagaattaacgaaagggaatatagagagagctgcctcttggctagatatatgctttaggacagtacctaggacacagaagtgctacgtaaaaggtacctctatccctgatactcaaaacgtgggcccagccatatatggcatccgttggaagcttgctagaaatgcaggatcggctgggcacaatggctcaaagtgctgtaatcccagcactttgggaggctgagatgggaggattgcttgagcccaggagttcgagaccagcctgcgcaacatgatgagaccctgtttctacagaaaaataaaaaattaaccaggcatggtgatgtgtacttgtagtcctagctactcaggaggctgaggtgggagaaacacctgagcccaggaagtcgaggctgcagtgagccatgatcatgccactgcactccaacctgggtgacacagtaggacctggtctcaaaaaaaaaaaaagaaaaacgaaatgcagaatcataggcctcttgcagctgccatagttagttaggacaggatttcatgacttcagcattactggcattttttggactggaaaattctttggtgttggaaactgtcctgtgcattgtagaaagtttagcggcatcctgacttccatccctgggaagtattatacctcagccccctcgccctccacattttgataaccaatattgtctctaaacattgctatatgtccccgcagaggcaaaattgtccctggttcagagccactgatctagggtttcttatcattttttaattttcacagtatttatttttgtggtttgtgatgatcttttattgacagcgggcaaatagaaatttctatattatagaaaataatacctggtttcctttcatgagaaatttaagttaattttaagttaatatgagctatctttatactaaatagcagtctcatcccctgccccctttcccaatattatcatgtggccctgtgtgtgccaggggctccgtggtctcctcctttcctaggaccttcttgaagcctctgacttgtttcttcttggccttcgctggcctcccttggataacccccttctaccttctcttcctctgcccccagaggcagagctggcagattcgagtggtctctaccatgagggctccccatcaccaggctctccctggaagacaaagctgaggactaaggataaagaagagaagaaaaagacagagtttctgtgagtgaggccagggcccttgggccctgggagcaggaagtgagttggaggggtaagcggaggcaggcaggactcttgggtgactcctgaaaggttaagaaga

SEQ ID NO: 15699 - DNA, 2300 bp, Homo sapien
atcatgccactgcactccaacctgggtgacacagtaggacctggtctcaaaaaaaaaaaaagaaaaacgaaatgcagaatcataggcctcttgcagctgccatagttagttaggacaggatttcatgacttcagcattactggcattttttggactggaaaattctttggtgttggaaactgtcctgtgcattgtagaaagtttagcggcatcctgacttccatccctgggaagtattatacctcagccccctcgccctccacattttgataaccaatattgtctctaaacattgctatatgtccccgcagaggcaaaattgtccctggttcagagccactgatctagggtttcttatcattttttaattttcacagtatttatttttgtggtttgtgatgatcttttattgacagcgggcaaatagaaatttctatattatagaaaataatacctggtttcctttcatgagaaatttaagttaattttaagttaatatgagctatctttatactaaatagcagtctcatcccctgccccctttcccaatattatcatgtggccctgtgtgtgccaggggctccgtggtctcctcctttcctaggaccttcttgaagcctctgacttgtttcttcttggccttcgctggcctcccttggataacccccttctaccttctcttcctctgcccccagaggcagagctggcagattcgagtggtctctaccatgagggctccccatcaccaggctctccctggaagacaaagctgaggactaaggataaagaagagaagaaaaagacagagtttctgtgagtgaggccagggcccttgggccctgggagcaggaagtgagttggaggggtaagcggaggcaggcaggactcttgggtgactcctgaaaggttaagaagaagggatagaaggactgttgagtttcatgtggggaatgaatcgcttggggaaaagaggtggcttaccccggagggtgacagtgaacccttcaggatcacccttgggagtggattctgagaccctagtaatgtgagcttaaggtatggttccaatccagcttccctgtcctctctgtgcttctctttcttcatctataaaaccccgttttatagcctgggaaacatagagagaccctgtctctacaaaaaataaaaaaaaattagcctggcatggtggcgcatgcctgtgatcccagctgctcgggaggctgagatgggaaaatcgcttgatcccaggagttagaggctgcagtgagccatgatcgtgccactatactccagcctgggtgacagagtgagaccctgtctctaaaaagcaaacaaacagacagacaaaaaatacccccaaacctggggataatagtggcatttgtgtcaatgaattgctgagtcaatcaagagttaacacttggctaggcacaatggctcttgcctgtaatcccagcactttgggacgccaaggggagtgaatcacttgagcccaggagttcaagaccagcctgggcaacactggacatatggtaagtgcttgccgtctgtcggatattattggacattttcctgggaagtgacagtctcaaaaatgaggcattttcttccctaatattcaggtcatgtaaatataaaaatgatgcctcaggctttccctctcccctacccctgccttccagtgaaatgggggttattggaagctgcttcctctttattttttaaatgtatttttacatttttagagatagggcctcactccattgcccaggctggagtgcagtggcgtgatcatagcttactgcagcctcaaattcctgggttcaagcgaccctcccacctcagcctcctgagtagctgggactacagctgtgttctactatgcctggctaattatgtagaaatagggtctccccatcttgcccagcctggtcttggactcctgggctcgagcgatcctcctggctcagcctccaaaagtgctgggattacaggtgtgagccattgcgtccgactatgcttgattgtccaaggatctgatttctaggatttgtggggccagtctctctccattgcctccgtcctgctgtctcttgcttctacagggatctggacaactctcctctgtccccaccttcaccaaggaccaaaagcagaacgcatactcgggcactcaagaagttaaggtgccaagtgcaggggctctggctgggatggaagagggcaatccgggagggtggctgactccagttgacccagagtcctgtctgcactgcagtgaggtgaacaagcgcctc

SEQ ID NO: 15700 - DNA, 2300 bp, Homo sapien
ttgttaagctattcccgttgtatgaatagattatgcccctgttgatggacatgtggattcttttcatttttgggctattatgaataatgcatttatgaacattcatatacaggtttttgtttggacacgttttcatttctcattggtggttacctaggagtggaattgctgggtcatatgggaagtgtatatttaatttttatttatttagtttttttgtagagatgagtcttgctttgttgcccaggctgatcttgaactcctgggctgaagtgatcctcccacctcagcttcccaaagggctaggattacaggcatgagccactgtgcctggccaaaaacacaatttttaaaatggacaaaagagctgggtgcagtggctcacacctgtagtcctagcattttgggaggatgaggtgggaggattgcttgagttcaggagttccagactagcctggacaacatagcgataactcatctctacaaatataaaaattaaaatgacactgggcatggtggctcacccctgtaatcccagcacggtgggaggctgaggcgggcagatcacttgaggtcaggagttcaagaccagcctggccaacctgctgaaagcccatctctaccaaaaatacaaaaaattagccgggtgtggtggcacgtgcctgttatcccagctacttgggaggctgaggcacaagaatcgcttggaccccggaagtggaggttgcagtgagccgagatcccgccactacactccagctccagcctgggtgacagagcaagcgtctgtctccaaaaaaagaaagaaagaaaaaaaaaaagagttctttacatggatacaagtcctttggcagatagatgctttgtaaatattttcattcaacctgtggcttgccttttcacttcagaggtgcaatttacaatgcgtatcactctctagataagctccacgagggaagggagtaagtctgcctttccctgaaacctggtaaaatgccaggcacatacatgttcaataatatcttgttgagggaattaaatgcctgcaacctgaagttcctgtccgccaggggaaaccaagcttaaggttctgaaacacgaggcacctaatatggggggggggggggggttaaagccaattatgggtattcggactcgaaatagtttctaacaaggcgttttggggttgggggatgctctccccacgagattccaggatttcagtagagggcctttaagggctggttgaaagatgggtcttgaagctgtatttgcacagaactatactaattttacttagagtgctttattagatgtagcttggagattatagggtgccactaaagaaccactcccaagttatccctttgaccctagtcctgcagctgggagtctccttaggctaggagctcctgcctgccctacaaaagcccaccggagggcgcaagggctccaatcccgattggagtgaggaaaaatatgctccaggagcggcgggtggagacgcttcctttaataggtatttaagtgtccacggtgaaggctcaggagtttacaaggctagcagggttggggaatctcaacaaagggcggggcgttgctcaagctccatccgtccgtccgtccatccctccgtccctccaatcctccatccatcgcgctgctcaagctccatccatccatttatccatccatccatccatcctttattgagagtaaaaagccgccaaccagaccctgggaggaagacaggatggttcccgagaactagggctgctccttggcttttagaggtatctactacttccaaaaccttttgagaccccattatcccgtttgatgaagatggagtctgccacgtgggggttccagataagacagctgagattcggaagggcaggcgactccacctagtcacggggacgctctttttgacgctccagggaccgcagggtctgggaaagttcctggttactccggcgaccggccggccgtcacatgacatgtgagcccgggcggaacgcccaagaggcttccgtagtcgggtggcaggtcacgtgtcgaaggcttgcccgcggggaccccttccaccctggctcccgcgtcacatgaccggctttaagcaacatggcggctgccgtggtgcagcgcccgggctgagcgacagcaagtgcagcgggctcctaccccgggtgaggggtggcctccgcgtgggatcgtgccctcttcagcccgctcctgtccccgacatcacgtgtattccgcacgtcccctccgcgctgtgtgtctactgagacggg

SEQ ID NO: 15701 - DNA, 2300 bp, Homo sapien
ggatattagtagcacctgtctcactggggtgtgatgaggattaaattagttaatagatgagctgggaacatggtcaactttccatgtgttagcccttactgtcatgaacccccgaccctctcttcccccagattttcatcttcattggagagaccctcctgtccatgaactgggccatcgtggccgacattctgctggtgagttgctgggcagctccagggtcagcgcagaggctgatgagagcagagttggggtcaggagtgttgcctctacccctcaaagcccagcctcaacctaccttctgcaataaataacatctgtagcagacccccggcctgccctgcgacctcaaccccaggcacacctctgaccccggcctaggcggatccttggtggtctcctggccccctgcctcctgccccctggagcccagagcatccactgagctccaccaactcctccacagtacgtggtgatccctacccgacgctccaccgccgaggccttccagatcgtgctgtcccacctgctgggtgatgctgggagcccctacctcattggcctggtgagcattatttcttggctggcatggggtggctggtgtcctgagcctgggctggatcagaaggcctggccctagtgaagtgtctgtgtcctgcgtgctgggcacttctcaccttccattgtcaactggaggagaaagattttgtctttgaatatttctaccagtaaggccagggacctcaccctggtggtccaaactcctcctttcttttctcttttcttttcttcctgagacaagacctcactctgttgcccaggctgcagtgtagtggcacgatcatggctcactgcagcctcgacctcctgggctcaagcgatcctcccacctcagcctcctgagtagctgggatgataggcatgagccactgcatctagctcaaacctccttccctttcctgggctccacttgtctttctccctggagctcaggggcgtgccctccctggttcatccatgaggctgactcccctggctttcctgtctcctctccctgcagatctctgaccgcctgcgccggaactggcccccctccttcttgtccgagttccgggctctgcagttctcgctcatgctctgcgcgtttgttggggcactgggcggcgcagccttcctgggcaccgccatcttcattgaggccgaccgccggcgggcacagctgcacgtgcagggtcagttaggagctgtgcccggcccagcttcttgatctgcctgtctgtctgtccatctgtctgcccactcctgtgcacctggcagctcagtccacagccctccccttgtttggcctccagtctgtctgcatccacccctggggtggctctgtggctgccccatccatttcccgctgcctgtttgcccttctctggctttgtctgtctgtccatccagctcaccctggctctgaccctcccccctcaggcctgctgcacgaagcagggtccacagacgaccggattgtggtgccccagcggggccgctccacccgcgtgcccgtggccagtgtgctcatctgagaggctgccgctcacctacctgcacatctgccacagctggccctgggcccaccccacgaagggcctgggcctaaccccttggcctggcccagcttccagagggaccctgggccgtgtgccagctcccagacactacctgggtagctcaggggaggaggtgggggtccaggagggggatccctctccacaggggcagccccaagggctcggtgctatttgtaacggaataaaatttgtagccagaccccaggtgcctgctctcgtctttctctgggtggcctctgatcttgcaccccgtcttcaccccagggctcctgaagactgtgggtcattcctcagggctctgggtgagtctctgcccttctgggctgggcgactgagatgggggactgctcttctccgagtgagctggctgagtgtgaccgtgagtcacgcccctgcttccctggagcctgtcccttgcctcacaggcctggctgaggtgggggtgggcactgccctttgtaccccagaattcccactgtcagggcctccctgctcgctgcctccccgggtcctggatatggaggccacggctgccagctggcaggtggctgtccccgtcttggggggggccagcagacccttggtgagtgcctggggtggctcccgggcctcctcctgccccctccccactggcgggtggggtgggaagggggcgggtgcagccggctgagagcttgatga

SEQ ID NO: 15702 - DNA, 2300 bp, Homo sapien
cccatcctggccatgttgatggcactgtgtgtgcactgccacagactgccaggtgagtgggaaactggtgggggtacccagggcccagggacaccgacgggatcctcatccactcccagcccctgtgtctgtcctggctctgtccctgcctccgtcctgatcccagcgcctctgagagtccctggatcccagcaccttctgccctaagcaccccctgttcctgcctcaccagccctctctttcccaggctcctacgacagcacatcctcagataggtgagtccgccccagccgccctgggtctccctccacaccccatggcggggcagggctggggcttccatcctccatcttccagccccatccccaagctgtgtctcctttaccagtttgtatccaaggggcatccagttcaaacggcctcgtgagtacaaggagggtcccctaccttgggtgccagggagagggtcccctggtgtgggagtgagcgtgaaccttcagacttcccctgccaccttggggctgcccacatggccttgacctgagctgggagaggggagatggctcccccaggcctgtccagggtgtggggctttcaggggcttagtctgttctttgaggccttgacgatgtccggagtccttctttcaacttggttctgtgtcctcagacacggttgccccctggccacctgcctacccacctgtcacctcctacccacccctgagccagccagacctgctccccatcccgtgagtagctgctcagcccctgcccctccaaagctcagcccctccccctccaaactccactctctaccccttcacttttttggattgggggcccctttcccttttgcaactgctgttgccccctgagccccacctcaggcatgacccctgacctttgactcccagaagatccccgcagccccttgggggctcccaccggacgccatcttcccggcgggattctgatggtggtaagtgtggggaagggttcaggcggcgggggctgggaagaagataggcctggcctgagctgacttagtctccctctcaccctctctttgaagccaacagtgtggcgagctacgagaacgagggtgcgtctgggatccgaggtgcccaggctgggtggggagtctggggtccgtcctggactaggctgacccctgtgtcgttacccccagaaccagcctgtgaggatgcggatgaggatgaggacgactatcacaacccaggctacctgtgagtggccaggtgggaggtgggaggtgagggctgaggctgtgcgtccccccttgctcaccggcccttttcacttcctttcagggtggtgcttcctgacagcaccccggccactagcactgctgccccatcagctcctgcactcagcacccctggcatccgagacagtgccttctccagtgagtcaggcatttgtttttatttttaaatttttttagggataggctggagtgcagtggtgccattgtagctcgctgcagccttgaactcctgggctccagtgatcctcccaagtaggctactcggcctcagcctcccaagtagctgagaccacaggcgcatgccaccacacctagcttatttaaaaaattttttttgtagagatggtctcactatgttgcccaggctggccttaaactcctgggctcaagtgatcctcccacctcgggctcccaaagtgcttgggattataggcgtgagccaccatgcccggccctgttcttctgattttctcagctttctctctcttctttcctatctctgtgtcctttcctttatcatctgggagatttccttgtctgtattcttcaacccttccactgcaattttatttctcctatccagaagctctttctcgttctctggctgttctttttttatagcctcctgttcttgtttcatggatgaaacatctctaaggatgttaattagaggctgtcttgtgtgtctgtgtgtgtcagttttcttctgcttcctgcactgccctgtttcctttgagctggttttctcccttcctcatggtctcatcctgcctggtcacatcctctgggctttcctcaatgtccgggattctttagttttctgttgctttgctctctctgtatatacttgtcctgggctatcacttctataccctggctttgtttgccatccagattcccagtttgctctctcctgagctccagactgtatccaagtacttcttttctttcattcattcattcattcattcattcagcatttactatgtgcctctgctgggctaatgctg

SEQ ID NO: 15703 - DNA, 2300 bp, Homo sapien
caatttttgcattcagacaggtagagtaagcacaagccatagtcggtacacgccaagtcagatgatcctagaagtctttcttttaaataaaaataaggaaaagttggaaagacatacacgtcaacaatttaaaagctgctacaaccagtagaattatgggaaatttttatttcttctactttcttgactatcctgttaaactttattagatgcatactttcgagacaaggaaagtactttaaacctactatgaatgcaaatgtgtttgacacatcaaggtacctgcagctgtgcacactttctcctgggtcagagactgcaggctttgtactggggcaggccttggagctctgtgcacagtaggttttgtttttttttttttgagaccgagtcttgctctgtcgcccaggctggagtgcagtggcgcgatctcagctcactgcaagctccgcctcccgggatcacaccattctcctgcctcagcctcctgagcagctgggactacaggcatccaccaccacgtccagctaattttttgtattttttttgtatttatagtagagacttcaccgtgtttgccaggatggtctcgatcccctgacatcgtgatccgcccgcctcagcctcccaaggtgctgggattacaggcatgagccaccatgcctggctgacacagtaggcttttaacaaatactcaagaaatcgcagttcttaggcatttaaggaacagagttggaacaaaatcaagattcaaaattatttctctaagccttctttgggccacagtctacaaagagattggggaagtaggctgtcagaactttaatggttctgaaatcaccgaaaatgatgtaactggaacactttcatttcacaagattacagtgttacattttctaaagaaactgtcatttgccttctgaactagaaacagggatttgtaaaataatgtgcagtgatggcgtggaaaactaaccagcagcactcctgaaatgctgccttcgtgttcccctgggactgctcgcctcaccccaaaactatttctactgccttccccttccatgctacaactagtctccaaaggtagttttctctactaacaaagcaaacagatcatatgaacggacatcagactttcttaggagatttctgaaaattctctcttctgggggaataaattgtgagcatttcgattcaaacattcctgaaagaataaccaggcaaccgaaacactcagtgacctaactgtggtaggctggtcacttcaaacttaacagaacaataaaacatatactactttatggccaaaaaaaaaaatctttttaaaacaataagtgtggacaaagtgttttcacagatgaagagatgaagttcctgaaatttagggtttcatttctcaagggtctcctttaaacaaacaaacagttatgatttcaaagtagacatgtgccttcaacaccatttttaaaaattaccagccttagcaaaggtgtagaaaaaacttgttctcaagcactgtccgtggaagaattagtaaaacatttctagaaaacctgttaccgtcttaacaaacttttaaacacatgtagcaattctacttccaggaacttatctatttgccaagacatatatgcaaggatcttccctatagggttgtgtataaaggaaaaatcagacagactatgccaggagccctctgaaagagaagagtcaactgtggagggggcacctgtgaatgaatcctgcggagctgctaacagagcagacttacacacacaacatggtaaagttccatgacactgcacacaggggattacacacacaacatggtaaggttccatgatgccacacacaggggattacacacaccacatggtaaggatccatgacgccgcacacaggggattacatacacaacatggtaaggttccatgacaccgcacacgggattacacacacaacatggtaaggttccatgacactgcacacaggggattacacacacaacatggtaaggttccatgacactgtacacacgggattaggtgagcgggggaggggctgggggaataataacatcaaaagagcgccttttcttcccttattccgaggagactttcctgggcctgactcccggacctgtccccagcgcctcgcggcctctcgagccccttcagtgaccaagatgcagagatcaggacgccattgcaccaccccaggtgcccgcctctagctggctccgcctgggccccgagggaaggtgaggtcgggggggccgggccagggcgtggcagccaggg

SEQ ID NO: 15704 - DNA, 2300 bp, Homo sapien
ctccaaagtggagatggggttatgggaggagaactggggagcaggggagccaggaggctggtgtgaaagacagggcccgggatgcatcccaggaaagcccctgcctacccgcttttcttcccaggcccctttcctgagaccctgctggggaaaaagagacaacagcgcaggaggaggagagggcagtcaatgtgatttcagacactccaagataaacagggaaactaagagttcagactcgttacattggccatgggaaaaatcaccattaggcaccgcattttaatacagcattctgtctggttttgatttcacagatgtaaaaaaaaaaaaaaaaaatgcaggcaatctggaattaagttggactacttccaactgtttctataaaccacatttgggattcttccagcatttctgagattcaatttacagagatttcttcaagtcaaaaaaataaaaaagaaagaaaaaaagaacctaaataccctctgtggggagcagttgttggggtcccggctggtgccatgttcccacaaggggcctccctgtcctagtgtaattggcgtaattcacactgttctgattacagagggcctgtgagatgttgcatttaggagccattccggaggtcttccttcctgcatgcaatttcatctgcatttttatcaacgagaattttgctgttaatagaacgtgtgttctcatgctgaccgtgaaactgaagtcatacacctgggcagctgctgggcccacatgtgctaggttctgcggggtctggtcagatctgggaggcctagcttggaggcggctttcctaggccaccccaggcaaagaagagctgcttcagggtccccaacctgcgccacccgctcagggctccccccaccaggtgagctggaccctgggggtctccacagacacctcagctagtcctgacctgctggccagacgcccaccagccctgccttccagagggccccgctacatcgtcttcataccccagggcctcccagccgccccacctgcagggctgctagaactttctcccgagacaaagcctgccattgtgcctccctggagcccgtctctgcagtggggggcagggtgtgttgagcgtcccgggtccagtgtctccggcgtgtcctgcatctcggcagccagctcctctgcagctcaggccccgtgagtcacagccgcttcctcaaatgctttggctgaccgcatccccccgctccgccagaaccctggatgccggagccctcccagcgagagccgtgtttattttactttacatacattttccaacccggagcggcttcaacacatgcagctcttaggcccgggccgcacatctcagaagccccgtgtgcgactttgactgccgcacgatcctctgccgggggaggtgggcccgctgcgctttgggagcacccgcgcccgacactgaggtctcggtgctgtcttcggcctcttcgcccctgagggtcccctctgggagcagaggcggtcggaaaaccctggggctgaagtgcaggcttcgggaggacgcgacctgccaagatcagctcccggcacgtgatgggagcctggctcaccttcccccagcacacgatggggctgcagcctccccggtcagcctggcctgctggaaaggagcagctctgtctccagaggcttctggcgaagcccatggcctcccaatgttggctgatttataaggaaagaggggaaaggccaagtgtggatgccattagcataacctaatccagaccccatgacaagtccaggatcctgcagggagagggcatccttgaacgtgaaggactgggtttggaaacttggcctcccggaagaaaggtctccgggcccacccacaccccccttgtggacgcccccgcagtctaatacactccacagtaagacggaccaggaacagcagcagcctccggtgtcggcccagtgatccgggagctcagagtgtaggtacctgacggcttgactcgtccccaggacaaggcctgtgagtgggagaggggcactctgagtgtgcgaatctgtgagagtgtgtgtgtgtctgggcacgagtgtgtatgcgtgtgtgtgcatgtatattcacatgtgtgagggtgtgaatgtgtgtgtctgtgggtctgggcacatgagtgtgtgtgtgcatatactacattcacgtgtgagtgtgcaaatgcgagtgtgtctgtaggtctgggcacgtgtatgcgtgtgtgtgcgagtactatattcgcatgtgtgagtgtgcgaatgtgtgtgtctgtgggtct

SEQ ID NO: 15705 - DNA, 2300 bp, Homo sapien
aggaggtgttggggtgtcacaggagaggtgagacgtgatctggaccttggaaggaaaggaggagttgtccagggcagcaaggaagggcaccccaggcaggggtcacggcactggcagaggcacagaggtggcaaagcttgttgtttgcttggaaactgcgtgaatcagcttagggccaggccctgagctccaaagtggagatggggttatgggaggagaactggggagcaggggagccaggaggctggtgtgaaagacagggcccgggatgcatcccaggaaagcccctgcctacccgcttttcttcccaggcccctttcctgagaccctgctggggaaaaagagacaacagcgcaggaggaggagagggcagtcaatgtgatttcagacactccaagataaacagggaaactaagagttcagactcgttacattggccatgggaaaaatcaccattaggcaccgcattttaatacagcattctgtctggttttgatttcacagatgtaaaaaaaaaaaaaaaaaatgcaggcaatctggaattaagttggactacttccaactgtttctataaaccacatttgggattcttccagcatttctgagattcaatttacagagatttcttcaagtcaaaaaaataaaaaagaaagaaaaaaagaacctaaataccctctgtggggagcagttgttggggtcccggctggtgccatgttcccacaaggggcctccctgtcctagtgtaattggcgtaattcacactgttctgattacagagggcctgtgagatgttgcatttaggagccattccggaggtcttccttcctgcatgcaatttcatctgcatttttatcaacgagaattttgctgttaatagaacgtgtgttctcatgctgaccgtgaaactgaagtcatacacctgggcagctgctgggcccacatgtgctaggttctgcggggtctggtcagatctgggaggcctagcttggaggcggctttcctaggccaccccaggcaaagaagagctgcttcagggtccccaacctgcgccacccgctcagggctccccccaccaggtgagctggaccctgggggtctccacagacacctcagctagtcctgacctgctggccagacgcccaccagccctgccttccagagggccccgctacatcgtcttcataccccagggcctcccagccgccccacctgcagggctgctagaactttctcccgagacaaagcctgccattgtgcctccctggagcccgtctctgcagtggggggcagggtgtgttgagcgtcccgggtccagtgtctccggcgtgtcctgcatctcggcagccagctcctctgcagctcaggccccgtgagtcacagccgcttcctcaaatgctttggctgaccgcatccccccgctccgccagaaccctggatgccggagccctcccagcgagagccgtgtttattttactttacatacattttccaacccggagcggcttcaacacatgcagctcttaggcccgggccgcacatctcagaagccccgtgtgcgactttgactgccgcacgatcctctgccgggggaggtgggcccgctgcgctttgggagcacccgcgcccgacactgaggtctcggtgctgtcttcggcctcttcgcccctgagggtcccctctgggagcagaggcggtcggaaaaccctggggctgaagtgcaggcttcgggaggacgcgacctgccaagatcagctcccggcacgtgatgggagcctggctcaccttcccccagcacacgatggggctgcagcctccccggtcagcctggcctgctggaaaggagcagctctgtctccagaggcttctggcgaagcccatggcctcccaatgttggctgatttataaggaaagaggggaaaggccaagtgtggatgccattagcataacctaatccagaccccatgacaagtccaggatcctgcagggagagggcatccttgaacgtgaaggactgggtttggaaacttggcctcccggaagaaaggtctccgggcccacccacaccccccttgtggacgcccccgcagtctaatacactccacagtaagacggaccaggaacagcagcagcctccggtgtcggcccagtgatccgggagctcagagtgtaggtacctgacggcttgactcgtccccaggacaaggcctgtgagtgggagaggggcactctgagtgtgcgaatctgtgagagtgtgtgtgtgtctgggcacgagtgtgtatgcgtgtgtgtgcatgtatatt

SEQ ID NO: 15706 - DNA, 2300 bp, Homo sapien
ccctcatcacactctcacactttctgagctgagatccacagtaaggaatacactgtttcatcttcgccctaggcacatactctcatccgcagctgaaatgcagtttcagaatgtgaatccttatttcacgttctgtgtggtgatgttttctgttttctctcttgcctcctcctcagcattggctacacacccactaattgattcccagagctcacagcctggatcaaagttgtttctttgttttgtttgtttgtttgtttgtttgtttagagacagagtcttgctcagttgcccaggctggaatgcagtggtgcaatcacagctcactgcagcctcaacctcctgggctcaagtgatcctcttgcctcggcctcccgagtagctgggactacaagtgcatgccatcatacttggctaatattttcaaaattttcctaaggctgggcgcggtggctcacgcctgtaatcccagcactttgggaggccgaggcaggtggatcacctgaggtcgggagtttgagtccagcctgaccaacatggagaaaccccatctctactaaaaatacaaaattagctgggcatggtggcacatgcctgtaatcccagctactagggaggctgaggcaggagaatcacttgaacctgggaggcagaggttgtggtgagccgagatcgtgccattgcaccccagcctgggcaacaagagcgaaactccatctcgaaaaaaaaaaaaaaaacattctagagacatgctcttgctatattgcccaagcagctcttgaactcctggcctcaaacgatccttccaccttggcctcccaaagtgctgggattatagacatgggccaccacaatcatcccaaagtattatttttgcaaagcgtcagcctctccctacagcacccagcacctgggttccatgctagaggaagtcatcctgatttgtaaaagagggttgaaaccagttgcctaaaacctgccacacaagggtaaaacccttaagcatgatgatgtcccagcagtggtatttgtgagagggaagaactggaaacaacccaggtgtcccctaataggggagtgatatggtttggctgtgtccccacccaaatctcaccttgaattatagtgtccataattcccatgggttgtgggagggacccagtgggagaaaactgaaccatgggggcagtttcctctattctgttctcgtggcagtgaataagtctcatgcgatctgcgggttttataaggggaaacccctttctcttggttctcattctctcttggctgccaccatgtaagacatgccttttgccttccctccccagacacatggaactgtgagtccattaaacctctttttctttataaatgacccagtcttgggtatctcttaatcagcagcatgaagaagaactaatacagagaggctgagtaaacaccatgtggggtgtttgcatcactgagtatcacacagccttttcactcatggttagagacggagcagaaaggtggacagacaccccagcacaaagccgagtgaagaactctgaggaaggatgcgtgcttgggaatgatgcctcgaccctggtgcctgaagccgtgcctggtgcgtggggcgtccctgtttgctgaaggaatgtggggacagagcacaggagcaaagactggctgggaccgtgtgaaagcagctctctgctgcctctcatccagcccgctgtgtccttccacagcactcatctcaatttgtggttatttgacttttctcctgtccctctgggccgtccgcccccttcgttagaatgtaaactgtgtggagtgcaggcctcgcctgtgttactgtgccctcatctcaagctcagcaccgcgtcctgccctgggggcccccatgaacatgtgccgaatgaacgagcggaggaatgggggttggggcatttttattagttttccattcgcccaatcatttctaatgtggatcattttctttcaaatgataagagcgatgtttacttttctatgtttgaaaataagataaaataaaacaaaagacgcctgttgttttctcgggcagggatctgaagggagccgagctccttctgcagaagggcgctgagaagggagctggaaggaaaagaaggaaacattccttcctcaactggaggaagacacgcggccacacacagaaccagcggccccaggaccgtcaccctgcgtgcccgggcctgtccctcctgaccccaggattatagtggcgaggcagggtgttagccaagcggattgagccaggacacaacaccgcg

SEQ ID NO: 15707 - DNA, 2300 bp, Homo sapien
ctcccggacagcctgctacccatgcatcactgcacccagggcacctcttctcaaaacaaggacagcgttaactgggacaggaatgatttccgcaaaggccaggcctaatcaggatggaggaaagatgttggggtttctctgctttttccagagattgcagtggccagtgcctggacacccccgaaagtcccaggcctggtccagctgtcccagggaattgggaggcgtggtggtggtgggaggggagctgttgacgccacctcccaaagtggtgtctctctcattgaccagccgtattgggtgggggaggttcttaaaatctgtgttctaaacatccaggtaatcactgaaacagcccgatggctgtgcagggcaatccgttcatcctgccctcagattgaggctgggaaagaagtggcaggactcagcgtgatttcatgctctagttttcttgaacctgggaactgttgcagcctcagcagggaccttgccgtcaacgttggcagtgcccagcctttgcgtggtcgaggtctgagggccagacaccctcctcgcgcccgccctgccttccctccaggctccaggtccaggaggctgcccggagggtccaccatgcctaggtccatgcagagggtggcagcagggagattggggccgggtgttcattctctggctcctgcggcttggctgcaccccaaaaagcccatcacggcaccttcagactttactgttattggctcaataatagcccccaaagatgcccacatcctaatcccagatcctgggaatatgttccctggtgatatttacatgcagacgtgactgagcaggtgagtaagtgaaggctcttgagatgggagtggccctgggttgtcctggtggctcagtgtcatcccagggtccttgaagagggaggcagggagagtcaccgcaggagcaggtgtgagaaggaacacagagtcagagagaaatggaaagaggctgcgctgctggcctggaaggtggaggaagggccatgagccgaggagtgcaacggcctcagaggccacaaaggtaagaaaaggaccctcccctggaggtcccaggaggaaccggccctcacacaccctgattttagcccagcgaggtgtgtgccagacttctgacctccagagctgacagagctgtgagcctgtggtcatctcgtcgcagccccatggcactgacacacctgtcctctttggattccaagaaaggacaccaccccagtcccaccccagccttcaggcttagggcgatggggcttctctttcacagggtcctcggtcccttcacacaggttccctgagccccgcccaaaccttttcagcactgtgaagccctcctccaggtgctgtctccctcctgctgggctctgaccaatgtggtcctgttcctcctgtttgggcaacagtgttgccttcccctgctaccctggaagtcccccaggcaattccatccatgggttctgatgagcatgaaccaactggcatgaccaccaggagccaccatctctccagcccgggaagggcttgtgtgtgttgggggaggggagggcacgtgcggctggtctgaggttttctcccgtgtgaaatgtcagattcccaggacttttagagttccaggcatgtgtcctgggtcccttcgccagagcctacaccaaaggctctggcccatggcacctggcactcaccgtccccagcatgctgacagctcccgctgtgagagtcggggcctctgccaggcagcttgctccctgtccacaggagaggccacggggccagggagggaggccatgggagcagctgcttcagcagcgtgtggggactgcgggacagatgcccactccttggtacgttccatgttccactcctctgggggcgtccccggaggctcagagcccagttacccacagcgacacctgctcatcagccctcatcagctcctttcccacccaacttgcccactccttggtgcgttccatgttccgctcctctaggggagtccccagaggctcagagcccagttacccacagtgacccctgctcatcagcccttaacagctccttccctgcctgacttgcccactccccagggctgcctggggtcacccccaaatcttgctcccaaggcctgcctctgggggcccaggcccagaggccagaggccgcctcagcaatcctgaagcagacagcagatggcagccttggatcagccctttctggctgtttccaggctccagctgaaggtggaagggtggttctgctgtgttctcttccttg

SEQ ID NO: 15708 - DNA, 2300 bp, Homo sapien
tctgcgaaggagcttgctggcactggtctgtccgaccccggggtttacagagactcaggttcccagacgatactgcgtctccatggcgtccagcgaaatgcctcccccaccccacccagtggttgggcctgtggggtagaaaacgaactgggggattgggattcactggtgtactcaacagatgcatacgaggcccctgttgcaggctgggctctgccaggccgctgtagtacgccgaggtgagtcctctgtgaatcgggaatgcccgctcccagtgtctgcccagaaagctgcacttgtcctgggccgctcgcgggaagaggtcacccagcagggagatgttctgtgccaacgtgtgcggggccccaaggagacagagggaggggcaggcgtgtgggccatggtggggttggttggctgagggcatggggtgcccatgtgggcaagtccctgggacctcctgaggagggtggattgggactttgccgagaggctcagaaggggtcaagggtgcagtgggcagctcaagcctcccttttccgaggggttcagagtcgccagaggacccgtagccccttgcagcagcagcagtggcagatggacagactttgtgggaagggccctgcagacaccgcctctcccatcccagaggtgcctgtgaggcagaggaggagaggaggcctgctgagaacaaaccctgggtcccccacctccgagactgatgcaccgggcagaggccaccttcctgcctccttgctggggcatcttccccttcctgctgacctgtgtggccatgagaccccgggctgggctgaccagagccctggaacaagctcacagaaagcgcttctccacttcccagggagcctcctgcccacaccagcctccctgtggcaggcccagtgtccacgccacatgcactcatggagctcggcccctgggagacttactccccaccccccaggacctgctcctggcaccaagctggccacaggggccacgtcctctgcatgtagcaggcctcagggacggccctgcccacaaggtcactctgctcctgggtcctcaggcccctttgcttccaggaggagcttgtccttcctcctcccacaccaaaacccacagagaggagcggacgccccgtggctcctgccctgccctaggctggccacccctcatgcagctcaactcccacgtattcctggggccggggcaggccagccctgatgcccaccttcctctctcccatggccccctttgaggtgagccagccctgtctccaagcctggggtgctgtagagatgcctcctcctgtctgctggctccaggactgtcccctgctctgcccccgccccagcctccccacctatgcatgttcacagccccatggcacctcccaatacctgctgagctcagccctggcccctcatcccagccccatcttcctcccacatcgtcctccccagcaccaccgcctgacccctgcatggccagaggaaacacacctttgtccggcctcccagcccagccacaactcaagctcagcacaggtcgccgctcccccgagcccctcccagtctggtcctgctcgtcccatacctgctgggctttggcgcaaccctaggctgcctggccacacggccccccgccttgcaccctcacaccaggcacaggcagtacttctcagatgctcactgggctgctttccagtgggtctgggggctcctgagggtgactgtggcctctcccccacgtccttcctgtcctcatccagggagcgggcacacaggactgactgcggttctgtgctcagcaagggagacgcccattttcttcgaggatttcctctggcgctgacctactagatgcgtgaggtcaagggacgggggcagggcagaggagttcaggtttcagcagctgccactccaccctcgtcctgtcagggacacctcgggccaaggcgctgtctggattttagccagcaatggggagtcccgctctgccctggccaccgcccactgtctcgtgtgagtgagtcaccggctgcttcagctccctcctcctccaggggtgacttcacccagtcggctctcactgaccaagaaagggatccaagaaatcaggggtgtggaggcaggaggccaggggccttcctgggacccctcaggaggttcccctagcaccactcgcaggcagaacagcccagcctcaccccgagggctgcgggaggtgctgctagaaaatcacttggggcttccttttggcctcccagtgagtcatgagggctgcggcacagaggg

SEQ ID NO: 15709 - DNA, 2300 bp, Homo sapien
aaccacttgaagaccctgacttcagaacatgctgctcattttcccgggaagccaaacccctactctcagtggtctgtatgcatctttagtcagtgggaagcggtgataatatacccacaactgtaaagtgagagagaccgacttccttaatcttcagtggggatttttgaaaatggttgattgcactcaaagcagaatttgtattttgcttcattgggtcaccttgggcaacaatttcatttctgtagaaaattaattttggaggaagctgcatgtgccaggggagccctgggtccatccttttgatggtgaggggaagtccagttcctcactcgcccatccctgcttttggttccctgttggtgattttcttttgtattcatgcacgtgcaaatcagctgcttttggtaagggaagccttggaaggatgtctgctaaaggtgcagagaaaatgcagagctccgttcaaggtgaaaaaagtggttgacaactggcagaaagaagctggccttaaggaggaagtcagaagccagggtgctgtaccccttgggctgtgtgttatcctgggtcactggatcatggggatgtccacagggtccctcgagggtgggttcttgacacccagggtggcagggacctgggccagtggctatttactaaggggtatgaatgtgtcccagcatgttaagatctagtggagctggactgatacctattggccgaatgtgacctctgcctgtttcaaaggtgtttaatcctgatgtctcataaattaagactcaggcctgtaatcccagcactttgggaggccgaggtgggtggatcacttgaggtctggagttcgagaccagcctggccaacatggtgaaaccccgtctccattaaaaatacaaaaattagctgggcatggtggtaggcacctgtaattccagctacttgggaggctgaggcaggagaactgcttgaacccaggaggcggaggttgcagtgagctgagaccgtgccctggcactccagcatgggcgacagagcaagactccacctcaaaaaaaaaagtaaaaaagactcagtttggcctctgagttgtcagtttttagatcacagttatccagcctgagttccgtgggtcctttgctttgctcctttcagaatgtaaatgactcttcagctcatgatggcgtatgcccctaaaaggaagtgagatacaagttttagaagtccttcttagaaatttcccattttttttttttttttaaataagagacagggtcttgctctgttgccaggctagagtgcagtggtgcaatcatggctctctgcagccttgaacttcctggctcaagcgatcctcccacttcagcctctcaagtagctgggactgcacatgcatgccactgtgcctggttaatttatttcctactctttaataaaggaggtggtatgctgtaaactcttgtaggatgcgggtgtgttatgctgagccctggttctggaaggcagtcttgtggctagttggaagttggtagagtgacagagctcagcccctttttggcactctgctctgccaatccatttgtgccttgcagtcaggctggttcagtttgggatgtgacagatttgggagcacttgtattcactgagttctcaggctggcacatgagtgaacttggtttacctttgttcctggcatggctgataccatgtgtggctgattctgttagagtgtgccctcagattcatccctctgtcttctttggctttgatagaacccagattttgcttgaggctgtggtatgtactcctttatctcggtgagggattaagccagttttgagttttgttctttgctttctctgctcccttgtgattttctgggattacttgttctttcctgataaaaggggcgataaagctggcttcatcccattccctttcttcctgctcaattgtaaatgagatgcccagagttaggacagtcctctgggacagcgaggtcaaaaggttggaggttttggcctgacatagcctttgtatcactggcctatttccagactagcccagctccatggggttggattttctttgtgtgtgggtttttttgttttgttttgtttttagagacagggccttgctctgttaactaggctggagtgcagtggtgcaatcatagctcattacagcctcaaactcctggggtccagccatcctcctgcctccgcctcccaagtagctgggactacaggtgtgtgccgccacactcggctccttgtagttgggttttctgtttcctttctttagag

SEQ ID NO: 15710 - DNA, 2300 bp, Homo sapien
agtgaccctgatgaatcctgttctggttccttaagtaacttcctgatcagcaccgcccagatcttcaacagtgaaatttcactgaattcaataagtgggcagcttgtgagtagtgtggcgtgttcccttgattttatatcttgccctgtgttccctagtttaggtctcctcttctgctttatctactgctgtggtcacctctctactggtaatgtctcagatcttctgggattgtgcactggggctcttaaaaatacccttaaagttctctgttgcctgtggctccttgttcaattgtatggcaagactctatgtgtccaaaatgggagggcttgggagccaggaggactgacactgacgacacctgtgtactgctcacggtcggagttcggaggctgagaatgtctggacctctagggcattaaccagctttagttaaggaaaacacactcctgtttctttctttcctttttttggagaagtctcgcttttttgcctagactggagtgtagtggtgcaatcttggctcactgtaacctctgcctcctgggttcaagcgattctccttgcctcagcctcccgagtagctgggtctaccagtgcccaccaccatgcctggttaattttttgtatttttagtagagacgggtttcaccgtgttagccaggatggtctcgatctcctgacctcgtgatcctcccacctcggcctcccaaagtgctgggattacaggtgtgagctactgtgtctgacctactccttttttttgaagtgaatttctgtgaagctccttccagcatatcatttacgggtagttcagagttacatactcagtctcaaagttgaagtgaccaacaaggagaagtcagtccagcaggtaagaatcacagttgactttacctggatcaccagccacttccccagctggatgttgggaaaacacattcatttagatgcgtgaaaacgggctcagatttttaaaggattatgattttaggaatcaggtgcagtcagaatgtcagcttgagcatgtggtttgtacgtctactaacattttctgggaaagtatattggaaatgctcctcttctttctttctgttagttgtattcagtcacttcagtggctaatttttccagtctctcactcaactacaggtcatgtatccctgactttgctttagtgaaattgactttttccttgattaatttagaattcaatgacctggcggggaagttatggcattggggatttttggtttccattgcttaacatgaagtcagagagagcttggaagctggactcgggagacctgcttttaagccctggctggaccatttattggctagatgaccttggacaggccctgtgggcttccttgacacccctaccccaactgccatctagatttgtggggcatttttagcctcctagccttttccaaggataatgtgggctttcaggcctgtaacctaggcaggcattatattattattattattattattattattattattttgaggtggagtctcgctctttcgcccaagctggagtacagtggcgcaatctctgcttaccaagcctctgggttcaagcgactctcctgcctcagcctcccgagtagctgggattacaagcacctgccaccatgcccagctaattttttatatttttagtagagatggggtttcactgtgttggccaggctggtcttgaactcctgacctctagtgatcctcccaccctggcctcccaaagtgctgggattacaggtgtgagccaccgtgcctggccaaggcaggcattatattaaatgccctggttgatgaagccatagaggctctgtaatttctgtctgaaatggtctcttcttgtattaggcaaatcaggcgagccctgttggcaggcttggatttcctgtctgtctcttggggacattgcttgagtggaagtcacccacctgactgctccgttctactttgctgctttataaatacatttacatatcatgtctattttagtactctaaagctgagggtcgggggggaccagcgaggaagttgtaggatgtatgtgttcaatcttctgtttgtaaccagaagctttaaaccagcagagacctcagacaaatcatatccctcctggggtgaccaggtgcagatcttccagggagccgtctaatggaatttcctggttaatggacacagagaaccactgctaagaacgatttccttttctctttcaatctgcagtactttttatgaagactggtcttttgtgatggatgaagagaggtcca

SEQ ID NO: 15711 - DNA, 2300 bp, Homo sapien
cttagaatattagatcaggggccccactgggtggggatgaaggtgtttttgcgcaacacggttaccaacagggatgggactgtgatgcttgtaggcagcctttctctctgccatctccctctgcagggcttgagcacagagctgtagggagaaaaatgtatccatgtcctgacctggcagactatgtccaaaagcaaggaaaacaagcaaacttacccagttgcaaagagcctttcttgcagaaggggggatctgaaaaagccaacacatgagaaattgaatgttgagagagtctaagggccgtggcatcatctgcatcagcactgaactatcctgcaactgcagggaggaagctccttactttgcatttgtggtagtcctctgcccgccgccgcaactcttgcgcacgttgaaacattttcctatggattacaatcactttcatcagataaagcaccactttcaggatgattttaaataatctgccatgtttctgttatcctcacaactgtacccttacacaatctatctctacctagaaaacgtatttcagatggctataagagtacagtctgagccggtcacggtggctgacgcctgtaatcccagcactctgggagggcggggcagatggatcacgaggtcaggagattgagaccattgtggctaatatggtgaaaccccttctctactaaaaatacaaaaaattagccaggcgtggtggcaggcacctgtaatcccagctactcgggaggctgaggcaggggaatcacttgaacctgggaggcggaggttgcagtgagccaagatcacgtcattgcactccagcctgggtgacacagcgagactccatctcagaaaaacaaaaacaaaaacaaaaaaactgtacagtctgatccaaactgttgctgtattgattcctcctcttgcttactgcctgctgacttctgagatgatagtttccttccccattctcagtacatccctaattcatccttcattgagcatcttttatcataaagctgtattctctttgtattaatatccttaccgtgtttcacagggcagaaacagctgggcttataaacaggcatagtccttttgaaggatgtggttgatcctacaacaacacactttcctaaggatgacaacaactcaccccacccctagaatggctggtatgaaccgagtttccacatagtctagctggcaatggggtcaggagacgttttgctacttcacatcttttggtcactggtaaatattaaggtactttgttttctgttttgtgaactctctctcgctctctctcacgatatgtcttctgaccgtttgtttctatttctgcatttactgggtctaaatactgtacaaaggttaaaaacaacactccaatgggcgtttcccaggagggtggggttcagtttctgaactcacttgtaggtgtgtatttctttcatatccaatttcccattttcctctgcctctgatacctgcctctccttttctgcatgctcacattctttcacgcttagtttcctcagattagaagggagagaaatgcacacacatgatccaccagcccgtgtgggattccctctgcccttctggcatctgaaggctgtgattcaaagatcccccctgcaaccttcccacaaatgaaccaactgattctcacaaccgaagggagaattgacacctcccattgagggacaaaaaaaagtcacactctggcctgctggcaagtcacctgtcatttccagctcatcttcatagttccatagttagtcctattctttagtaaatataaagactattaaaagcttctatgaggtgcactatgtgtgtctctggggtcagtcttgtgcttgacacagcgaaagctcattttagttcagtgtgaaaaaccagacctcaccaattcatcacaactaactccatcggaagcagaggattgctcctcatctgactcctcctgtgtgagacctgattctcagtcagaggctgatgccagaactgagaccatcagccatagagagatccttccagaataaccccgcagttcactactgcactttgccatgattcaggactggaactcttgtcatcgactttaaagatcctggttgagagaaaaggcaatctgaatgctgggcgcatctattgaattagaaatgatcggaatggctcctaagtcagggtgttatgtcctgaaaataggtgacaacggcaaaccatccaccctggtgttgactgactttaacaaggttcagttcacagagattgagggcagaaaaagg

SEQ ID NO: 15712 - DNA, 2300 bp, Homo sapien
agaccgagacgggcaaatcacccgagctcaggagttcaagaccagcctggccaacatggtgaaaccctatctctactaaaaaaatacaaaagttagcagggcgtggtgatgggcacctgtagtcccagctacttgggagactgaggcagggagagttgcttgaaccccggaggtagaggttgcagtgagctgagatcgccccattgcactccagcctgggcaacagagcgagagactccgactcaagaaagttttcttggaacacaggtactctcattcctgtgtttcgtatgtggctggtgttttgttttgagagagagagtcttaactttgtcatctaggctggagtgcattggtatgatctcgggtcactgcaacctctgcctcccaggttcaagcgattctcctgcctcagcctcccgagtagctgggattacaagtgtgcgccaccatgcccagctaatttttgtaattttagtagagatggggtcccgctgtgttgcccaggctggtttcaaactcctgggctcaagtgatctgcccaccttagcctcccaaagtgctaggattacaggtgtgagccacaacacctgacctgtggctgttttcttactgtagcgatagacaaggagttgctgcattgcatagagatgctatattgcacgcaaaggctttactgacttcacaaaaaagtatttgtccaaggtgtagtgtactagatcccttccaatctgtaattttaatttaaaaatgtccaaataaaaaaagtccaaatacccctgttttgaaggataaactctgtatgcttgtgcttattttggagaagccataaacttactttgttttgtacatgatcagatgtgggcgctatctccaactgtctttgcacttctgagtaagaatctgatgattgtgcacagtgacctggctgttcacttccctgccattcagtatgctgtgctctacacattgtattctcattgtaccaggtactgtattcacaaatttttcttaagaaccccacaaaacattttatttttttaatggatagattttaaagatgtatgttgatttaactttggacttgcttgctttctttgattaaagatgaaaagataatctatgctttgtctttcaggcatgatcactttatctctagtagcctcagttcttcctctccttctttgtttgatggagctgtgattagcactgtaactacggccacaaagaaacatttctcaattatattaaatcttctgtgaatattacttaagaaagataaccttaaccaggacacgaggtaacagattttatatagtattaactattcctaactttgttaatttgcctttataatttgagaataagaaatgtgaattacaaaaaattttaaaaaatgtggattatagaggtgaggtagagcagcttctttactgtcaaacaccttataatttggttttattatttaatctaggctttcttattctttctgaaaagaaatacatgaaaaacctcaatcccccacccccagtgtttcatagaagaatatatatagatttttaatattctatgctttttttgtttttgagacggagttttgctcactgcaacctctgcctcccaggttcaagcaattcttctgcctcagcctcccaagtagccgtgattacaggtgcccgccaccacacccagctaatttttgtatttttagtagagatggtgtttcaccatgttgttggccaggctggtcttgaactcctgacctcaggtaagccaccacgcccggcctctttgctattatcatgctgcgttgggaggttttcttaaaaggcacacaacaattttgacagtaatttctatagtttcattttttatttttattttttattgtttgagatgtttgaaaaaccaagagaaaaccaatgtaagaagactaggcttttaacgtttttttgtttttgttattgtttttaatgtacagtcaactgtatattttgtgtttcaggaaactgttaatgacttgggctttggaagtagctgttttaatgaagaagtccgaaacatatgcacctttattctgtcttccgtctttccataaattttgcaaaggccttttagccaacagtaagactctgtttttttttttctattttgtttatcaatccttggtaatgggagatggtcatcaatagagctcttttcctgacctgcagatgtgtaatcctcattttaatgacagatacacagtcttgattttttttcattcttagtattagaaaaatgttttgaagtgattgtca

SEQ ID NO: 15713 - DNA, 2300 bp, Homo sapien
ataaatttgtacatatttaacactcagcttctataattagaaacaaatggcccatctggtttcatctaggcctctttgctatcctttcatctccagctggattattttaaagcaaattctagatgacattctgctgagcatttctgccagaattacacctctctttgctaatgtgaaaaaatgcccatgataactgtaaaatacgtgtgtcctatttaggtgtctaaacactttaatgtcacagtattaaggccttaaaatatagcttagatatatttttctaaattaaaagactttattttttagatatacagaaaattgagcagaaaacaatgagttcccatataccttcttcatcccaacagtttccccctcattaacatattgtgttagtgtggtacatttattacaaaggagtgaatattgatatattattattaactaattttatagtttactttgtgttatgtattctatggactttaacatgtgtaatgacatgtatcccctattaccagtatcatacaggatagtttcacttccctaaaaatctttgatgttctacccactccttcctcgttccctctcctcactcctccctccctccatcttaagcccatggcaacccctgatctttttactgtctccatcgttttgccttttccagaatgccatgtagttggagtcatatagtatgtagccttttcaattgacttctttcacttaccagtgtgcatttaaggtttctccatgtctttttgtaatttgagaagctcattttttaaaaattttattcttttagattgttgaacagataaatacgaaactgccatcatcatttgtagaaaaactgtttataccatcatctaaactactattcttgcgttatcataaagaaaaagaggtaagtaatacactgataatgaattttgacaacttgagtcactgaagagttggacctaatgttgcttaccaggctatataagtgaaattgagtgaaatgtgaaatgtttgatttagaatatagtgattgtatttgttcttttaaatttatatttcttgataatcatactgaatactttcatgaatgatgtgccagatactcttttcagactatgcatctcttgctgttattaaatttattaaattttcataagggtaaaacaagttgacacatttataaagttataaattaagtactgtatattttgtaaacaaaaatgactggcttttcaaccaccccctagtcaaatccaccacagactttcctggtagatttaagaaacccagtcttaaattgctgtttgcatatgtcttttgatgttgattatttaaaaaaaaacggccattttggaaatttcctattgacagttttcatttatagtactctttatttgtgataaaacttaatagatttgaaatagcatactgatctgtgtcagttttctgattggttttttaaaaattaaaatattaagtgctacggacagtgaattgatcaatcttaaatttatttgtatcatcagcactaatacagatagtgatttattttccatataattttagaagatttattttccatttatcacttccttgaattttttgtttttcaggttgttgctgtagcccatgctgtttatcaagcaatgctcagcttgaagaatattcctgttttggagactgcctataagttaatattgggagaaatgacttgtgccctaaacaacctcctgcacagtctgcaacttcctgaggcctgttctgaaataaaacatgaggcttttaagaatcatgtgttcaatgtagacaatgcaaaatttgtagttaaatttgacctcagtgccctgactacaattggaaatgccaaaaactcgagtctttaattgtaatgactttgttttatccacagttaagccttttctcattacatatttatgtatttcactgtcatgtcaacatgtctgcagaatcactgtatgtaacaaacagccatatttaagacatgcctggataaataaaattggtaggaatgttttcttgccattatatttaacgtttcttctttttccttgacaaatcttgataagtttttttatattagttttattttctagaaaacgtcttatgaatttctcccatttgctctagcatgcttatagaaaatgtcagtgtttcttacagctcaaatttgtatagttgttttaaaatgcggtctctttcttcttcccctggtacttttttctttctgtctactgaagttagttcttatacatggtcttatattttggctgtcttttttt

SEQ ID NO: 15714 - DNA, 2300 bp, Homo sapien
aacaaaaaaacgcaggaaaagagtgtgtgatggctgaaacttgcaatttctcactctcaacgagccctggccccaactaggttatttgggctccctccctaggtctcagggacctctgttcaaagtcctagcaatctgggccaggtacaatggctcacgcctaaaattccagcactttaggagaccaaggcgggcagatcacttgaggccaggagtttgagactggcctggccaacatggtgaaaccctgtctctactaaaagtacaaaaattagccgggcatggtggtgcacccctgtaatcccagctactcaggaggctgaagcacaagaatcttttgaacctgggaggcagaggttgcaatgagctgagatggcgccacggcactccagcctgggcgacagagcaagaccctgtctcaaacaacaaaaaacaaataaaacaaacaaggtcctagcaaccctactaacctgttatgaagactgatacaggggcatcacctgccccaattttctgactcaggtcagccttatattcctactctaatctcacccctatccccgtcccacacccactattcttaaaacctccatggtcctccgggggcagctgtagacacattaagcccagggctatggggccactggaaccttctccagtgggtctgaaaacatcagcattccaggagttgatgagcccctacctgggcaccactccctcttgggcctgagaaggccggggggaacctgcaaggaatatgtggaattctatatggtgcctctgatactgcggtaatgtcagggagaggtttgttcaactggtcagggccctgaaaccccgatcactttctcatctctgcatcttgaaggctagcagagaggaggaaccctgagctctctaggaggtgggtaggtggtggcagtacagactcctagatgtctaaacggagttgcagagagaaggctttctcggtagaccctggaagggacttttacggtagaactttcattttacaagcagggatagaggcctagatggggacagagacgtgtccaaggtaaaacaatggacggaggcagggcagggagaggccaggtcctagactcggcctcagcacccctcccacacacacatcgacacagaagctggtccagatttataatttaatggctgtgcagatcccagtccctcatttctgtcgctcacgtgcccactggtctggggtcagggttttctgttcaaaggcatggatgtgcgggagctcttctgctaggcacgcgttcaccagcctggggcgagagatggggttaggaaaaggccagcggtgatcgcacaccccgaggctagggtgacccaagagactggtgtccccaaggttgtagtccccaggccgtgggaacacgtacttggagagagggtctacatcgaaatactcgaagcaggggtcacgaaggcgggatcctcaaggtccctgagccacgccagggggagtgcgggagtcaggttgcaggggtagggggagtggctggggttgtggtacaggagctaggcaaggtgctcccagggccttacctgtgtctctgaagcagcggtttcccctcgaacttggccgacaccaccaggactcggaagctacaggagcaacggttgagggtcgtgtcctccacctcctaccgagcggaagaatatgaatggtgccgaacccgccccccgagctcttttccccttgtccggcggctcaactcaccacatgctccgcctccaggtcccgctgcagcttctcgcggaggtattcggcgctgagttccatggcggcagtccagctggaacggcagcccagcagggacacaaccccagctcgggcgccggccacgctaccttgctgccttacaggagccacttccgctggaaaactcacttccgcccttactaaggcgtacgtcaacgcagtacttccgccctcaagcagccgggctttccagcggtccaggcttttcgcgcttgccatgtgtcagccaatcagagcctgaggaaggtgggactcgggcggagccgatgctgaatggtacgcgctcgccgactggacagcagtctggcttccgcggtcggacttctacacccgcctccagacaggagaggggcacgtaccggcgctacggcttcctgcaggctgcctccggatagtccccgagagcttgttccgaagcaagcaccctgcagccctagcgatccagccctcccctggaccctaggtcacggcaatcaaccccctgctgtggttcccgaaccccaaggcccga

SEQ ID NO: 15715 - DNA, 2300 bp, Homo sapien
cctactctaatctcacccctatccccgtcccacacccactattcttaaaacctccatggtcctccgggggcagctgtagacacattaagcccagggctatggggccactggaaccttctccagtgggtctgaaaacatcagcattccaggagttgatgagcccctacctgggcaccactccctcttgggcctgagaaggccggggggaacctgcaaggaatatgtggaattctatatggtgcctctgatactgcggtaatgtcagggagaggtttgttcaactggtcagggccctgaaaccccgatcactttctcatctctgcatcttgaaggctagcagagaggaggaaccctgagctctctaggaggtgggtaggtggtggcagtacagactcctagatgtctaaacggagttgcagagagaaggctttctcggtagaccctggaagggacttttacggtagaactttcattttacaagcagggatagaggcctagatggggacagagacgtgtccaaggtaaaacaatggacggaggcagggcagggagaggccaggtcctagactcggcctcagcacccctcccacacacacatcgacacagaagctggtccagatttataatttaatggctgtgcagatcccagtccctcatttctgtcgctcacgtgcccactggtctggggtcagggttttctgttcaaaggcatggatgtgcgggagctcttctgctaggcacgcgttcaccagcctggggcgagagatggggttaggaaaaggccagcggtgatcgcacaccccgaggctagggtgacccaagagactggtgtccccaaggttgtagtccccaggccgtgggaacacgtacttggagagagggtctacatcgaaatactcgaagcaggggtcacgaaggcgggatcctcaaggtccctgagccacgccagggggagtgcgggagtcaggttgcaggggtagggggagtggctggggttgtggtacaggagctaggcaaggtgctcccagggccttacctgtgtctctgaagcagcggtttcccctcgaacttggccgacaccaccaggactcggaagctacaggagcaacggttgagggtcgtgtcctccacctcctaccgagcggaagaatatgaatggtgccgaacccgccccccgagctcttttccccttgtccggcggctcaactcaccacatgctccgcctccaggtcccgctgcagcttctcgcggaggtattcggcgctgagttccatggcggcagtccagctggaacggcagcccagcagggacacaaccccagctcgggcgccggccacgctaccttgctgccttacaggagccacttccgctggaaaactcacttccgcccttactaaggcgtacgtcaacgcagtacttccgccctcaagcagccgggctttccagcggtccaggcttttcgcgcttgccatgtgtcagccaatcagagcctgaggaaggtgggactcgggcggagccgatgctgaatggtacgcgctcgccgactggacagcagtctggcttccgcggtcggacttctacacccgcctccagacaggagaggggcacgtaccggcgctacggcttcctgcaggctgcctccggatagtccccgagagcttgttccgaagcaagcaccctgcagccctagcgatccagccctcccctggaccctaggtcacggcaatcaaccccctgctgtggttcccgaaccccaaggcccgatgggtcccgcgggggtcgcggcgaggccagggcgctttttcggcgtctacctgctctactgcctgaacccccggtaccggggccgcgtctacgtggggttcactgtcaacactgctcgtcgggtccagcagcacaatgggggccgcaaaaaaggcggggcctggcggaccagcgggcgagggccctggtgagagggggaggccttctgtgccgggaggaaggcgtcccagaggaggcggaccccgcggggcacaggcctgttgagaaggaccggccaggactgtgacagaggcggggcgtctgtggtggggacggggcctgtcgcaggggaggagcgtgacggggaggcggtgcccggggcatctccgcggcggaactcagggaaggagctagctggggcgggggtgatgatccaggctgggttccagcatagggctcttggtgggcacgctggggtcgggtggaatgcaggagagagaggaggtgggacaggtgggtacctgggctggaggcagggcctgaggtgggcaggtgca

SEQ ID NO: 15716 - DNA, 2300 bp, Homo sapien
tcttctgctaggcacgcgttcaccagcctggggcgagagatggggttaggaaaaggccagcggtgatcgcacaccccgaggctagggtgacccaagagactggtgtccccaaggttgtagtccccaggccgtgggaacacgtacttggagagagggtctacatcgaaatactcgaagcaggggtcacgaaggcgggatcctcaaggtccctgagccacgccagggggagtgcgggagtcaggttgcaggggtagggggagtggctggggttgtggtacaggagctaggcaaggtgctcccagggccttacctgtgtctctgaagcagcggtttcccctcgaacttggccgacaccaccaggactcggaagctacaggagcaacggttgagggtcgtgtcctccacctcctaccgagcggaagaatatgaatggtgccgaacccgccccccgagctcttttccccttgtccggcggctcaactcaccacatgctccgcctccaggtcccgctgcagcttctcgcggaggtattcggcgctgagttccatggcggcagtccagctggaacggcagcccagcagggacacaaccccagctcgggcgccggccacgctaccttgctgccttacaggagccacttccgctggaaaactcacttccgcccttactaaggcgtacgtcaacgcagtacttccgccctcaagcagccgggctttccagcggtccaggcttttcgcgcttgccatgtgtcagccaatcagagcctgaggaaggtgggactcgggcggagccgatgctgaatggtacgcgctcgccgactggacagcagtctggcttccgcggtcggacttctacacccgcctccagacaggagaggggcacgtaccggcgctacggcttcctgcaggctgcctccggatagtccccgagagcttgttccgaagcaagcaccctgcagccctagcgatccagccctcccctggaccctaggtcacggcaatcaaccccctgctgtggttcccgaaccccaaggcccgatgggtcccgcgggggtcgcggcgaggccagggcgctttttcggcgtctacctgctctactgcctgaacccccggtaccggggccgcgtctacgtggggttcactgtcaacactgctcgtcgggtccagcagcacaatgggggccgcaaaaaaggcggggcctggcggaccagcgggcgagggccctggtgagagggggaggccttctgtgccgggaggaaggcgtcccagaggaggcggaccccgcggggcacaggcctgttgagaaggaccggccaggactgtgacagaggcggggcgtctgtggtggggacggggcctgtcgcaggggaggagcgtgacggggaggcggtgcccggggcatctccgcggcggaactcagggaaggagctagctggggcgggggtgatgatccaggctgggttccagcatagggctcttggtgggcacgctggggtcgggtggaatgcaggagagagaggaggtgggacaggtgggtacctgggctggaggcagggcctgaggtgggcaggtgcagagggctgcacttctcggctgaagccgggaatgaggaccccgctctcgggtgggattggaggggacccgcggctgaggcgctgggctgcgacagggacatcacggttctcctcctcagggagatggtgctcgtcgtgcacggcttcccgtcctccgtggccgcccttcgggtaaggaaggagaccgggcagcggcggccgggtgagggcttgggttccgcccctcgctccgagccgccctgatgcccctgtacgccgcccgcagtttgagtgggcttggcagcacccgcacgcctcgcgccgcctggcgcacgtggggcctcgcctgcgaggagagacagccttcgctttccacctgcgcgtgctggcgcacatgctgcgcgcaccgccctgggctcgcctcccgctcacgctgcgctgggtgcgcccagacctccgccaggacctctgcctcccgccgccgccgcacgtgcctctggccttcgggcctccaccgccccaggccccggccccaaggcgccgcgcaggtccctttgatgacgcggagcctgagccagaccagggggatccaggggcctgctgctccctgtgcgcccagaccatccaggtgaggtccccccgaggaatggatggctctagagtccagacgacttcggatccagctctttcttgagggaaacccactgacacgctttggccaccctatccccatctctaagatgctgat

SEQ ID NO: 15717 - DNA, 2300 bp, Homo sapien
gctggaaaactcacttccgcccttactaaggcgtacgtcaacgcagtacttccgccctcaagcagccgggctttccagcggtccaggcttttcgcgcttgccatgtgtcagccaatcagagcctgaggaaggtgggactcgggcggagccgatgctgaatggtacgcgctcgccgactggacagcagtctggcttccgcggtcggacttctacacccgcctccagacaggagaggggcacgtaccggcgctacggcttcctgcaggctgcctccggatagtccccgagagcttgttccgaagcaagcaccctgcagccctagcgatccagccctcccctggaccctaggtcacggcaatcaaccccctgctgtggttcccgaaccccaaggcccgatgggtcccgcgggggtcgcggcgaggccagggcgctttttcggcgtctacctgctctactgcctgaacccccggtaccggggccgcgtctacgtggggttcactgtcaacactgctcgtcgggtccagcagcacaatgggggccgcaaaaaaggcggggcctggcggaccagcgggcgagggccctggtgagagggggaggccttctgtgccgggaggaaggcgtcccagaggaggcggaccccgcggggcacaggcctgttgagaaggaccggccaggactgtgacagaggcggggcgtctgtggtggggacggggcctgtcgcaggggaggagcgtgacggggaggcggtgcccggggcatctccgcggcggaactcagggaaggagctagctggggcgggggtgatgatccaggctgggttccagcatagggctcttggtgggcacgctggggtcgggtggaatgcaggagagagaggaggtgggacaggtgggtacctgggctggaggcagggcctgaggtgggcaggtgcagagggctgcacttctcggctgaagccgggaatgaggaccccgctctcgggtgggattggaggggacccgcggctgaggcgctgggctgcgacagggacatcacggttctcctcctcagggagatggtgctcgtcgtgcacggcttcccgtcctccgtggccgcccttcgggtaaggaaggagaccgggcagcggcggccgggtgagggcttgggttccgcccctcgctccgagccgccctgatgcccctgtacgccgcccgcagtttgagtgggcttggcagcacccgcacgcctcgcgccgcctggcgcacgtggggcctcgcctgcgaggagagacagccttcgctttccacctgcgcgtgctggcgcacatgctgcgcgcaccgccctgggctcgcctcccgctcacgctgcgctgggtgcgcccagacctccgccaggacctctgcctcccgccgccgccgcacgtgcctctggccttcgggcctccaccgccccaggccccggccccaaggcgccgcgcaggtccctttgatgacgcggagcctgagccagaccagggggatccaggggcctgctgctccctgtgcgcccagaccatccaggtgaggtccccccgaggaatggatggctctagagtccagacgacttcggatccagctctttcttgagggaaacccactgacacgctttggccaccctatccccatctctaagatgctgatgctataggacttacggccattcctgagcaaagcaggccctgctcagggccttcaccatttccccttcaaagaaaaggttcttccctaggccatcagtactccgctgcactccagtgtggtcgacagagcatgaccctcttttttttttttttttttttgagatggagtctagctctgtcgcccaggctagagtgcagtggcgcgatctctgctcactgcaagctccgcctcctgggttcacgccattctcctgcctcagcctcccgagtagctgggactacaggcgcccgccaccacgcctggttaattttttgtatttttagtagagacggggtttcaccgtgttagccaggatggtctcgatgtcctagcctcgtgatccgcccgcctcagcctcccaaagtgctgggattacaggcatgagccaccgcgcccggccctttttttttttttagacagagtcttgctctgttgcggaggctggagtgcagtgatctcagctcactggaagctccgcctcctgggttcaagcgattctcctatctcaacctcccaagtgtgccaccacacctgccgaatgtttgtgtttttagtagggatggggttcgccatgttgggcaggctggtctcaaactcctgacc

SEQ ID NO: 15718 - DNA, 2300 bp, Homo sapien
gaggaaggagaattgcttgaaaccaggaggcagaggttgcagtgagctgagatcgcgccactacactccagcctgagcgacagagtaagactctgtctcaaaaaaaaaataaataaataaataaaaagaaaatttctgggccatcggctcagtgcaggactttgttctacagcagtgataagtgctgccctctgatagtgcagtgtggcagttggggtgggagaggctaatgagatcaagaaaacacgtagcatgccagacaatagtaagtgttaagggaaagggggtgcagaaaagtgcacacaagaatgagctgcagttcattacattgttttagagacagggtcatgtccaggcatggtggctcacgcctataatcccagcactctgggaggccgaggcgggcagatcacttgaggtcaggagtttgagaccagcctgcccaacatggcgaaccccatccctactaaaaacacaaacattcggcaggtgtggtggcacacttgggaggttgagataggagaatcgcttgaacccaggaggcggagcttccagtgagctgagatcactgcactccagcctccgcaacagagcaagactctgtctaaaaaaaaaaaaagggccgggcgcggtggctcatgcctgtaatcccagcactttgggaggctgaggcgggcggatcacgaggctaggacatcgagaccatcctggctaacacggtgaaaccccgtctctactaaaaatacaaaaaattaaccaggcgtggtggcgggcgcctgtagtcccagctactcgggaggctgaggcaggagaatggcgtgaacccaggaggcggagcttgcagtgagcagagatcgcgccactgcactctagcctgggcgacagagctagactccatctcaaaaaaaaaaaaaaaaaaaagagggtcatgctctgtcgaccacactggagtgcagcggagtactgatggcctagggaagaaccttttctttgaaggggaaatggtgaaggccctgagcagggcctgctttgctcaggaatggccgtaagtcctatagcatcagcatcttagagatggggatagggtggccaaagcgtgtcagtgggtttccctcaagaaagagctggatccgaagtcgtctggactctagagccatccattcctcggggggacctcacctggatggtctgggcgcacagggagcagcaggcccctggatccccctggtctggctcaggctccgcgtcatcaaagggacctgcgcggcgccttggggccggggcctggggcggtggaggcccgaaggccagaggcacgtgcggcggcggcgggaggcagaggtcctggcggaggtctgggcgcacccagcgcagcgtgagcgggaggcgagcccagggcggtgcgcgcagcatgtgcgccagcacgcgcaggtggaaagcgaaggctgtctctcctcgcaggcgaggccccacgtgcgccaggcggcgcgaggcgtgcgggtgctgccaagcccactcaaactgcgggcggcgtacaggggcatcagggcggctcggagcgaggggcggaacccaagccctcacccggccgccgctgcccggtctccttccttacccgaagggcggccacggaggacgggaagccgtgcacgacgagcaccatctccctgaggaggagaaccgtgatgtccctgtcgcagcccagcgcctcagccgcgggtcccctccaatcccacccgagagcggggtcctcattcccggcttcagccgagaagtgcagccctctgcacctgcccacctcaggccctgcctccagcccaggtacccacctgtcccacctcctctctctcctgcattccacccgaccccagcgtgcccaccaagagccctatgctggaacccagcctggatcatcacccccgccccagctagctccttccctgagttccgccgcggagatgccccgggcaccgcctccccgtcacgctcctcccctgcgacaggccccgtccccaccacagacgccccgcctctgtcacagtcctggccggtccttctcaacaggcctgtgccccgcggggtccgcctcctctgggacgccttcctcccggcacagaaggcctccccctctcaccagggccctcgcccgctggtccgccaggccccgccttttttgcggcccccattgtgctgctggacccgacgagcagtgttgacagtgaaccccacgtagacgcggccccggtaccgggggttcaggcagtagagcaggtagacgccgaaaaagcgccctggcctcg

SEQ ID NO: 15719 - DNA, 2300 bp, Homo sapien
cgcacgcctcgcgccgcctggcgcacgtggggcctcgcctgcgaggagagacagccttcgctttccacctgcgcgtgctggcgcacatgctgcgcgcaccgccctgggctcgcctcccgctcacgctgcgctgggtgcgcccagacctccgccaggacctctgcctcccgccgccgccgcacgtgcctctggccttcgggcctccaccgccccaggccccggccccaaggcgccgcgcaggtccctttgatgacgcggagcctgagccagaccagggggatccaggggcctgctgctccctgtgcgcccagaccatccaggtgaggtccccccgaggaatggatggctctagagtccagacgacttcggatccagctctttcttgagggaaacccactgacacgctttggccaccctatccccatctctaagatgctgatgctataggacttacggccattcctgagcaaagcaggccctgctcagggccttcaccatttccccttcaaagaaaaggttcttccctaggccatcagtactccgctgcactccagtgtggtcgacagagcatgaccctcttttttttttttttttttttgagatggagtctagctctgtcgcccaggctagagtgcagtggcgcgatctctgctcactgcaagctccgcctcctgggttcacgccattctcctgcctcagcctcccgagtagctgggactacaggcgcccgccaccacgcctggttaattttttgtatttttagtagagacggggtttcaccgtgttagccaggatggtctcgatgtcctagcctcgtgatccgcccgcctcagcctcccaaagtgctgggattacaggcatgagccaccgcgcccggccctttttttttttttagacagagtcttgctctgttgcggaggctggagtgcagtgatctcagctcactggaagctccgcctcctgggttcaagcgattctcctatctcaacctcccaagtgtgccaccacacctgccgaatgtttgtgtttttagtagggatggggttcgccatgttgggcaggctggtctcaaactcctgacctcaagtgatctgcccgcctcggcctcccagagtgctgggattataggcgtgagccaccatgcctggacatgaccctgtctctaaaacaatgtaatgaactgcagctcattcttgtgtgcacttttctgcaccccctttcccttaacacttactattgtctggcatgctacgtgttttcttgatctcattagcctctcccaccccaactgccacactgcactatcagagggcagcacttatcactgctgtagaacaaagtcctgcactgagccgatggcccagaaattttctttttatttatttatttattttttttttgagacagagtcttactctgtcgctcaggctggagtgtagtggcgcgatctcagctcactgcaacctctgcctcctggtttcaagcaattctccttcctcagcctccagagtagctgggattacacgcgcctgccaccgcgcctggctaatttttgtatttttagtagagatggggtttcaaccatgttggccaggctggtctcaaactcctgacctcaggtgatcctgcccacctaagcctcccaaaatgctggtattacaggcatgagccaccgtgcccggcctaaatatttaataaaataatggacgatgggtgccttctactgagctcccggtaattgtgagtgagtagaggacttgccctggggacattcagtgacctgctgggtgttgctgagctgtgaggaagttcaggtctggctgcagtggtgaggctgtgactcaatcaatcactgctgatgctcccaggacctgcaccagcttagtcctaggggcaaggattttaactgtccacctcagtttcttcatttgtaagatgcaaataacagtcacccctgcctcatgggatggagctgtgtaatgcccgcaacagtgcctgctgcatagaggggttgctgccagctgcctctccctccttgtctcttacctgcctgctgcctgggtcaggatgaagaggggcccttgtgttgcccccaccctggctgcctgctaagggcccatgtgatctgcctggcagaggagtttcttcaggaagaaccagggcagcttctgcccctagagggccaatgcccttggtgagtgcagtcccctggccccagcctggtccacctctgggaagagggtgcccagttgtgcaatccaggcccaggcagctgagccctcatctcagcatccagggcg

SEQ ID NO: 15720 - DNA, 2300 bp, Homo sapien
cctggccccagcctggtccacctctgggaagagggtgcccagttgtgcaatccaggcccaggcagctgagccctcatctcagcatccagggcggatactggagggggcttgtggcatctgactctgtatctcctacctgcccctctccttggtagctgtgagaagtcactgctttggggagacctgatctggctgtgccagatggacactgagaaagaagtagaagactcagaattagaagaggtgagtgggctttggtggcgggctccctaccccactccctgccctgggctgcctgtgaccacactgcttgcctctgcaggcacactggacagacctgctggagacctgatcctcagtgtccttaccccctcctacctcttttctgtgccacctgctgtgggtccagcaggtttttacttgagtacaataaaaagtctgagtcaagggtgccttatggtggatgctgaggggaggggcggagctagtagcccaaggtcctgccagtcacggggcttcctcaggggcacagaggaggcaggaggggcccctggccctagcacgtgaacagcttctactctgcctggaaaccccatgcctcagctttcccctacttgcctctgagctcatgcaattcttggaagcctgggagacttaccttgaaattgaatgcaaataggacaaagaccaaggaggatggggggatgccctccttccacggggccctgtggcttccaagtcttaatctcctctagtctcttgtctacggagcctccttcaaacccagggaaagaaaagcacctgccagggttgtttttcttctaggatcttctattgatgctctgtgaggtcccccaggagccatgaagctagggctggctcctagggcaatgggactacagtgtccttgtcctttcttattctttctgttctttctttctttctttttttttttttttttttttttttgagacagagtctcactctgttgcccaggctggagtgcagtggtgtgatcttggctcactgaaacctccgcctcctgggttcaagtgattctcttgcctcagcctcctgagtagctaggattacaggtgcccgccatcatgcccagctaatttttgtatttttagtagagacagggtttcaccatgttggccagcttggtctcgaactcctgacctcaggtgatcctgctgcatcgacctcccaaagtactgggattacaggcgtgagccaccacgctcagcctctttcttgttctatatgtccatgctctgctccacttctgccccttcactctgcccccacacatcactccagactggccttgtggtcagagcctggaatgcctgggctgctgggggcctgtggactgcactgggccagaacccctgccgccttcaagactggcctgtagccagcaggtaggtgacttttcccaggccggcctatcccacctttcccctccactcactcacctcccttgcctgggtcaattagagaaagcttgtcggccaggcatggtggctcatgcctgtaatctcagcactttgggaggccgaggcgggcggatcatctgagctcaggagtttgagaccagcctggccaacatggcaaaaccccgtctctactaaaaatacaaaaattaaccggatgtggtggtgtgcacctgtaatcccagctactcgggaggctgaggcagaagaatcgcttgaacccaggagggggaggttacagtgagcggagatcgtgctactgcattgcagcctgggcgagagagcgagtctccatctcatataaaaaaaagaaaaagaaagaaagaaagcttgtctgttggcctgccctgcagggtggagttcagagggaaggtcaggagcctagtgacagctcaaaaaaaaaaaaacccaaataccaatgttggccccttttgcctttcattcatgtgttttctatacactaaactcacatattgggtttgcagatcactccaagcttggctggagctgtggtggtaaggagggtaatagagaagcttccccaccctcaaccccaccccttccttcctggagttcccagccctgactttagatccctcccacactggaccttcaaaaccctcagggcagagagcagccctacactccctacaccacacccatactcagcccctgcaggcaaggagagaacaggtcaggttcccgagagctcaggtgagtgacacgttggaatggcccagggcaccttcaccctgctcagcttgtggctccaacattctagaagccgaggcctctgccatc

SEQ ID NO: 15721 - DNA, 2300 bp, Homo sapien
ctgggagacttaccttgaaattgaatgcaaataggacaaagaccaaggaggatggggggatgccctccttccacggggccctgtggcttccaagtcttaatctcctctagtctcttgtctacggagcctccttcaaacccagggaaagaaaagcacctgccagggttgtttttcttctaggatcttctattgatgctctgtgaggtcccccaggagccatgaagctagggctggctcctagggcaatgggactacagtgtccttgtcctttcttattctttctgttctttctttctttctttttttttttttttttttttttttgagacagagtctcactctgttgcccaggctggagtgcagtggtgtgatcttggctcactgaaacctccgcctcctgggttcaagtgattctcttgcctcagcctcctgagtagctaggattacaggtgcccgccatcatgcccagctaatttttgtatttttagtagagacagggtttcaccatgttggccagcttggtctcgaactcctgacctcaggtgatcctgctgcatcgacctcccaaagtactgggattacaggcgtgagccaccacgctcagcctctttcttgttctatatgtccatgctctgctccacttctgccccttcactctgcccccacacatcactccagactggccttgtggtcagagcctggaatgcctgggctgctgggggcctgtggactgcactgggccagaacccctgccgccttcaagactggcctgtagccagcaggtaggtgacttttcccaggccggcctatcccacctttcccctccactcactcacctcccttgcctgggtcaattagagaaagcttgtcggccaggcatggtggctcatgcctgtaatctcagcactttgggaggccgaggcgggcggatcatctgagctcaggagtttgagaccagcctggccaacatggcaaaaccccgtctctactaaaaatacaaaaattaaccggatgtggtggtgtgcacctgtaatcccagctactcgggaggctgaggcagaagaatcgcttgaacccaggagggggaggttacagtgagcggagatcgtgctactgcattgcagcctgggcgagagagcgagtctccatctcatataaaaaaaagaaaaagaaagaaagaaagcttgtctgttggcctgccctgcagggtggagttcagagggaaggtcaggagcctagtgacagctcaaaaaaaaaaaaacccaaataccaatgttggccccttttgcctttcattcatgtgttttctatacactaaactcacatattgggtttgcagatcactccaagcttggctggagctgtggtggtaaggagggtaatagagaagcttccccaccctcaaccccaccccttccttcctggagttcccagccctgactttagatccctcccacactggaccttcaaaaccctcagggcagagagcagccctacactccctacaccacacccatactcagcccctgcaggcaaggagagaacaggtcaggttcccgagagctcaggtgagtgacacgttggaatggcccagggcaccttcaccctgctcagcttgtggctccaacattctagaagccgaggcctctgccatccctgccctttcccatggatattccatttcaattagacaacccagcctggccggaatccccctgcgttccttcttttcctttgtgtatttttgagacagggtgttgctccgtcacccaggctggagtgtagtgggatcctggcccactgcagcctcaaattcctaggctgaggcaatcctgccgcctcagcctcctgagtagctggggttacaagagcaagccaccacacccagctaattttgaaaaatattttttgtagaggagaggtcttgctttgttgtccaggttggtctcaaactccagggctcaagggatcctttcccgttggcctcccaaggctctgggattacaggcgggagtcaccctgcctgggcccctccttttgatgagtcatcagttttcattcccgcacgaggctctagcccctggtaccagcttagttgctcaatgggctgtgtttgttctggagcccagatggactgtggccaggcaagtggatcacagacctggccggcctgggaggtttccacatgtgaggggcatgaggggggctcaaggaggggagcatcggggagaggagcgcactgggtggaggctgggggtcccagcaggaaatggtgagacaaagggcgctggctggcaggg

SEQ ID NO: 15722 - DNA, 2300 bp, Homo sapien
tagggatgtactgagaatggggaaggaaactatcatctcagaagtcagcaggcagtaagcaagaggaggaatcaatacagcaacagtttggatcagactgtacagtttttttgtttttgtttttctgagatggagtctcgctgtgtcacccaggctggagtgcaatgacgtgatcttggctcactgcaacctccgcctcccaggttcaagtgattcccctgcctcagcctcccgagtagctgggattacaggtgcctgccaccacgcctggctaattttttgtatttttagtagagaaggggtttcaccatattagccacaatggtctcaatctcctgacctcgtgatccatctgccccgccctcccagagtgctgggattacaggcgtcagccaccgtgaccggctcagactgtactcttatagccatctgaaatacgttttctaggtagagatagattgtgtaagggtacagttgtgaggataacagaaacatggcagattatttaaaatcatcctgaaagtggtgctttatctgatgaaagtgattgtaatccataggaaaatgtttcaacgtgcgcaagagttgcggcggcgggcagaggactaccacaaatgcaaagtaaggagcttcctccctgcagttgcaggatagttcagtgctgatgcagatgatgccacggcccttagactctctcaacattcaatttctcatgtgttggctttttcagatccccccttctgcaagaaaggctctttgcaactgggtaagtttgcttgttttccttgcttttggacatagtctgccaggtcaggacatggatacatttttctccctacagctctgtgctcaagccctgcagagggagatggcagagagaaaggctgcctacaagcatcacagtcccatccctgttggtaaccgtgttgtgcaaaaacaccttcatccccacccagtggggcccctgatctaatattctaagtgtcagaggttccgtatttgtaatagcagatgggccctgactgtaaactagtgaagagtgaatgtaacttattacccacagggacaattccaaatgaaggccttaaatgatgctcagctaagctggttcttgtgtggcctctgtaccttcaaaagctgccgagtcctatgattacacgtgatgggacttgtacacttgaagtgaaacacagttttaaaacttgctttgtttagaattcccacctcatttttccatggacaaaagtattctttatgtcctagtgcacttacaatttggtattacctgggagtgaaaagaaatattacagccatgcctaagtgacttcttgaggtgagattgttctgtcagaaaaccctctcccagttcccctgcagctcttcaggaatccacatctctccagagctctttgttctcatgggtggcacctccagagtgaagaagatcctttgtcaagaagggaaacagaggggaaatgagagggtcctgcaggcagagctggaatcaacttccactctgcctcttgcaagctgtgtgaccctgggcacaatttctccttcctctggaaacctctgttttcttagatttggagcagggtggtcacactgaccttgcagagttctgagagtcagagacagaacataaaaggcctggaaaacattctccaaaaagaagctgcaacatgtgtggacagtgggcttttcatgcctctcttactgtctcttactgtctgttgacctggtgcaagaaacatgctctggtgatggctgtgagggaggaatgaggatagacatagacactcctgtgtctcaaacatgcttctttattactctgttatgactctgtcttccctggggcaggaccccagcctgcctacatttgcagacagacacagtggcatgtggagacaacagtgtgtcccaatgactttcctttaccctccagctgtcggcagtactcagtggaagggtgatattatgacactgatactgctattttgaaacctggaggatggaaaggtgcaaaaatctatcaccagcaacagaaggtgcagactgtgttggtggcggtaattttgtccatcaaatgaatatgtgtgaaaacattccctcctttggccctacaggtcagaatggcggcagcggagcatcgtcattcttcaggattgccctactggccctacctcacagctgaaactttaaaaaacaggatgggccaccagccacctcctccaactcaacaacattctataactgataactccctgagcctcaagacacctcccgagtgtgtgctcact

SEQ ID NO: 15723 - DNA, 2300 bp, Homo sapien
ctgacacttagaatattagatcaggggccccactgggtggggatgaaggtgtttttgcacaacacggttaccaacagggatgggactgtgatgcttgtaggcagcctttctctctgccatctccctctgcagggcttgagcacagagctgtagggagaaaaatgtatccatgtcctgacctggcagactatgtccaaaagcaaggaaaacaagcaaacttacccagttgcaaagagcctttcttgcagaaggggggatctgaaaaagccaacacatgagaaattgaatgttgagagagtctaagggccgtggcatcatctgcatcagcactgaactatcctgcaactgcagggaggaagctccttactttgcatttgtggtagtcctctgcccgccgccgcaactcttgcgcacgttgaaacattttcctatggattacaatcactttcatcagataaagcaccactttcaggatgattttaaataatctgccatgtttctgttatcctcacaactgtacccttacacaatctatctctacctagaaaacgtatttcagatggctataagagtacagtctgagccggtcacggtggctgacgcctgtaatcccagcactctgggagggcggggcagatggatcacgaggtcaggagattgagaccattgtggctaatatggtgaaaccccttctctactaaaaatacaaaaaattagccaggcgtggtggcaggcacctgtaatcccagctactcgggaggctgaggcaggggaatcacttgaacctgggaggcggaggttgcagtgagccaagatcacgtcattgcactccagcctgggtgacacagcgagactccatctcagaaaaacaaaaacaaaaaaactgtacagtctgatccaaactgttgctgtattgattcctcctcttgcttactgcctgctgacttctgagatgatagtttccttccccattctcagtacatccctaattcatccttcattgagcatcttttatcataaagctgtattctctttgtattaatatccttaccgtgtttcacagggcagaaacagctgggcttataaacaggcatagtccttttgaaggatgtggttgatcctacaacaacacactttcctaaggatgacaacaactcaccccacccctagaatggctggtatgaaccgagtttccacacagtctagctggcaatggggtcaggagacgttttgctacttcacatcttttggtcactggtaaatattaaggtactttgttttctgttttgtgaactctctctcgctctctctcacgatatgtcttctgaccgtttgtttctatttctgcatttactgggtctaaatactgtacaaaggttaaaaacaacactccaatgggcgtttcccaggagggtggggttcagtttctgaactcacttgtaggtgtgtatttctttcatatccaatttcccattttcctctgcctctgatacctgcctctccttttctgcatgctcacattctttcacgcttagtttcctcagattagaagggagagaaatgcacacacatgatccaccagcccgtgtgggattccctctgcccttctggcatctgaaggctgtgattcaaagatcccccctgcaaccttcccacaaatgaaccaactgattctcacaaccgaagggagaattgacacctcccattgagggacaaaaaaaagtcacactctggcctgctggcaagtcacctgtcatttccagctcatcttcatagttccatagttagtcctattctttagtaaatataaagactattaaaagcttctatgaggtgcactatgtgtgtctctggggtcagtcttgtgcttgacacagcgaaagctcattttagttcagtgtgaaaaaccagacctcaccaattcatcacaactaactccatcggaagcagaggattgctcctcatctgactcctcctgtgtgagacctgattctcagtcagaggctgatgccggaactgagaccatcagccatagagagatccttccagaataaccccgcagttcactactgcactttgccatgattcaggactggaactcttgtcatcgactttaaagatcctggttgagagaaaaggcaatctgaatgctgggcgcatctattgaattagaaatgatcggaatggctcctaagtcagggtgttatgtcctgaaaataggtgacaacggcaaaccatccaccctggtgttgactgactttaacaaggttcagttcacagagattgagggcagaaaaagg

SEQ ID NO: 15724 - DNA, 2300 bp, Homo sapien
tggttttcctttctcttttttttttttttttttttcctgagatggagctttgctgttgttgcccaggctgtagtgcaatggcacaatctcagctcactgccttttgggttcaagcaattctcctgcgtcagcctcccaagtagctgggattacaggtgcccaccaccacgcccagctaatttttgtatttttactagagatggggtttcaccatgttgtccaggctggtctcgaacttctgacctcaggtaatccacctgcctcagcctcccaaagtgctggtattagaggcgtgagccaccacagccagccttttttttttttttttttttttttaattttgagatagagtctcgctctgtcgcccaggctggagtgctatggtgcaatcttggctcactgcaacctctgcctcccagtttgaagcaattctgcctcagcttcccgagtagcttggattacaggtgtgtgccaccacatttgaccaatttttttttttttttttttttttgagacagagtctcactctgtcacccaggctagagtgcagtggcatgatcttggctcactgcaacctccacctcccaggttcaagcgattcttatccctcagcctcttgagtagctgggactacaggcatatgccaccatgcccggataatttttgtatttttagtagaggcggggtttcaccatattggccaagctggtctagaactcctgacatgatccgcacacctcggcctcccaatgtgctgggattacaggcgtgagccaccgtgcccggcccaatttttgtatttttagtagagacgggttcaccatgttggccaggctagtcttgaactcctgacctcaggtgatctgcctacctcagcctcccagtgtgagccaccgcacccagcctggattgttgaattcaatgcttgggtcacctccagattcattttcacagtctttcatgttttggtcatatgacattgtattttgctgccatatgactgatctttttttgttaaatgtgagatacttgttaaaaaatgtttagcaatgaattgaggcctagtagcatgttatcttgctgcagaagagatgggagtctacttctgggggatggtcaggggtcctccatacaggctgcaattgaagtcgtcggtgcaggctcagtccctacaaaggccagggtatttcctgtccacctttattctgatgcatgactcttctgggtctcaaccagagccagtggacttcagtacgggtcgctttcattggcagaccctcaatccacttgttttccatctaatcccacgcatgtgtgcaaaagctgctgtgcttctttgcatctcagtagttccttctggaattcagcaatgaaactcagggaaatgggttccaaatgcgaggctgactttcgtcctgggtttccttcttctccatcttcacctcatgtctgtttactgccatgttagcaatttgatgtattcaatcatgggttttatattctgtttggtgtcccccattgttctcatcggagatcagaagcttcagatgcacttatgtcaactcaagagtagaatgcttccttagcttccctccagagtcaggttttgtgtttctagttcccaagtgcacagcaggagtagtgatgtcctcactggcttctcatttgcattaagctgtgagcttctttagcgtggggacaggaccctgctcccattgcattctcagcaccacaccacacactccttgtttgaggccactccagacagcatgtgctgaaggatgccttgtggtcagaaacaagttcattaactttctctttgaagtgttttcgcccctgtttcctagcgttctgggaattttacacatccttcctataaaaccaagtatcaggtgagatccttaggatcaggaccatgaatcaagtggagtgagggcaacacagcaaacttaccctttttaggccgtttcctttttctgccctcaatctctgtgaactgaaccttgttaaagtcagtcaacaccagggtggatggtttgccgttgtcacctattttcaggacataacaccctgacttaggagccattccgatcatttctaattcaatagatgcgcccagcattcagattgccttttctctcaaccaggatctttaaagtcgatgacaagagttccagtcctgaatcatggcaaagtgcagtagtgaactgcggggttattctggaaggatctctctatggctgatggtctcagttccggcatcagcctctgactgagaatcaggtctcacacaggaggag

SEQ ID NO: 15725 - DNA, 2300 bp, Homo sapien
ttccaaggcgccagctctggaacgaaggatgcccttgggaggtgatgacactcaggtacacgggtgctcaacagattgcttcctcctatcctcagacggtctttgcatgcatgcagccattggcactcccattgtgtggaaggaaaccagcccagggtcacacagctggtcagcagcaacatagctgttctcaaatctaaggtgcctgaccatgcctccatgagggaccgcctccaagggaggttgatcctggctttggggagcctttcctgggctgcacgaataacctccattgttcgagaccccaaactctgctcacatcttcctttccctatctctgcttgggctatgatcacggtgactctagcagcccttcatggacattatagtactctctgccattcacttttgctctaatctgacttcaacccccacttacttggtctctccttttacaaccaccacaaccgaaatctagggctgctttttttttttttttttttttgagacagagtctcattccattctgtcacccaggctggagtgcaatggtacaatctcggctcactgcaacctccgcctcccgggtccaagggattgtcctgcctcagcctcctgagtagctgggattacaggcgtgtgccaccatgcctggctaatttttgtatttttagtagagatggggtttcaccatgttggtcaggctggtctccaactcctaacctcgtgatccgcctgcctcagcctcccaaagtgctgggattacaggcgtgagccaccatgcccagccaaatctagggcaggaacatggctgcagcatataaaaagaattgaattccatacttttgttaaccctgttttttgtttgtttgtagttgttgctgtttttgagacagagtctcgctctgtcgcctaggctggagtgcagtggtgcaatctcggctcactgcagactctgcctcccgggttcaaactattctcctgcctcagcctcccaagtaggtgggactacaggcgcccaccaccacacccggctaatttttgtattttattagagacagggtttcaccatattggccaggctggtctggaactcctgaccttgtgatccgcccacctcggcctcccaaagtgctgggattacaggcgtgagccaccacacccagcccgttttgtttttgttttgcttgcttcttagggttgtttttctatttatggtaaaggcattggctttccatttgtagcatcaatagaatatttcctgtttacaataaccttatgtcatagtaaatggtaaagggatttaaagcagtggttttcagctgccagaggcctgagagagtttgggcatactctgtgtgatcgggcagaaggcctgtgggaagtttagcagaggacagggccaggaaagttgatggacagtgggggtctgtcctggtcaccaggcccctgggtcctgcccacctgcttggagctccccacccatcacacatgatgctgccaagccctctgggtattgtgggcaaataccttaggagagaagctgatgaactttgtttcttgaaatgcacagattccttggacgtccctgagagctcagtcatgaaagtcaacttggttttctccccctcatttgggttcagaatttaaagtccacacacacaggcagtaagatgatatagataaggacgtcatcactcggtttcggatgttaaaatgtctaggtgggttagcggtgatttgagatcacacaaccttgtgccacaaagaggaattcccaggccagagggagacattttattgccatgttatgatctcatcattgagttgaaaggcaatcttgtttcattttggattctttcttatgtttatgtcttataagggcactttgaatttccaagcaaataataattttgaattagcttttaatcattgacttctagcacagttatatgatcagaaacatgctgtgtgatttgattgctctcaaatatattgagatttgctggaacaaaataagtcaggttaatttttgtaaatgtaccaggcatgcttaaaatgaatgtatctacatttgttcctgagatacaggttgatggacggatggctacatggatgtgatggagatggtttactatcgggaccttccgcaccctgctgatgttttgttgcttaggatatgaatggctgagcggaggctgtaaaacctggcactctgcttgggtatgaggttcttcctgccatcctgccatcatttgttttttatgttttgtcgccataagtgaccttgaggaaccctg

SEQ ID NO: 15726 - DNA, 2300 bp, Homo sapien
agtttgtttatttatttatttatttatttatttgagacagagtttcgctcttgttgcccaggctggagtgcagtggcacgatctcagctcaccacaacctccgcctcccaggttcaagcgattctcctgcctcagcctcccgagtagctgggattacaggcatgtaccaccacgcccgggtaattttgtatttttagtagagacggggggtttctccatgttggtcaggctggtctagaactccagacctcaggtgatacccctgcctcagcctcccaatgtgctgggattacagctgtgaagccaccgcgcccggctgctgtgatagttgagatgtaaaccaaaaataaaattctaagccacccaatccgactgaatggacccttcctgttgagcaaggacattccaaagtaaactgaaaagaccagcttaggccatgatgggaaggggaggtgtcaacatgcctcattctaccttcctccctctggaatccagacacaactgaccagcattaacattaaaacagagatcttaagctgggcacagtggctcatgcctgtaatcccagcactttgggaggccaaggtgggatcacctgaggtcagaagttcaagaccagcctggccagtatggtgaagccatgtctctactaaaaatacaaaattagccggacattgtggtgcacgtctgtcatcccagcaaggcaggcgaatcacttgaacccaggaagcagaggttgcagtgagccaggatcatgccattgcactccagcctggtcaacggagcgagactccgcctcattaaaaaaaaaaaaaaaaaaaattagccgggcgtggtggcgggcacatgtagtcccagctactagggaggctgaggcaggagaatggtgtgaaccagggaggcggagcttgcagtgagccgagattgtgccactgcactccagcctggacagaaatgcatttcataatgcattttaattgcattagcagtgatttaatttttttagatgttaaaacttatgggtgaaagtggattaaatgtagccaaatgcaacatcaaaatcttcaggcacaaaaacccattaactttttcatactctcagaaggtgaacctaatttcaaatgaaagctgcctccagaatatattgttaagcgtattctagatataattcattttggcaaacatactgtagaaattcacataacattttactgtactaaaagtaaattgcccatgtaacaaaaaatatcttttcagagcttgaaatgaattttaaaggatgactgatggtccttggaagagaaatagtaaacaaataaggtttgtagcaatgatgtatgagttagaaattgcagttccagatgatctctttattaaagagacgatctacacttaatttggtcaagtgttatgaacatagttcatgttaagtctccatttaaatacaacctgaaataccaaagttaattttcttttctttctttctttttttttttttttttttagaaggagtcttgctctgttgcccttcctggagtgcagtgacgtgatcttggctcactgcaacctccacctcctgggcttgagcgatcctactgcctcagccccccaagtagctgggaggacaggcgcaagccacggcactcagctaatttttgtatttttcgtagagatagggtttcaccatgttgcccaatttggtctcgaactcctgagctcaagtgatccgcccgccttggcctcccaaagtgctgggattacaggcatgagccaccgtgcctggccagaaaattgtaaacacacacaaactctcaagtggcctaattccctctcaccaaaccaatcacaatacagataaaagagaataacttgtgttcatttttgtacaaacaaaaaagatataaattgtgaatgatgcatgatttttaattacaagtaaactgggcaaatgcttctgcattatttaaagctaaaaggtgatcagtggaaactttcctctgttagtactctaatactttttatatttatcggctcactacaacctgtgcctaccaggttcaagcgattctcctgtctcagccacctgagtagccgagaccacaggcacgcactaccatgtccggctaattttgtatttttaatagagacagggtttcaccgtgttggccatgctggtcttgaactcctgacctcaaccgatccgcctgccttggcctcccaaagttctgggattacaagcgtgagccaccgcgcccagccttattataattgttactatttaaatctcttttgctctctcc

SEQ ID NO: 15727 - DNA, 2300 bp, Homo sapien
ttttggtgggttttggccagctccttcactgcaacctgttttatcagcaaggtctttatgactggtattttgtgctgaccttctatgtcatcctgtgacttagaatgccttaaccatcagggaatgcagcccagtagtttcagcctcatttttcctggctcctatttaagatggagttgctctggttcacacacctctgacatgatcattgcccactgcggcttccacctcccgggttcaagagatcctcctgcctcaccctcccaaggtgctgggactacaggtgtgtgccaccacgctcagctaatttttgtattttttgtagagatggtgtttttccatgttgcccaggctggtctcaaactcctgggctcaagcaatccttctgtctcagcctcccaaagtactgggattacaggcatgtcccaccatgcccagactaatatttacttttaatcagactaagatagggttactacttgagttgctatggctccagctgaaagaaagcccgtgcagtcatatcacgcgtaaacatttgctttatgctaaaaatatggtggacctggcattacagctattacaaatctcctaagatgtctcgggtagtgtattagttacttttcatactgctatgaagaaatactggaaactgggtaatttataaagaaaaagaggtttaatgtactcacagttccacaaggctggagaggcctcagaatcatggtggaaggcaaggagcaaaaaggtatgtcttccatggcagcaggcaagagagcacgtgcagggaaactgccctttataaaaccatcagatttagtgagatgtattcactatcacgagaacagtatgggaaaaacctgcccccatgattcgattacctcctaccgggtccctcccacgacacatggggattatgggaactacaattcaagatgaaatttgggtggggacgcagccaaaccatatcgggtagcaacaacctagggtcagttttgcaggtggtaaagccatttaccaagatagttgtaggtaaagaagggcagatttattagagaaattgtgaaaatatgttgcagtgggcagctcagcagagaaggggctacctgcaaagaggcaagggctggaggaaagttttatagggtcctgctgaagggtgctacgtgtggaatgaggtcattgtgcccgcaggttgtttgtgattagctgtttctaacaattgttcatacaatcattgttcattattgttctcaacttggggctctccccaacctggggacccttccttattgttgcttacttatcaggtctccacataaaggtgtggaaacttcattcattcatatcttcaacacaaattgtaggtagcctgttttttaaaacatttattcaacaaatatttagtccaagccactattacttattaccttctctactattgtatggacttttaactatctctgacactattcactattcttccacattctctattatttatacctatggtaaaatttgccagtttgaccatacaactaatactcacagggaatatatagagtctagaagaaaatatacaggtccttaaaggctgccctgccaacaaaaccataacgcaggaacaaacatcacaactatgccaaataatcaatcctacaatgtccaaaattttactttaaaactggaatttccagacttcctttctgcattaaccagtttaactagacagtaacgaaatattcctactttatgctgtgatagtttgtttatttatttatttatttatttatttgagacagagtttcgctcttgttgcccaggctggagtgcagtggcacgatctcagctcaccacaacctccgcctcccaggttcaagcgattctcctgcctcagcctcccgagtagctgggattacaggcatgtaccaccacgcccgggtaattttgtatttttagtagagacggggggtttctccatgttggtcaggctggtctagaactccagacctcaggtgatacccctgcctcagcctcccaatgtgctgggattacagctgtgaagccaccgcgcccggctgctgtgatagttgagatgtaaaccaaaaataaaattctaagccacccaatccgactgaatggacccttcctgttgagcaaggacattccaaagtaaactgaaaagaccagcttaggccatgatgggaaggggaggtgtcaacatgcctcattctaccttcctccctctggaatccagacacaactgaccagcattaacattaaaacagagatcttaagctggg

SEQ ID NO: 15728 - DNA, 2300 bp, Homo sapien
ttgctgggattacaggcacactccactacacccagctaatttttttgtattatttgtagacatggggtttcgccatgttgcccaggctagtctggaattcctgaggtcaagctgtctgcccatctcagcctcccaaagtgctgggattgcaggagtgcaccaccacacctggcctgaaacccagattttatttatttatttattcattttttgagatggagtcttgctctattgcctaagcttgagtgcagtggcgcgatcttggctcactgcaacctccacctccctggttcaagcgattctcctgcctcagcctcccaaagtgctgggattacaggcatgcaacaccacacccagcctgaaacccagatttttaatatgaaatcaaagtcttcagaccttgtaggtgtcataaaaagcacgctgaggaccactagtttgcaactgccaatctaaaatatcatagacattatatcactttaaccacgaaaaaaaaagtatgtgaggcagaaaatggaagcaaccatgcctaatttattgttgaatactttttccgtataccaagagcttcctttgcactagcatctgaaactatatccagaatgacactggttttcataaaagtgttgatcctcacacctctttatagtcttgcacctagcccagtggagtgaaacactttaaatagcacttgttccttgagtatatatggaaaaaagtgaagtattgataagtgctcagctaatatgagcagcatctcaggagtctccaattcttgaattaccagggagtatttttaccattttcccccagtgaaaggcctattttgagagacttatcctccaaaatgaatgtattaagtcatgttccttttttttttttttttttgagacagggccttgctctgttgcccaggctggagtgcagtagcatgatagttacaggaaaggggtcccaatctagaccccaagagagggttcttggatcttgtgcaagaaagaattcagggtgatgccacagtgtgaagtgaaagcaagtttattaagaaagtaaaggaggaggggcaccgtggctcactcctgtaatcgcagcactttgggaggccgagacaggtggatcacgaggtcaggagatcaagaccatcctggttaacacggtgaaacctcatctctactaaaaatacaaaaaaattagccaagtgtggtggccggtgcctgtagtcccacctactctggaggctgaggcaggagaatgggatgaacccgggaggcgaagcttgcagtaagccgagatcgcgccactgcactccagcctgggtgacagagggagactccatctcaaaaaaaaagagagaaagtaaaggaataaaagaatggctaccccatagacggagcagccgtgagggctgctggttgcccatttttatggttatttcttgatgatatgctaaacaaggagtggatttttcatgcctcctctttttagaccatatagggtaacttcttgatgttgccgtggcatttgtaaactgtcatggtgctggtaggagtgtagcagggaggatgatgggaggtcagtcttgtctctattttggttttggtgggttttggccagctccttcactgcaacctgttttatcagcaaggtctttatgactggtattttgtgctgaccttctatgtcatcctgtgacttagaatgccttaaccatcagggaatgcagcccagtagtttcagcctcatttttcctggctcctatttaagatggagttgctctggttcacacacctctgacatgatcattgcccactgcggcttccacctcccgggttcaagagatcctcctgcctcaccctcccaaggtgctgggactacaggtgtgtgccaccacgctcagctaatttttgtattttttgtagagatggtgtttttccatgttgcccaggctggtctcaaactcctgggctcaagcaatccttctgtctcagcctcccaaagtactgggattacaggcatgtcccaccatgcccagactaatatttacttttaatcagactaagatagggttactacttgagttgctatggctccagctgaaagaaagcccgtgcagtcatatcacgcgtaaacatttgctttatgctaaaaatatggtggacctggcattacagctattacaaatctcctaagatgtctcgggtagtgtattagttacttttcatactgctatgaagaaatactggaaactgggtaatttataaagaaaaagaggtttaatgtactcacagttccacaaggct

SEQ ID NO: 15729 - DNA, 2300 bp, Homo sapien
agaccgagacgggcaaatcacccgagctcaggagttcaagaccagcctggccaacatggtgaaaccctatctctactaaaaaaatacaaaagttagcagggcgtggtgatgggcacctgtagtcccagctacttgggagactgaggcagggagagttgcttgaaccccggaggtagaggttgcagtgagctgagatcgccccattgcactccagcctgggcaacagagcgagagactccgactcaagaaagttttcttggaacacaggtactctcattcctgtgtttcgtatgtggctggtgttttgttttgagagagagagtcttaactttgtcatctaggctggagtgcattggtatgatctcgggtcactgcaacctctgcctcccaggttcaagcgattctcctgcctcagcctcccgagtagctgggattacaagtgtgcgccaccatgcccagctaatttttgtaattttagtagagatggggtcccgctgtgttgcccaggctggtttcaaactcctgggctcaagtgatctgcccaccttagcctcccaaagtgctaggattacaggtgtgagccacaacacctgacctgtggctgttttcttactgtagcgatagacaaggagttgctgcattgcatagagatgctatattgcacgcaaaggctttactgacttcacaaaaaagtatttgtccaaggtgtagtgtactagatcccttccaatctgtaattttaatttaaaaatgtccaaataaaaaaagtccaaatacccctgttttgaaggataaactctgtatgcttgtgcttattttggagaagccataaacttactttgttttgtacatgatcagatgtgggcgctatctccaactgtctttgcacttctgagtaagaatctgatgattgtgcacagtgacctggctgttcacttccctgccattcagtatgctgtgctctacacattgtattctcattgtaccaggtactgtattcacaaatttttcttaagaaccccacaaaacattttatttttttaatggatagattttaaagatgtatgttgatttaactttggacttgcttgctttctttgattaaagatgaaaagataatctatgctttgtctttcaggcatgatcactttatctctagtagcctcagttcttcctctccttctttgtttgatggagctgtgattagcactgtaactacggccacaaagaaacatttctcaattatattaaatcttctgtgaatattacttaagaaagataaccttaaccaggacacgaggtaacagattttatatagtattaactattcctaactttgttaatttgcctttataatttgagaataagaaatgtgaattacaaaaaattttaaaaaatgtggattatagaggtgaggtagagcagcttctttactgtcaaacaccttataatttggttttattatttaatctaggctttcttattctttctgaaaagaaatacatgaaaaacctcaatcccccacccccagtgtttcatagaagaatatatatagatttttaatattctatgctttttttgtttttgagacggagttttgctcactgcaacctctgcctcccaggttcaagcaattcttctgcctcagcctcccaagtagccgtgattacaggtgcccgccaccacacccagctaatttttgtatttttagtagagatggtgtttcaccatgttgttggccaggctggtcttgaactcctgacctcaggtaagccaccacgcccggcctctttgctattatcatgctgcgttgggaggttttcttaaaaggcacacaacaattttgacagtaatttctatagtttcattttttatttttattttttattgtttgagatatttgaaaaaccaagagaaaaccaatgtaagaagactaggcttttaacgtttttttgtttttgttattgtttttaatgtacagtcaactgtatattttgtgtttcaggaaactgttaatgacttgggctttggaagtagctgttttaatgaagaagtccgaaacatatgcacctttattctgtcttccgtctttccataaattttgcaaaggccttttagccaacagtaagactctgtttttttttttctattttgtttatcaatccttggtaatgggagatggtcatcaatagagctcttttcctgacctgcagatgtgtaatcctcattttaatgacagatacacagtcttgattttttttcattcttagtattagaaaaatgttttgaagtgattgtca

SEQ ID NO: 15730 - DNA, 2300 bp, Homo sapien
ttgtacatatttaacactcagcttctataattagaaacaaatggcccatctggtttcatctaggcctctttgctatcctttcatctccagctggattattttaaagcaaattctagatgacattctgctgagcatttctgccagatttacacctctctttgctaatgtgaaaaaatgcccatgataactgtaaaatacgtgtgtcctatttaggtgtctaaacactttaatgtcacagtattaaggccttaaaatatagcttagatatatttttctaaattaaaagactttattttttagatatacagaaaattgagcagaaaacaatgagttcccatataccttcttcatcccaacagtttccccctcattaacatattgtgttagtgtggtacatttattacaaaggagtgaatattgatatattattattaactaattttatagtttactttgtgttatgtattctatggactttaacatgtgtaatgacatgtatcccctattaccagtatcatacaggatagtttcacttccctaaaaatctttgatgttctacccactccttcctcgttccctctccccactcctccctccctccatcttaagcccatggcaacccctgatctttttactgtctccatcgttttgccttttccagaatgccatgtagttggagtcatatagtatgtagccttttcaattggcttctttcacttaccagtgtgcatttaaggtttctccatgtctttttgtaatttgagaagctcattttttaaaaattttattcttttagattgttgaacagataaatacgaaactgccatcatcatttgtagaaaaactgtttataccatcatctaaactactattcttgcgttatcataaagaaaaagaggtaagtaatatactgataatgaattttgacaacttgagtcactgaagagttggacctaatgttgcttaccaggctatataagtgaaattgagtgaaatgtgaaatgtttgatttagaatatagtgattgtatttgttcttttaaatttatatttcttgataatcatactgaatactttcatgaatgatgtgccagatactcttttcagattatgcatctcttgctgttattaaatttattaaattttcataagggtaaaacaagttgacacatttataaagttataaattaagtactgtatattttataaacaaaaatgactggcttttcaaccaccccctagtcaaatccaccacagactttcctggtagatttaagaaacccagtcttaaactgctgtttgcatatgtcttttgatgttgattatttaaaaaaaaaaaaaaacggccattttggaaatttcctattgacagttttcatttatagtactctttatttgtgataaaacttaatagatttgaaatagcttactgatctgtgtcagttttctgattggttttttaaaaattaaaatattaagtgctacggacagtgaattgatcaatcttaaatttatttgtatcatcagcactaatacagatagtgatttattttccatataattttagaagatttattttccatttatcacttccttgaattttttgtttttcaggttgttgctgtagcccatgctgtttatcaagcaatgctcagcttgaagaatattcctgttttggagactgcctataagttaatattgggagaaatgacttgtgccctaaacaacctcctgcacagtctgcaacttcctgaggcctgttctgaaataaaacatgaggcttttaagaatcatgtgttcaatgtagacaatgcaaaatttgtagttaaatttgacctcagtgccctgactacaactggaaatgccaaaaactcgagtctttaattgtaatgactttgttttatccacagttaagccttttctcattacatatttatgtatttcactgtcatgtcaacatgtctgcagaatcactgtatgtaacaaacagccatatttaagacatgcctggataaataaaattggtaggaatgttttcttgccattatatttaacgtttcttctttttccttgacaaatcttgataagtttttttatattagttttattttctagaaaacgtcttatgaatttctcccatttgctctagcatgcttatagaaaatgtcagtgtttcttacagctcaaatttgtatagttgttttaaaatgcggtctctttcttcccctggtacttttttctttctgtctactgaagttagttcttatacatggtcttatattttggctgtctttttttccc

SEQ ID NO: 15731 - DNA, 2300 bp, Homo sapien
ttataattcattatcttatttaagcctcacaacaaccttacatgttagataggtatcatcctcattttatgcaagagacaaccaaggcttggagatcaagtaatttgtgcaaaggcacacatacttttcagtgctggagctgggatttgagcccagatctttttttaacttgtattctctgctgccttatggtactactgtgtcaccagaaaatgatacaaacatttaactcttaatagtaaaggtagtataggagataagtaaacatgatgaaaacaggaagtgaagatatgtttaaatattggcagacttcagttatctttgtgtttctgaattagtcaagtgcttattttatttgctcatctaataagagcttactgtggcgtacatataaagttcacaccctgtcagaaaagattataagctctcttacatttcagtctcctttcagaaagtaatggtatgctatgatttatatagacgcatgttaaatgtgctatttttaggtacataaggaatgtcttttcattagtttaaaaaagttatggtccattgagttaatattttaatgcttatagacttagtatactcagaaaatattctcatacatttttcttgaaattccatagatttaattttcccttatgttcgaagtacttagctttatgaataagcgaactctgaatattagaaggtactccttatggagccgtagtcattttagtatgctaggttttgaatttcatgaagtttcagattgagatcctttgtaagtaatgacttgtaccagttagatatccaagtttaattggacctattgtctgcattctgtattaacagtgattgcagtaagtgcagatcaaggtgtccaactgattgagctcatgcaaagttttatgtttagtatttttgggagcaaggaaagactaataaactctaaatgaaatatatacagtatacaaacactgctgtcacttttacaccatagaggggcaaagcgtagaggaataggttagtttctggccttgccagtgtcctaaacttttctaaaagattcaggttctaaaaggttgagaaagcatttttagtaaatatcatagaagtgattttctttttttttttcctcaaagttgttcctctcaggagaaaatcagtaggggaagaacttacttggatttttcatatgctataacagattattttgttgtcttctttcttaatagtttatgattgatggctgaaagagtaacactcgtgagaagtcttgtaactcagctctgttttacttatgaggcagttgaagcgtagagcagatacttagatgaggacaaacttttacccttggctgtaccctacttgtttactaataagcatcaggtattattctaaacagtacctaaattttaaatagattatgaactacaactttccgatataacgttattgcatttctgataccttttattttcttaaaatgtcttcttttttactttttaaaattttgattgctacctttacaattaaggcatcttcaatggggtcttcaatactacagtacctaatcagtacttagaaaataacttggtaagacattgcctgtccctgacatgctgccagtgttttttatttttatgataggaaaggctgaaatgttttgactgattaaccctctccatgggggagaatttagaaagaattattcttattatcaagtcatgtgaggagaacactggaccagagtaaccaattgtcctgttttgcctgggacaggaggctttcaatgctaaaaccagcaaagtcaccctaatcccagtagttattcgtatttctgaatgggtctttagaacagtagaagagactgaaaagttggcatttcatccattgagaatctcttcccagtgaaagacttcttattagacggctgagtgcttacatataatatatagtacatattacattaaatacaatagtaatggttaaatgtaaaatttgggagaagagaggcttgtttaaagaaagatttatttatgttatttaaagttctaatcttaaacttttctctttttatagaactgatagtgcatcagctgacccaggtaatttaaaatattcttcatccagagatagaggtggttcttcctcttacggactgcaaccttcaaattcagctgtggtgtctcggcaaaggcacgatgataccagagtccacgctgacatacagaatgacgaaaagggtatatatattttcttattgctacaagcatgttttttgaacctacctatcccaccttcttgccttc

SEQ ID NO: 15732 - DNA, 2300 bp, Homo sapien
ggctggagtgcagtggtgtgatctcagctcactgcagcctcaaccttccccagctcaggtgatccttctacctcagcctccccagcagctgggactacaggtgcaccaccaccacgctgggctagtttttgtattttttgtagagacggggtctccctatgttgcccaggctggtcttgaactcctgggctcaagagattttcccaccttggtctcccaaagggctggcattacaggcgtgagccaccgcgcccagcctccaagtcatctttcacacgcagagcacgcctgagagcagcaacaagactaacgttggggccaaagctaagaagtggggcggagcctccctggtggccggtcgtcagcccagtgcctgaaatgcatgcaaagtctatttttattttgcgtagttgaacctaagcaaaaaatctggccctacaatctctaaccttgctcctaactggcacctaccctattgcacaagaagctatctaggggaggactcagtgagcactcggtgagtttgcccagccatggtggtactgtctccttccctctgcaggcacagcgggaagaatagggcggatggagggctctctgcaccttccacagccagcagcgtggacggcagattacaagttagtatctgtgtgacctccgcactcccctgccggtggctgcctgggctgctgagatttcgcttggttttatcactgcagaggaatgcccgccataccggggggcgagcaaggtccagaatgacaagccgtggcattcctcagccgcctcctccccggggtggggcctggacattcctggctgcagctagaggtcccagcatgacagggattctgaccccccctccaccacggctattgttcaggattctgtggattccagaggcatctgcccagcagactgtcttgctgtgaacacccagctctgcaaccggtgtttgcgtgtttgccctgggaggctgaacgctcacccagaacaaaggcctccccacatgcctgctgtgagcttccaaggactcgttaggacacacgccaaggaaccccgggtgggggtgataccgaggagcttcctccctgacccacacacaccctttgaagaggtctttggctgctcaccagtctggtcaatctcggggcagtatttatattccttcccgtttccaggcctaggagccttggcatcctgctctcgcctctaactgaaattacctctcaaccctttttagctaagatgcctctcgcattccccaggaataacaagctttaaagccccttcacactgaagcctgcctttgaattccccagctagatttgggggtgggggtcttatggctcccggtgaacccccggttctgttgattaaattgagctcaggcagattgctggcttcccaaagcctgtgttattactgcttctcaaagctacgggcaccggatcgccatctttggcaagattcttttgggatacaatgggaattactgggtggcctcggttcggttcttccctcgtctcagttcgcggctcaccagccacattgatgcagcccccaggctggaaggaggctgcaggagcttcccctcaggtcatcctctcatccctcccccgtgccccaggagctggttgtgggggcggttccatcccctaggcccatccgggacaggagcctaggttcccttcggggggtaccccaaaccccatccttggcctcaggccagccctggtgcactgcccgctcccaggcttgacgagaggctgcgggccagtgggtgaaggggctcgccctgactgccaggccccgcccaggcgcacccgggaggacggggtgggatgacgcgggcgccgggggggtaggtcgcgaggccggggtctccatggcgcaggaggacgggggccttcgaggaccacgcgggcctgggaatcgcctgccaggctaggccggaggacgcacgtgctccgagctgggtcgagggggcggggctgagagccgcggccgggccacggggcggggaggagccgcggacggtgggcggggccagcgggccggggcctaaaaggcggcgcgggcggggttcttgacgcagctgcgggcggcgagcggcgcgcacaatcctcgctcggctgcggctctcgggtgtcccaggcccggccggtaagcagagcatggcgggtgcgggcccgaagcggcgggcgctagcggccccggtggccgaggagaaggaagaggcgcgggagaagatgctggcctccaagcgcgcggacggcgcggcgccggcaggcgagggc

SEQ ID NO: 15733 - DNA, 2300 bp, Homo sapien
cacctcctgggttgaagcgattctcgtgcctcagcctcccgagtagctgggattgtaggcgcccgccaccatgcccagctaattttttgtgtttttagtagagacggggtttcaccatgttggccaagctggtctcgaactcctgacctcaggtgatctgcctgcctcggccttccaaagtgctgggcttacaggcatgggccaccgtgcccagccgtttatatgtattaactcttaatcatcaaaacaaactatgtggtattaccataattatcgccatttatacaaagcaacagagggataaggagattaaggcacttgcccaagtgcaagaggtaggacaggaacccagagtcccgtgctggtagctgcttttctgtgcacttaacattatctcatttaattcttgcagtcacttcatgaagaaggtggcggtcctagggcattggagaagttatgtgcttgttcaaggtcatgcagctggaagatggtggtggtaggacaggaagtctgtagggcctgattctgcagccctctagtctatactcctttgctcctgtgtccctcatcccccctgcagaatgggcaccccgttacctttctgagccactgtgcgcagaaaagagagcatgttggccaggctggtctcgaactcctgacctcaagtgatcagcctgccttagcctcccaaagtcctgggattacaggcgtgaaccaccacgctcagcctctgaatactttgtactcaagccatttttcagtgctgtgtttgcagtgagcacacccgagggatgaagacacgtctccctgtgggaacctgggcttaccagggcccctagaggaggggaatctctcaagctcagagctctatggctgcggtgcaggcccactgtgtgcatggtgtcagtctgggcccttccatgttgcccccgtgggacttggggtaaggggaactgatgcaaacatcacgctgctgttgcttggtgtgagcaattaattcctgtggctctcacccaggagtctcatgtctttgggtcagacaaactcatcagcttgtagaaatggcacagtcccacgggcctgttagaatcttctattgtgcacatgttgctcttaaaatatacaaatcagttttgattttaaaaaattatttatttttttagtgataggagttttgctacgttgcccaggctggtttcaaactcttgggctcaggaggtcctcccactttggcctggactgccagcataatgtatcaccacacccgggactgattttcgtttttcaagaacaaaaaccaaaaacatacacaaaccgagagtcaaagcttgctaattagaggaaagtcaggaaatgggaaccattcaaagaagaaaatacccccacctcctactctcacctatccaaagacaattaggtgaatcccttagtagatatctttccagacggttttccatatagattcccatatctggccaggcgcggtggctcacacctgtaatcctagcgcttggggaggctgaggcggatggaccacctgaggtcaggagttcgagaccagcctgaccaacatggagaaacctcgtctctacgaaaaatacaaaattagccgggcacagtggtgcaagcctgtaatcccagctactcaggaggccgaggcaggagaattgcttgaacctaggaggcagacattgtgctgagccgagccaagatcatgccattgcactaaactccgccttaaaaaaaaaaaaaaagattcccacatctttactagtttgcagaaataagatcctagcatatgcagtgtgtaggaaccaccttggtttagccacgtctctgtgactgggggccactgtggtgacccccagctccccggacagagtcaagagctcaccagcctgcaaaggttttcacggcccccagccagactcgggggcttcctcttgccctgctacttcctgggagctctgagggcaggaaatggcgccactcagctcctggcctaacagcttggggaccacaaatgcaaaggaaaccaccctcccctcccacctcctcctctgcacccttgagttctcaggctcacattcccaccacccacctctgagcccagccctccctagcatcaccacttccatcccattcctcagccaagagccaggaatcctgattccagatcccacgcttccctgcctccctcaggtgagccccagacccccaggcaccccgctggcccctgaaggagcaggtgatggtgctgtcttcgcccagcagctgtgggagcaggcgggtggggcagg

SEQ ID NO: 15734 - DNA, 2300 bp, Homo sapien
ccatttatacaaagcaacagagggataaggagattaaggcacttgcccaagtgcaagaggtaggacaggaacccagagtcccgtgctggtagctgcttttctgtgcacttaacattatctcatttaattcttgcagtcacttcatgaagaaggtggcggtcctagggcattggagaagttatgtgcttgttcaaggtcatgcagctggaagatggtggtggtaggacaggaagtctgtagggcctgattctgcagccctctagtctatactcctttgctcctgtgtccctcatcccccctgcagaatgggcaccccgttacctttctgagccactgtgcgcagaaaagagagcatgttggccaggctggtctcgaactcctgacctcaagtgatcagcctgccttagcctcccaaagtcctgggattacaggcgtgaaccaccacgctcagcctctgaatactttgtactcaagccatttttcagtgctgtgtttgcagtgagcacacccgagggatgaagacacgtctccctgtgggaacctgggcttaccagggcccctagaggaggggaatctctcaagctcagagctctatggctgcggtgcaggcccactgtgtgcatggtgtcagtctgggcccttccatgttgcccccgtgggacttggggtaaggggaactgatgcaaacatcacgctgctgttgcttggtgtgagcaattaattcctgtggctctcacccaggagtctcatgtctttgggtcagacaaactcatcagcttgtagaaatggcacagtcccacgggcctgttagaatcttctattgtgcacatgttgctcttaaaatatacaaatcagttttgattttaaaaaattatttatttttttagtgataggagttttgctacgttgcccaggctggtttcaaactcttgggctcaggaggtcctcccactttggcctggactgccagcataatgtatcaccacacccgggactgattttcgtttttcaagaacaaaaaccaaaaacatacacaaaccgagagtcaaagcttgctaattagaggaaagtcaggaaatgggaaccattcaaagaagaaaatacccccacctcctactctcacctatccaaagacaattaggtgaatcccttagtagatatctttccagacggttttccatatagattcccatatctggccaggcgcggtggctcacacctgtaatcctagcgcttggggaggctgaggcggatggaccacctgaggtcaggagttcgagaccagcctgaccaacatggagaaacctcgtctctacgaaaaatacaaaattagccgggcacagtggtgcaagcctgtaatcccagctactcaggaggccgaggcaggagaattgcttgaacctaggaggcagacattgtgctgagccgagccaagatcatgccattgcactaaactccgccttaaaaaaaaaaaaaaagattcccacatctttactagtttgcagaaataagatcctagcatatgcagtgtgtaggaaccaccttggtttagccacgtctctgtgactgggggccactgtggtgacccccagctccccggacagagtcaagagctcaccagcctgcaaaggttttcacggcccccagccagactcgggggcttcctcttgccctgctacttcctgggagctctgagggcaggaaatggcgccactcagctcctggcctaacagcttggggaccacaaatgcaaaggaaaccaccctcccctcccacctcctcctctgcacccttgagttctcaggctcacattcccaccacccacctctgagcccagccctccctagcatcaccacttccatcccattcctcagccaagagccaggaatcctgattccagatcccacgcttccctgcctccctcaggtgagccccagacccccaggcaccccgctggcccctgaaggagcaggtgatggtgctgtcttcgcccagcagctgtgggagcaggcgggtggggcaggatggaggggtgggtggggtgggtggagccagggcccacttcctttccccttggggccctgtccttcccagtcttgccccagcctcgggaggtggtggagtgacctggccccagtgctgcgtccttatcagccgagccggtaagagggtgagacttggtggggtaggggcctcagtgggcctgggaatgtgcctgtggcttgaaaagactctgacaggttatgatgggaagagattgggagccattgggctgcacagggtcagggaaggccaggagg

SEQ ID NO: 15735 - DNA, 2300 bp, Homo sapien
aaaaaaaaaaaaaaagtgagctggaggatgaggcctccctaaattttgtgccttgggtgtctcgatccgtcacgccagccccagtcccggcagtcaggtgcggcagagaaagcaaagggagaaggctgggaagatgcaagtgaatttagcgactagcagtccctgtgagcaactgtagcaagaagggtttccaatgaagaaaggaaggccctgggccaggcgcggtggctcatgcctgtaatcccagctctttgggaggcagaggcgggtggatcacctgaggtcgggagctcaagactagcctgaccaacatagagaaaccccgtctctactgaaaaaaaatacaaaattagccgggtgtggtggcgcatgcctgtaatcccagctattcgggaggctgaggcaggagaatcgcttgaccccgggaagcggaggttgcagtgagtcgagatcacgccattgcgctccagcctcggcaacaagagcgaaactccatcaaaaaaaaaaaaaaaaggaagaaagaaaggccctggcagttcttggacaggaacttgcctgaagtcccagtcccggtgactggtggtttccccactttctggttcagaagctgggctctaagctgtctgtgcccttaaagttccttggaaagagggaagggaagggaagtggatattaggtgagttcctactctgtttcatttgcagagttttctcattgattctcagttggacccatgaggtagatgttatgccattacattttttttttctttagagacagggtctctctctgtcactcaggctggactgcagtggcacgatcacggctcactgcagctttgaactcctgggctcaagtgatcctcccatctcagcctacaggtgtgcaccactgtacttagctaatttctttttcttttttctttttttgggagagatgggatctctgtatgtctctatgatgcccacactggtctcaaactcctggcctcaagcgattctcctgccttggcctcccaaagcacagggattacaggcatgagtcgctgtgcccagcctgttatgccgggtttttttgttttgttttgttttttgagacagagtctcgctctgtcgcccaggagtacagtggcatgatcttggctcactgcaagctccacctcccgggttcacaccattctcctgcctcagcctcccgagtagctgggactacaggcgcccaccaccacacccggctaattttttggttttttagtagagacggggtttcaccatgttagctgggatggtctcgatctcctgacctcgtgatctgcctgcctcagcctcccaaagtgctgggattacagtcgtgaaccactgcatccggcctgttatgccgttttttaaattaattaataaatttatttatttatcttgagacagagtctcactctgtcacccaggctggagtgcagtggcatgatctcgactcactgcaacctccacctccggggttcaagtgagtctcatgcctcagcctcctgagcagctgggattacaggcggccgccaccatgcccggctaatttttgtatttttagtagagatggggtttcgccatgttggccaggctggtctcaaactcctgacctcaggtgatcaacctgcctctgcctcccaaagtgctgggattacaggcgtgagctcctgtgcccggccctgttatgccattttaaagctaaggaaactgaggcacagaaaaaggtaaaaaggtacttgagatcaaaaaggatggagttaggatttgaacccaggtccagggcccatgattttcccagcacaccatccaaaatgcctgcctgccctcaccagggagcacatgcttacattcacagccttggaccctgggttagggccaggagggctgggtgttgggtgagaacagggcctcgggctccttcactggctggggcagggcttctgagttccccatcagagcccctcctctgactttcagggcctgctgaggaatctgcaggcctggcagaggacaggagggaggcttggggagcctgggaagggccggctgacagcttgatgggccctccctccctccacagtcccacccccagcctggggcctctgggagccttggtcctgagcagccaacacaccagcccagacagctgcaagtcaccatggacgctgaaggtaaagggacactctctctgccatgtccctgcacccatccccccactgcctacccctgcccccaccctggcttgtctcagccccttgttgcctcctctggagtcatctc

SEQ ID NO: 15736 - DNA, 2300 bp, Homo sapien
ttcgaggctgtagtgagttgagattgtgccactgcactccagtctgggtgacagagttgagattctgtctcaaaaaaaaaaaaaaaaaaaaaaaaaagacaaagtttggaaaattaaacccccagggaaatggaaactacatctgctgctcacccacctgcctgcctctcctaaagggaagattgggtacttggggtcccatttctgtagggtggagcattataagtaagcctagcttgtggcaaatctgtctctctggacactccagcaagctggaagggacgatgatcagaggtcacagtttgggagttgccctgctctaggacaacgctcctctccacattggatgaaactcagtttcccctggccatggccttcctcaccatggagtggtgagggtccgaggctgagacgtgtgcagatggaggagaatgggcagaggagcctgtgggttttctctgactctaggtccccactccagcaagacagcgccgctgcagcttggcccagcaagttcctccttgcagtttgggggtcaaagccacagttcatatgaaacaaaatgttcctctgcctggtctggtcctctctttgtgtattttcctagaggacctcacagtgggtgagtggccaaggagaacaggatttgtggctctgggaaactggattcctgtcatctcctgccagctgtcatcgccacaccgaggctgttcagcaccgcaggacccgttctctttggtattggtggcttcggtaaacactgaaagaaggtggaggtggctggtcgatgccatttcctgactatctagtaccttgggttcttcatctggatgcgatcttgaaggcttctggcctggcattggctccacccccaggtctctgagccacagcccaggtagctgagcagaggcactgctgggcttcccctagtccacatagcctggccaccacccagacccggggagggggactccaggtggaaggagcctgggaagggcatcttcgctggggcagtctcaatcctaatgctggatcctggggtccccggtcccactgaggcaaggcctgcctcggggatctctggggaaccctggggattcagaaccccacactggtccggccttcacgcttccagaaagctgagatctgctccaaggtgacccgtggctggaggccccactcaggatccgggctccctggccgctgcctcctggcctgggggctcccaaactggacgctggcctctggcctctgctcgggttcagcccagctcaccaggcctgtggcggggggcctcccctcccagggctggggcccccagaaggtgctccgggctgggacctccagtacggtctgggggcccaagttgctgggagcagaatttggggctgagggggcaggtggggctgttgctcgggcctccaaagtgcccacctgggtgggaggctcaggggcccgatctgtcagcagggggaccgcagagccataccagtcctcagagcgctctcgggcggtgcccatgggctcaatccacagctctcctcctgggcgccacaccagggtgggtgcacggtggctggggtctgggcggagagcacggcggaacaggcgttcagccaacacagcggtggtgaggatgaagagcgcagccagggtggccaggaccagcatgatggggatgcagggcccacagggcagtgagggccatggggctgcttcccatgcggggggcccctccacgcgcccagagggcggctctggagtcaacggcatctgagagacacaggggtgagaagaggaagtaaatgaggcagagggggcacaaccaagatgagagagaggcagcaggtgtccaggaaagcctgggagaagggctgggcatgggggctcatgcctggaatcccagcactttgagaggtcgaggcgggaggatcacttgagcccaggagttcaagaccagcctggacacacagtgaaacctcatctctaaaaataatttaaaaactagctgggtgtggtggctcacacctgtagtcccagctacacaggaagctgaggtgggaggattacttgagcccaggagtttgaagctgcagtgaccccagattgcaccactgtcctccagcctgggcaatagagcaagaccctttctcaaaaatgaaaaagaacattctggagagacagagaagcaagagggaccagaaagggtaagcgtgagccaggtggggtgggaggacaggcagcctacctcggggcacagccaggccctcctgcctggctctccaggcctttccagaatc

SEQ ID NO: 15737 - DNA, 2300 bp, Homo sapien
atcaggagtcagagctgtcttcttgcagagtcagttctgggtgggggccacaagatcagatgagccagtttattgatctgggtggtgccagctgatccatcaagtgcagggtctgcaaaatatctcaagcactgatgttaggagcagtttagggagggtcagaatcttgtagcctccagctgcatgactcctaaaccataatttctaatcctatggctagtgttagtctagtccccaggcaagaaggtctgctttgggaaagggctgttactgtctttgtttaaactataaactacaaactaagtttctcccaaagttagttcagcctacgcccaggaataaacaaagacagcttggaggttagaagcaaggtggagtcagttaagttagatctctttctttgcaaaggcggtttcccccggactctccatctccagctcctcccagcagggctcaaaaccaccaggatggggcagtctgacggagactgtcttttcattcatttatttatttaatttatttattttgagacagagtctcgctctgttgcccaggctggagtggaatggcacgatctcggctcactgcaccgggttcaagcgattctcctgcctcagcctcctgagtagttggggtcataggcgtgcggcaccacgcccggctaatttttgtatttttagtagagacggggttttgccatgttggccaggctgctcccaaactcctgacctcaggtgatccacccgcctcggtctcccaaagtgctgggattacaggcatgagccacctcgcccagcccagggatttctatctattcttccaccaccctggccactacatgctcacccacacatacattggtcatgcgactttggtcatgaaatctcttttctttaagccttacttttgtcatctgtggatgagtcaaactagagaatctcagaaagtcacctggactccagagcctgatgacatcttgtcacactctgctccaggctcctcccaccctcagcagcaggaaagagggacagacatgaggatggtcagggttttggaaacaggcccacgcctgtttttataccctggactcctctcagaggcttgacatttttgttacccaagcctcacctcactgatattttccaaccaaaatgggggctaaatggtctgaagagagagagacttatgttaattaaaagtatgaggcaggggccagtgtggtagctcacacctgtaatcccagcactttgggaggctgaggcaggaggatctcttgaggccaggagcttgagaccagcctgggcaacatagcaagagcccatctctaccagaaaaaaaaaaaaaaggtgtgaagcaagctggccaagcagggggtgcctgtgggggctgcatggcaggagcagatctggggaggcaccgtggataagacaaggcaggatggggtggggcatcctcccaggaggaacgggggaggcaccatggttctctgggaatgtacgggctaaagtcccagtgtcctatttctttttcttttcttttcttttctttttttttaagacggagtctcactctgttgcccaggctggagtgtggtggcacgatctcagctcactgcaacctccgagtcccgggttcaagcgattctccctgcctcagccgcctgagcagctgagattacaagtgcccgtcaccatgcccagctaatttttgtatttttcagtagagatggggtttcgccatgttggcaggctggtctcgaactcctgacctcaggtgacttgcccaccttgacctcccaaaatgctgggattacaggggtgagccactgtgcctggccccggcgtcctctttctcagcttttcggtgaatgttctggggctcagggcctggctatggggtgacactaagttcaacagaaccattgcccattccagccccaccttaccccaggaaaagcctcctcaccgcagtgaccacatccccttgggttgctttggaaacaaacactccccaggggcagacgagttggggcacagttgcccagcaacaggcggtgccctcccttccgccttcatccgaggccgggcctctacgtctgagaggcggaccgccctgcaccctccaagcctgcacctcttagtccagcaccaggaagagtggctctaggagggagaggagcccagggactgacccaaggtgagttgaggggtgcaggaggccccctgcagatggaggatgtgggggacagagaggtgtgcagagacaaacgagagatagagacaggccagagcctgggcaaa

SEQ ID NO: 15738 - DNA, 2300 bp, Homo sapien
gaaatagagcgacagaggaaagagagctttaccccttttatattttcaacctagccttggaagtcatagtgtgacactcctgatgcattctacttgtgaggattcagtcactaaggccagccaatattcaagaggaggggaattagacttactattttcaataggaggaatgttaaaaattttgcaaacatgttttaaaaccaccacgtaggccaggcgcggtggctcacgcctgtaatcccagcactttggggggctgagttgggtggatcacctgaggtcaggagttcaagaccagcctggctaacatggtgaaaccccatctctactaaaaatataaaaactaatcgggtgtggtggtaggcgcctgtaatcccagctactcgggaggctgaggcaggagaattgcttgaacccgggagacggaggtttcagtgagccgacacggagccactgcactccagcctcagcaacagagtgagactccatctcaaaaacaaacaaacaaacaaaaacccgccatatagactcaggaaccaagagtgccaaggacacaactccaaggagcataactattttggttttttttttgagacagggtctttctctgttgcccaggctggagtacgctggtgcgatcatagctccctgcagcctcaaactcctaggctcaagtgatcctcccacctcagcctccaaagtagctgggaatataggtgtgtgccaccacatctggctaatttaaaacaatattttggctgggcgcagtggctcactcttgtaatctcacactttgggaggccaaggcaggtggatcatgaggtcaagacatcaggaccatcctggacaacatggtgaaaccccgtctctactaaaaatacaaaaattagctgggcgtcgtgggggggcctataatcccagctatttgggaggctgaggcaggagaatcacttgaacccaggaggcagaggttgcagtgagctgagatcgcaccactgtactccagcctggggacagagggagactccatctcaaaaaaaaaggccaggtgaggtggctcacgcctgtaatcccagcattttgggaggccaaggcagggggatcatgaggtcaggagttcgagaccagcctggccaacatggtgaaacccggtctctactaaaaatacaaaaattagctgggcgtggtggctcacacctgtaatcccagctactcaggagactgaggcaggagaattgcttaaacccgggaggcagaggttgcagtgagccgagatcatgccactgcactccagcctgggcaagcaagactccatctcaggaaaaaaaaaaatatgtatatattgtagagatagggtcttgctatgttgtccaggctggtcttcaactcctgggctcaagcaatcctcccatttcagcctcctgagtaggtgggactacaggtacatgccaccatgcccagctaatattctttctctgcctttctttctttctttctttctttctttctttcttttcttccttccttccttccttccttccttccttccttccttccttccttccttccttcctctctcactctctttctccttttggggtctcatgttgtcacccaggctggagtacaatggcatgattatagctcactgtagcctcaaactcctgggctgaagggatcctcctagttcagcctcctgagtagctgggaccataggtgcacaccaccacactcaggtaatttaaaaaaaaaatttttttttttaaagatggggtctcactatgttgcccaggctggtctcaaactcctggcctcaagtgatcctcccaccacagccgcccaaagtgctgggattacaggcgtgagccactgtgcctggcattgttgttgatctttgttcctttacctccctgaatacacacattgtttgctatagcatatgtattcccattgcactattcccaaataaacatcattttcttttaaagaccctctgttattaggtagatatacatggtatatctatatatagaaatggtacctgaaaaaatcactattagaaggaattgatgatttttttttttttttttgagatggagtctcgctctgtcacccaggctggagtgcagtggtacgatctcagctctctgccacctccgtctcccaggatcaagcaattctcctacctcagcctcctgagtagctggcattacaggcgcccgccaccatgtccagctaatttttgcgtttttagtagagacagggtttcaccacattggccaggctggtctcaaactcct

SEQ ID NO: 15739 - DNA, 2300 bp, Homo sapien
gggcatacagagaaaaaaaaaactatgacatcacccctgggggtgttacagacctaagaaagaagcaatggccctgggcggcctacagccccaggaagattcagccatggtacccaggagacttgagggcccaaagcccagaattacccccagaggaacacctgtagaccttcggatccttagctttgcacttcccattggactgactctgtttcctgtggggcaataggcacgtgttcactgtgcacctgcagccccagtcatccttctcagagagaaatggtttgggaagtgtttggcatattggggataaatagatgagtggatagaaaaaaaaatgcaggccaggcacagtggctcacgcctgtaatcccagcactttgggaggccgaggtgggcggatcacgaggtcaagagatcgagaccatcctggcaaacatggcgaaaccctgtctctactaaaattacaaaaattagctgggcgtggtggcgcatgcctgtaatcccagctactcgggaggctgaggcaggagaatcgcttgaacctgggaagcagagattatagtgagccgagatcgcgccactgccctccagcctgagggatagagcaagactgtgtctccaaaaagaagaaagaaaaaaaagcaattacagcaaaatattaaccatagtagaatctatacagtggttatataagtgtccactatacaattctttttttttttttcctttttttgagacttgatgtttcgatcatggctcactgcaactttgacctcctcagctcaagtgatcctcttgcctcagcctcctgactagctgggatcacaggtgtgcaccaccatgcctggctaattgttttattttttgtagagacgagatctccctatgttgcccatgttggtcctgaactcctgagcttaagcagtcctcctgctttgacctctcaaagtgccgggattacaggcatgagccactgcacccagtcttgctatacgattcttttgttttttttttttttttttttgagatggagtctcactctgtcgcccaggctagagtgcagtggagtgatctcagctcactgcaacctctgcccctcaggttcaagtgattctcctgcctcagtctcctgactagctgggatcacaggcacctgccatcacacccagctactttttgtatttttagtacagatggggtttcgccatgttggccaagctggtctcaaactcctgacctcaggtgatccagctgcctcagcttcccaaagtgttggattatgggtgtgagccactgggcccagccactgtacaattctttaaacttttatatgtgtttggatttttcataatattagaaaagggaaagaaaaaaatgtctggcaaatagtcagcactcgtaagtataagattttgggaatatattcccttctgggagaatccacatttcgaatgcctgggaagggctctgtttgtcctgacagatggcagatttcaggtgagagcacctactaagcctagaggtgataagctactttgcccacctagagctgctggtggtgaccttaagtttactatgtttctcctggtatacggcacttggcccagagtggactccagcttgccacctgtcacccaggctggagtgcagtggcgtgatcttgtctcactgcagcctcaacgtcctgggctcaggcgatcttccctacctccctcctgattagttgaggctacaggtgctcgtcaccatgcccggctaatttttgtttttgttttttgttttggtagagatggggtctcacactcttgcccaggctgagctagaactcctggcctcaagcgatctgcctctgcctcccaaagcattgtaatgacaggtgtgagtcaccatgcccagccaggaactcagagaatcttaccctatgctgtagtatctgttgactatggggtagaggcaggataaggtgttccagaccctgcctgacacctgatccgaagaggttgctcatgtttgctcaggaggtgaggttcacacaataaagggcaggaggagggcttggacctggtataaaacatctggaagtttccagggggctgctttgcatctgaaactgtcaggtgaggggtgacagagatgcctgaatctgagttgggggggaattcaaatctgagctggcgaagaggatgcctggaaggaatggcaggaaagacttgagttaattggcgcttctgggtctgcagtaatcttaggtgcaaagctgtctaggtctctgctgaaggactggggacacctgggat

SEQ ID NO: 15740 - DNA, 2300 bp, Homo sapien
cactgcacccagtcttgctatacgattcttttgttttttttttttttttttttgagatggagtctcactctgtcgcccaggctagagtgcagtggagtgatctcagctcactgcaacctctgcccctcaggttcaagtgattctcctgcctcagtctcctgactagctgggatcacaggcacctgccatcacacccagctactttttgtatttttagtacagatggggtttcgccatgttggccaagctggtctcaaactcctgacctcaggtgatccagctgcctcagcttcccaaagtgttggattatgggtgtgagccactgggcccagccactgtacaattctttaaacttttatatgtgtttggatttttcataatattagaaaagggaaagaaaaaaatgtctggcaaatagtcagcactcgtaagtataagattttgggaatatattcccttctgggagaatccacatttcgaatgcctgggaagggctctgtttgtcctgacagatggcagatttcaggtgagagcacctactaagcctagaggtgataagctactttgcccacctagagctgctggtggtgaccttaagtttactatgtttctcctggtatacggcacttggcccagagtggactccagcttgccacctgtcacccaggctggagtgcagtggcgtgatcttgtctcactgcagcctcaacgtcctgggctcaggcgatcttccctacctccctcctgattagttgaggctacaggtgctcgtcaccatgcccggctaatttttgtttttgttttttgttttggtagagatggggtctcacactcttgcccaggctgagctagaactcctggcctcaagcgatctgcctctgcctcccaaagcattgtaatgacaggtgtgagtcaccatgcccagccaggaactcagagaatcttaccctatgctgtagtatctgttgactatggggtagaggcaggataaggtgttccagaccctgcctgacacctgatccgaagaggttgctcatgtttgctcaggaggtgaggttcacacaataaagggcaggaggagggcttggacctggtataaaacatctggaagtttccagggggctgctttgcatctgaaactgtcaggtgaggggtgacagagatgcctgaatctgagttgggggggaattcaaatctgagctggcgaagaggatgcctggaaggaatggcaggaaagacttgagttaattggcgcttctgggtctgcagtaatcttaggtgcaaagctgtctaggtctctgctgaaggactggggacacctgggatgttcaggagaatagaaatggccagatgtgtgttagtggagaaaagaatagtgacacatagaccaggcacctggggtctaatatcttgagctggtcccgactccttctgcaacttctctgtctgtcctagttccaccagcactgcttggatactggtgctggcacagttccttctgtcaccaactttgctccccaggtaacatagaggcaactctaaaatgcttctttccttgagaccaggtggatgccagggatttaaaccatgctccaggtgccccataatccaggccaattcaccacagatgatgaggctttctttgctcagcctctgggctcagtaaactcagccatctctttgcttgggagaggtcctctactccctccttagaaaactcgtttcctggctatggccataccaacccaaatgtacctgggcttggctgacttcagaaaacttttctgctttgtgccaggatggaataaggcttaatccagatagttagagttcatcttcaggcctgagagaaaaagaggagggcttggctacagccagaccagggagagctggaggggtcagggacattgaaggtagcatcagagaggaacaggactacaggctatggacagtcctttctaagctcaagactgggtctgctaggtctaagttgaaggacgaagaaggcttggtctgagctgcaggtcaggagtgcctgggtcaatcaagtcaacaaggaagaaggtgaatcttcatttgctcttttcttcccactccagccccagaatgttgacagtcgctctcctagcccttctctgtgcctcagcctctggcaatgccagtaagtgagataccaggagcctggtattggggacttgggaaggcagccttgggcactgctgttggccaaggcttttggaggttggcttggggtggggagctgagttgtcggaggaacaggggtgatgcagagaaactga

SEQ ID NO: 15741 - DNA, 2300 bp, Homo sapien
aggtggagcttgcagtgagccgagatggcgccactgcactccggcctgggccacagagcgagactccgtctcaaaaaaaaaaagagatggaggtctaggcagggcttggtagctcacgtctgtaatcccagcactttgggaggccgaggcggatggatcacctgaggtcatgagttcaagaccagcctgaccaacatggagaaaccccgtctctactaaaaacacaaaatcagccatgcacggtggtgcatgcctgtaatcccagctactcgggaggctgaggcaggagaattgcttgaacccaggaggcggaggttacggtgagctgagattgcgccactgcactccagcctgagcaacagagagagactatgtctcaaaaaaaaaaagtgcacacctctctggtttttagtatgtttattacgttacgcagccatcatcactacttcattccaaaatatttaatatttccatcacccccaaaagaaactcgttatatctattgctgtagtgccagctcctcagcccctcaccatcccctggcaaccactacttagatgtcctttttatgtctatgggttttttactgtaatttttaaattcattaatgtcaactttaatttagtttcacttcacacacagtatatacggccaggcctggtggttcacacctgtaatcccagcactttgggaggccaaggcgggtggatcacttgaggtcaggagtttgagaccagcctggccaacatggtgaaaccctgtctccataaaaatacaaaaattagctgagcgtggtggtgcacacctgtaatcccagctactcgggaggctgaggcaggagaatcacttgaacccaagaggcagaggttggagtgaaccgagattgagccactgcactctagcctgggagatggaagtgaaaccccgtctcaaaaacaaaaaaacaaaaaccctcatatacacaaaacatctttggaggcctcatttttaaaaactgtagtgggatcccaaggcaaaacgtttcagaaacactgatctaagatttgtgttttttgttttgagacggagtctcactctggcgccgtggctggagtgcggtggcaccatctcggctcattgcaacctacacctcccgggttcaagcgattctcctgcctcagcctcccgagtagctaggactacaggcgtgccaccatccccggctaatttttgtgtttttagtagagacggggtttcgccatgttggccaggctggtctcgagctcctcacctcaggtgagcctcccgcctcagcctcccaaagtgctgggattacaggactgagccaccgcgcccggcccgtgttttgttttgttgttcaacagggtggaacataatgtctaaacctgggccctacctacctggtgctcaaaagtggaatgaccgtccctagccaacccttcagaaaggacagagagctactcaacggactgctgtactcttaaggactgggaaccggaaccgtgggtgagtgggactgaatcacagactaagcgttttccacgcttcgccgacgtgctgagtgccaagttataaagacaggaacatccaagctgctctcctgggctgacacggacgcgaggggacctacagtggccttgggcccagcaggcagcgactgcaacgtgactgcccagagtccagcccctggggcccagatctacagaaccgaccagacgtgatagccctttggctggggctgcagtcccacgatccacacaacgaccctggctccgcagacgcgccaaccacccacggaggcaagaaactgcagaaagtaaagggaaagggagcccagtgccgggcggcgctgagcagctcccccagcggccaccgtcgccaacatccctgcgtaggggtttgtatcgcagcgcgcttccagacatcaacggctgcgcggcccacgcgcgcgcatgcgtcctgaccaggggaaccttttcttggggacccggaggcgagcgctggaaggcgggatagtggcgacccacacgcagcagcttccggcggcgcgtagtcttgattggtggaacctgggagagggggcggggcaccggggaattcgaatgggagaggcgggcccaaggagggagtggaatggccgcgggcggctcgacgcagcagaggcgacgcgagatggcggcagcttcagcggcggcgatctcaggtacttgagcccggcctgggcaaggcgggtaccgacgtctggagtttagtgggagttatgtgtcggagtgtggtccaggctctgcgggttgtcgcgg

SEQ ID NO: 15742 - DNA, 2300 bp, Homo sapien
gcaggcagcatccccaaatgccgagatccacatcctgaagaataaaggccggaagagaaaggtgaaagtagctgggggcttaggctacacctggagcccagaagtaagggggagtaggctctagggggaggagcgttggccttggggttaaacgaactggatgatggccgccagctactaacagacctcaacttgcttacccctggaatgtggtgatggatggttccttgcagggcatttagggtggaaggcagtgatgtggatgtacctcgcagagcggatgttccactgtgtagcctggcttctaccctctacaagcttaagagggaaaacttagggaactatgacctaagcagtcaagcaagaaaccacacatatgcacatacccagaatcgaacaccactagaactacccaaaaactgagatggttgggggaggtatcatttattcatattactttctcccatgtactttttgaaagacagcttattctttcccttttagagatgagggaccagatttaagagcttattttgtgctttacattcattaactcacttgatctccacagcaactccatgagaagggtgctaatattaccactgggtactgagtagtacctctctttcactagttgcataataagaattaacccagagagtgacctgagggcgggattttggacacacttgacaagagaggaagaggctggagcgcaggaggtagctggtgctgggctcctagtcttggcagaggagcccaaagcacttggctgccctgcgtgtcactcatctccctttgcctcccagctggagtccctggatgccctagagcctgaggagaaggctgaggactgctgggagctacagatcagcccggagctactggctcatgggcgccaaaaaatactggatctgctgaacgaaggctcagcccgagatctccgcagtcttcagcgcattggcccgaagaaggcccagctaatcgtgggctggcgggagctccacggccccttcagccaggtagcagcccactggactgggggagggcgggggcgggggagaccgggtacccccgagaccctgtcccctatcgatcctgtcccgccaggtggaggacctggaacgcgtggagggcataacggggaaacagatggagtccttcctgaaggtgaagtcacggccctgcccctcctctgcctgtcctgcgccccgcgcccctctctaacgtcgctgtctccctccctcctgtgttgcaggcaaacatcctgggtctcgccgccggccagcgctgtggcgcctcctgaccgtcgtctcctcactccgccttttcaaatttttgtataaccccgtgttgtgtaaatacagtttttgctccggtgcttccgcctgatttttggggctgcgggggcgggaccggggtgtgaccgcctcggggtgggccgcgagcaaggcaggcgactccactgggcgccatcttcggggaacgactcagcgcaggattgtaaatacaccgctggggtggggcggggaggacggtggcctgcaggacgcaaaaagcggaagccgaagcatgaggcctgcgaccgttaggcgggcgcgcgctcagggattagccccgccccgtccgtgcccccggcgcgcgcgctcccccattctcccgctcggcaacgacggcggccttgtgcgcgtgcgcgcgaaataacggccgctggcggagggagggggagtggaatcgttggcggggggaagaggagagaagccgccctgtctcccgcgcgcccaccacctgcgccatcgtcagccaatcagcagccgtctcaggggtctcgcgctcggggcgactcgggctgctgggtggctcccccgtccctcctcccgccagagtccctctcgcgcctgcccctcccgctggccacgcgcgcgctcgcgctagcgctcgcgcccgctccagcctcttgtgtgtcctcgcgccccccgcccgccctccccgcgcgtagtgtgctccgcttcccccaccctccacctcccccctcctgcccgccccgcgcgcctcctcccgggttccccctcccccaccgccgccgcctcctcctcccgccccagggtgagcgcgagccacctccctccctccctccgccatggatcccagcaactggagcagcttcatcttccaggtaacaactccctccccccgcccccacccccctgcccacaccccctcctgcccgccctccctcccgtcccaccccccctccgcgcgcccggtgcgcgcgcagctgtccccctccctccctcgcg

SEQ ID NO: 15743 - DNA, 2300 bp, Homo sapien
accactagaactacccaaaaactgagatggttgggggaggtatcatttattcatattactttctcccatgtactttttgaaagacagcttattctttcccttttagagatgagggaccagatttaagagcttattttgtgctttacattcattaactcacttgatctccacagcaactccatgagaagggtgctaatattaccactgggtactgagtagtacctctctttcactagttgcataataagaattaacccagagagtgacctgagggcgggattttggacacacttgacaagagaggaagaggctggagcgcaggaggtagctggtgctgggctcctagtcttggcagaggagcccaaagcacttggctgccctgcgtgtcactcatctccctttgcctcccagctggagtccctggatgccctagagcctgaggagaaggctgaggactgctgggagctacagatcagcccggagctactggctcatgggcgccaaaaaatactggatctgctgaacgaaggctcagcccgagatctccgcagtcttcagcgcattggcccgaagaaggcccagctaatcgtgggctggcgggagctccacggccccttcagccaggtagcagcccactggactgggggagggcgggggcgggggagaccgggtacccccgagaccctgtcccctatcgatcctgtcccgccaggtggaggacctggaacgcgtggagggcataacggggaaacagatggagtccttcctgaaggtgaagtcacggccctgcccctcctctgcctgtcctgcgccccgcgcccctctctaacgtcgctgtctccctccctcctgtgttgcaggcaaacatcctgggtctcgccgccggccagcgctgtggcgcctcctgaccgtcgtctcctcactccgccttttcaaatttttgtataaccccgtgttgtgtaaatacagtttttgctccggtgcttccgcctgatttttggggctgcgggggcgggaccggggtgtgaccgcctcggggtgggccgcgagcaaggcaggcgactccactgggcgccatcttcggggaacgactcagcgcaggattgtaaatacaccgctggggtggggcggggaggacggtggcctgcaggacgcaaaaagcggaagccgaagcatgaggcctgcgaccgttaggcgggcgcgcgctcagggattagccccgccccgtccgtgcccccggcgcgcgcgctcccccattctcccgctcggcaacgacggcggccttgtgcgcgtgcgcgcgaaataacggccgctggcggagggagggggagtggaatcgttggcggggggaagaggagagaagccgccctgtctcccgcgcgcccaccacctgcgccatcgtcagccaatcagcagccgtctcaggggtctcgcgctcggggcgactcgggctgctgggtggctcccccgtccctcctcccgccagagtccctctcgcgcctgcccctcccgctggccacgcgcgcgctcgcgctagcgctcgcgcccgctccagcctcttgtgtgtcctcgcgccccccgcccgccctccccgcgcgtagtgtgctccgcttcccccaccctccacctcccccctcctgcccgccccgcgcgcctcctcccgggttccccctcccccaccgccgccgcctcctcctcccgccccagggtgagcgcgagccacctccctccctccctccgccatggatcccagcaactggagcagcttcatcttccaggtaacaactccctccccccgcccccacccccctgcccacaccccctcctgcccgccctccctcccgtcccaccccccctccgcgcgcccggtgcgcgcgcagctgtccccctccctccctcgcgccctcccccgccctccccgaggcgccggctgggcgcgcgcgcggcgggggccgaggctgctccctcgctccccccaccccgccccgccaggctccaaccgccgccgccgccgccgccgccgcccgggcccccgcccccggccccggccccgcggggcctcccgcccccacccagggggcgtcgccgccgccgtcgccgcggcgctccgcggcccgcaaggcgccctcttttcctccctcccgccggccggggtgcgcgggcggcggggcggcccgcgggccatgcgttcggcgcggcccagcccggccggccgggggcggcgccccgagcccgggccccgcgcggcccgcgcccccggcccccgctgagccccgggggccccgctgcggccgaggcca

SEQ ID NO: 15744 - DNA, 2300 bp, Homo sapien
gtttttgctccggtgcttccgcctgatttttggggctgcgggggcgggaccggggtgtgaccgcctcggggtgggccgcgagcaaggcaggcgactccactgggcgccatcttcggggaacgactcagcgcaggattgtaaatacaccgctggggtggggcggggaggacggtggcctgcaggacgcaaaaagcggaagccgaagcatgaggcctgcgaccgttaggcgggcgcgcgctcagggattagccccgccccgtccgtgcccccggcgcgcgcgctcccccattctcccgctcggcaacgacggcggccttgtgcgcgtgcgcgcgaaataacggccgctggcggagggagggggagtggaatcgttggcggggggaagaggagagaagccgccctgtctcccgcgcgcccaccacctgcgccatcgtcagccaatcagcagccgtctcaggggtctcgcgctcggggcgactcgggctgctgggtggctcccccgtccctcctcccgccagagtccctctcgcgcctgcccctcccgctggccacgcgcgcgctcgcgctagcgctcgcgcccgctccagcctcttgtgtgtcctcgcgccccccgcccgccctccccgcgcgtagtgtgctccgcttcccccaccctccacctcccccctcctgcccgccccgcgcgcctcctcccgggttccccctcccccaccgccgccgcctcctcctcccgccccagggtgagcgcgagccacctccctccctccctccgccatggatcccagcaactggagcagcttcatcttccaggtaacaactccctccccccgcccccacccccctgcccacaccccctcctgcccgccctccctcccgtcccaccccccctccgcgcgcccggtgcgcgcgcagctgtccccctccctccctcgcgccctcccccgccctccccgaggcgccggctgggcgcgcgcgcggcgggggccgaggctgctccctcgctccccccaccccgccccgccaggctccaaccgccgccgccgccgccgccgccgcccgggcccccgcccccggccccggccccgcggggcctcccgcccccacccagggggcgtcgccgccgccgtcgccgcggcgctccgcggcccgcaaggcgccctcttttcctccctcccgccggccggggtgcgcgggcggcggggcggcccgcgggccatgcgttcggcgcggcccagcccggccggccgggggcggcgccccgagcccgggccccgcgcggcccgcgcccccggcccccgctgagccccgggggccccgctgcggccgaggccatgttcccggtgtttccttgcacgctgctggccccccccttccccgtgctgggcctggactcccggggggtgggcggcctcatgaactccttcccgccacctcagggtcacgcccagaaccccctgcaggtcggggctgagctccagtcccgcttctttgcctcccagggctgcgcccagagtccattccaggtgagtagggccggccgcggcggcccgggctggggggggacgcccgcccgcacccgcggcccactcggcgccttgtctccgcaggccgcgccggcgcccccgcccacgccccaggccccggcggccgagcccctccaggtggacttgctcccggtgctcgccgccgcccaggagtccgccgcggctgctgcggccgctgccgccgctgctgccgccgtcgctgccgcgcccccggcccctgccgccgcctctacggtggacacagcggccctgaagcagcctccggcgccccctccgccacccccgccagtgtcggcgcccgcggccgaggccgcgccccccgcctccgccgccactatcgccgcggcggcggccaccgccgtcgtagccccaacctcgacggtcgccgtggccccggtcgcgtctgccttggagaagaagacaaagagcaaggggccctacatctgcgctctgtgcgccaaggagttcaagaacggctacaatctccggaggcacgaagccatccacacgggagccaaggccggccgggtcccctcgggtgctatgaagatgccgaccatggtgcccctgagcctcctgagcgtgccccagctgagcggagccggcgggggagggggagaggcgggtgccggcggcggcgctgccgcagtggccgccggtggcgtggtgaccacgaccgcctcggggaagcgcatccggaagaaccatgcctgcgagatgtgtggcaaggccttccgcgacgtctaccacctgaac

SEQ ID NO: 15745 - DNA, 2300 bp, Homo sapien
gcggcccgcgggccatgcgttcggcgcggcccagcccggccggccgggggcggcgccccgagcccgggccccgcgcggcccgcgcccccggcccccgctgagccccgggggccccgctgcggccgaggccatgttcccggtgtttccttgcacgctgctggccccccccttccccgtgctgggcctggactcccggggggtgggcggcctcatgaactccttcccgccacctcagggtcacgcccagaaccccctgcaggtcggggctgagctccagtcccgcttctttgcctcccagggctgcgcccagagtccattccaggtgagtagggccggccgcggcggcccgggctggggggggacgcccgcccgcacccgcggcccactcggcgccttgtctccgcaggccgcgccggcgcccccgcccacgccccaggccccggcggccgagcccctccaggtggacttgctcccggtgctcgccgccgcccaggagtccgccgcggctgctgcggccgctgccgccgctgctgccgccgtcgctgccgcgcccccggcccctgccgccgcctctacggtggacacagcggccctgaagcagcctccggcgccccctccgccacccccgccagtgtcggcgcccgcggccgaggccgcgccccccgcctccgccgccactatcgccgcggcggcggccaccgccgtcgtagccccaacctcgacggtcgccgtggccccggtcgcgtctgccttggagaagaagacaaagagcaaggggccctacatctgcgctctgtgcgccaaggagttcaagaacggctacaatctccggaggcacgaagccatccacacgggagccaaggccggccgggtcccctcgggtgctatgaagatgccgaccatggtgcccctgagcctcctgagcgtgccccagctgagcggagccggcgggggagggggagaggcgggtgccggcggcggcgctgccgcagtggccgccggtggcgtggtgaccacgaccgcctcggggaagcgcatccggaagaaccatgcctgcgagatgtgtggcaaggccttccgcgacgtctaccacctgaaccgacacaagctgtcgcactcggacgagaagccctaccagtgcccggtgtgccagcagcgcttcaagcgcaaggaccgcatgagctaccacgtgcgctcacatgacggcgctgtgcacaagccctacaactgctcccactgtggcaagagcttctcccggtgtgcacggggcctcggccgcccgctaggccgtggggagggagggacgcgacggaggtggcctggccgtggctggcggggagggaggcggctgctgaggctggggaaggggagccactcccagggcggagggaggaagcctctcccggttaccagggagcaaggggtggtcctttgtcgaggaggtgggccttggggttgacggaagcttcgcgtgggaggaggcggcggcggcggcagcggctgctgggctccaggggagggatttcctgcttaagtgtcgctgtgacggcctgggctccgggaggaggcgcagggatcctcggaaaggcctgtggtgcggtttggtggatttggggcgcaccacctccgccctaaccccaaccccaacgtgtccccaggccggatcacctcaacagtcacgtcagacaagtgcactcaacagaacggcccttcaaatgtgaggtaggaagcccgcctcctcctgtcttggttttcatgattttgatcctcatggtagctgtctgagtcagtctctcagaccccctttttctctctcttctttttgcctttttgctccattttctcatcccttcttcaaggcctcatcatgtcactcccatttcctacagatcaaagatccccaaggctctgattcctttaatctcttgctcccccctccccagcccaccaagctttaactctcctgtgacaccccccacgcccctcccccctcctcagaaatgtgaggcagctttcgccacgaaggatcggctgcgggcgcacacagtacgacacgaggagaaagtgccatgtcacgtgtgtggcaagatgctgagctcggcttatatttcggaccacatgaaggtgcacagccagggtcctcaccatgtctgtgagctctgcaacaaaggtacatgccgagggctgccgggagggccaggggcagagggtgggcgcctggccagacgccttgccacggatacgggttaagggtgctgtagccaagagctcgtggcgtctagattcctacaagaggtcaa

SEQ ID NO: 15746 - DNA, 2300 bp, Homo sapien
ccaatggcggcggcagcggcagcggcggcagcggcagcagcggcagcagtagcagcccctcccacagctgtgggctccctctcgggggcggagggggtgcctgtgagctctcagccacttccctcccaaccctggtgagctccaagttggttgcgggggagaggggagaatggagtagagtcccttggtacaagctcctctcccccctcttttcccaccaactcctatttccctaccaaccaaggagcctccagaaggaaaggaggaagaaatgttttcttaggggaattcgctaggttttaacgatttgtttctcctgctcctcttctgtcagacctgaccccacacaaacctgtcccctcggttgtgttgaagtcccctggacagtgggcaggggtggcagaggacacgagcagccactgcccgtaccccctctcctctctgtaagcccatgccctgtcttcccagggacttgtgagcctcttccctcgacggtcctcttctctccttccagtcctctccccctgctgtctgcagcccctccccggggagttggtgctttcttttccttttttttttttttccagggggagggaggagaggaaggagggggatcagagctgtcccaaagagggaaagcggtgaggtttgaggaggggcagaagcagggccggcaaaggttgtaccttcataaggtggtatggggggttggggtcaggccctgaacatcgtcctacttgagaatctgtcaggggaaaaagtcaaggggagcaggaggaagagccaggagggccagaggcagagaagagatggagtcttaggggccagggtgagcgaggggtccagggcctagaggtgcttcctgggggcgggggaatgcagccagtgtccccctcccctcttccaccccagctccagccctggtcttgtcttttcatccctcttccccacgacagaagaagttgtggccctggccatgtcatcgtgttcctgtgtcccctgcatgtaccccaccctccaccccttccttttgcgcggaccccattacaataaattttaaataaaatcctgtttctggctctggattgaatgaattgccctcactaagaactgccgccaaccccaagggtttcttctcggcctggtgtccgtcaatccagccttgctctgccctgtgaggctgtgaggttctggctccgccctccccaggggcagccttactggcggcagcacagatacagggcggggccaaggctgtggctgtggagagcaagttccaggtctctggggaattcccaactcggacaggcccagaatagcccctggaggtttgaagaggccccgtcagaaacccaaacagagctgccagacgggaatgccgccctcccccgtccacactcatggccgctgctcagcccccagccgcatccctccccacgcgcgtcacggccctgaggccatggtgggtggatgcggctgcggaaaggctggggagtccgagccctaggactgggagcagcgaggtagagaatgaaagctgcacctgtccctcatcctgggcatgggccactctgtgtttacacgggctcctctgcccagctcctcctgccccttggaattccctttcctgtccccgctccgtcctttccagggccccttttttgagccttccagcgccagtttctgccgctcctttctgcaggctccattctctccaaaccccaccctgctcctcctctgcagcctccccgcgtcttgccccatcttccttgccctcctgctcgtagagacgcctccacccggtcctgcctgtctcactggtcccgtctcctcgcagaaccctctccgtttcccccaaatccccgtctcttccaggaatcccggtgaccgttggcgggaggggccggggacttaagaaggaggcgtctctcctggaggcgcgcgtgagaaggggcagggagggggcgcgagtggtccccgggccggttgcctgggtaacgcgtggctcccttgggctggcgggaggggccggaggctcgcgaggggcgggggcggcgacggcggcggagcgtaggggaggggaccggagaggaggggatgagcacacgggagaggagaagagggagacccgccgcctccctccctccctagctgacttgctccctcccgggctgcggctgctgcaaaagccagcagcggcagcgggagctgtccggaggccggcgtcgaggtgagacccgggcagactgaggctgcgggtaggagtggaccgaccgacggctgacgccgggcggactgca

SEQ ID NO: 15747 - DNA, 2300 bp, Homo sapien
gagaggcaaacaaaggccctggaattggggaggtgggatccatgcagagaggagaggggaaggaaggcatgattactccagaggctctattgcagcgctggcgggaagctgggagccacagcaggcctgggctagggtcccatggggctcaccatgacagcataagcgaaggccacgatgttgacaggccacatggggcagaagcaggacaggatggcaaggatgatgtagtcccgaggtttctgggtgccttcacccccctccaccccaggacctgccaactgggagctggggtggcggctcaggctacctcggggagatcctggatgcccactgtgtgcccttctcattcgatcctcctcaaccagctgctgcagcactcgggggggggccccattggctgggggggatttttttgagggtggtgagtgaggctcaggggctgggccctcttccccatcaccagcctgcaggggcaccactgccccattctcttgcttttcccctacactctcagacagaatctcaggggtggggtcctcctgggtagggagctctggttgaagggctggcttgggggtaggctgggaatctggccgggggtctggttggggagcaggctctggggctggttcaggtggggctgcagactccagcctggacccctggtctgcagtggcctctttgctcacttctggtttggacactgtttcttggcatgggtcttcggggctgcagttggcctttgattcccctcctgggcttaagctgaggtctgtggcctgggctgtttctgaggccccagccggggtctctgtggtttctggagccagcccagccttgggccctgagtccacaggggccgcagtggtgtttggacctggctgcggggcctctggctggtctggtacccctgctaggacctggggagggccagtttcagcttcagaatggccaggcccttcgcctggaaccttgggactctcctcaacccccttcatctcagagatctcagagctgctggctgccatcttgagatgggagaggggagagagcccctatggggaggatggaatagcagagacagcggcaaaccctggaagaggaggagataggcttggggtgaggagggaagagggcgctcagcactgcaggcccaattgggccacattcctgtctcagggccagccttgcactgcctctagggagaggaagaaaagttggggtttcctttgccttagggtgggacatccctgcgggaggagtgctctactcaaagtcttctgcttggagagccctggggaagattaacccttttgtaaacaggaccttctccagggtctctccctgggtccatccaacaagatccagactctcagatcccagcaccccaaaatcaacgagctgtgcaaatagcactccgacaggccgactgggcagaggacccgacattcgcattccactccctctgcatcctcccctcctccctgggctcccaggcggtgcgggttttcttgctgcgcgtttagggcgaggacgctcccgcccctttctgggggacctggttatctccttcgatcccctgtcagcccctctcccggggcttccctcgccttcggtgggctggcgcctcctcccgatggttcagcccgcccagcaccaccaccagccctccagacacccgcattcccgtgcagtccgcccggcgtcagccgtcggtcggtccactcctacccgcagcctcagtctgcccgggtctcacctcgacgccggcctccggacagctcccgctgccgctgctggcttttgcagcagccgcagcccgggagggagcaagtcagctagggagggagggaggcggcgggtctccctcttctcctctcccgtgtgctcatcccctcctctccggtcccctcccctacgctccgccgccgtcgccgcccccgcccctcgcgagcctccggcccctcccgccagcccaagggagccacgcgttacccaggcaaccggcccggggaccactcgcgccccctccctgccccttctcacgcgcgcctccaggagagacgcctccttcttaagtccccggcccctcccgccaacggtcaccgggattcctggaagagacggggatttgggggaaacggagagggttctgcgaggagacgggaccagtgagacaggcaggaccgggtggaggcgtctctacgagcaggagggcaaggaagatggggcaagacgcggggaggctgcagaggaggagcagggtggggtttggagagaatggagcctgcagaaag

SEQ ID NO: 15748 - DNA, 2300 bp, Homo sapien
ccttgccatcctgtcctgcttctgccccatgtggcctgtcaacatcgtggccttcgcttatgctgtcatggtgagccccatgggaccctagcccaggcctgctgtggctcccagcttcccgccagcgctgcaatagagcctctggagtaatcatgccttccttcccctctcctctctgcatggatcccacctccccaattccagggcctttgtttgcctctccctaggacctaaccctctgagccaccactgccctgcccctttgggtgggagggatatggaaacacgtgtcacacagcctcgctgacctgtgccctcctccccctgccccttcactcctccttcctcccttacccgccatctatggggctggcctctctctcttctggatgacttttccacctgatcccttctgggctggcttctcctgaccccggctatgtgcctccacccctcgccctaaccccagtcccggaacagcctgcagcagggggacgtggacggggcccagcgtctgggccgggtagccaagctcttaagcatcgtggcgctggtggggggagtcctcatcatcatcgcctcctgcgtcatcaacttaggcggtgagtgggggcttgggacaggcaggggaggaatggaagggttggcaagggcagctttactaacccctgcccctgctctctcctgtctgtcctccttacctctcctttgtctctccttgtctccccctccccccgtctgtccttccctctcctctcccacagtgtataagtgaggggctctgccccgcatcccaagacttttcttcctgttgggagctgccttgggcccatccctcccctggggggagcccaactgatggccctggcccccacccctaaggaccaagggagcctgagcggccttgtttacagcttctgtcctgctcctgcatcttgccaggctcctctgccaactgtaggcctgcctcatccctgcactggttccaacctccctgcactaatgcctgcatcccctccggcctcttggccccctatccctgcacttctggaaacctccctgcactctggaaacctccctgaacacctccccaactctgcgctctcagcctccctgcatctctcctggcctccctgcacttcttccagccccccaaattctctggacctccaccctggccgcctcctcccaactttcattgtcttggcatctctcaaccctcagtcctctcttccttcccttctttatcatctcccctttcctctccacgtcccgcccccttcctcttcctgcctcctcatctcccttaagcatcctcttctccaacctcccgtcaccgtttactctgcaaaattgacagcacttagacgaggcttgggggcagggagcagtgttgggagagggctccccaaccccaggctcggactgttctctgctgggaccacccagggtcggacacccaagggtgcctggcaggtcgcagagttggcaagccgggcctcgtatggggactcgggtgagggtggcgagtactggttccgaacgcacgcaggggagaagggagggacgcggcgctgacccttccaggtcagctggagttgacccgcccacctgggcttttcaaccccagtccgcgagtttctttcttgaaggtgtgggggctagattcattcacgtgcttcgtaatgaaataatccaaaaaataggaccaaagcgcccactggcaggagcgagggcggggcgccgcgctctataattattttctaagatgatgggggaggtttgttgcacgcgacagcccgctgaggaggcggggaccgagctacaacgcggttcggatttggcgggggtttttttccttaaaaaaaaaaaaaaaaaaaaaaaaaaagtctgggggaagaaaaaaactaaaattcttaaaaaaaaaaaaaaaaggctattatcaaactgatttctccctttttgtatgccggatgctgcatgagtctgaaacaccaataaacggagactgcatgagactcgcctccaatctcggttggttcctgcgttcgtcccgccggcccggcggtgctgcctttctggcagaaccttactgggtggtatacgcatgcgacttcccggtggccatctttactgtgggctgaagcctgtgcgcttactcgcgcatgtgcaagccttccctcgctttcctcttccaagtagccttgcctagagcggagcctcccgcgccatttctgtgcgcctgcgtagcgtgaccctgcgcagcctgggaggcgggtcttagctccaggtgcgtacgg

SEQ ID NO: 15749 - DNA, 2300 bp, Homo sapien
gcgctggtggggggagtcctcatcatcatcgcctcctgcgtcatcaacttaggcggtgagtgggggcttgggacaggcaggggaggaatggaagggttggcaagggcagctttactaacccctgcccctgctctctcctgtctgtcctccttacctctcctttgtctctccttgtctccccctccccccgtctgtccttccctctcctctcccacagtgtataagtgaggggctctgccccgcatcccaagacttttcttcctgttgggagctgccttgggcccatccctcccctggggggagcccaactgatggccctggcccccacccctaaggaccaagggagcctgagcggccttgtttacagcttctgtcctgctcctgcatcttgccaggctcctctgccaactgtaggcctgcctcatccctgcactggttccaacctccctgcactaatgcctgcatcccctccggcctcttggccccctatccctgcacttctggaaacctccctgcactctggaaacctccctgaacacctccccaactctgcgctctcagcctccctgcatctctcctggcctccctgcacttcttccagccccccaaattctctggacctccaccctggccgcctcctcccaactttcattgtcttggcatctctcaaccctcagtcctctcttccttcccttctttatcatctcccctttcctctccacgtcccgcccccttcctcttcctgcctcctcatctcccttaagcatcctcttctccaacctcccgtcaccgtttactctgcaaaattgacagcacttagacgaggcttgggggcagggagcagtgttgggagagggctccccaaccccaggctcggactgttctctgctgggaccacccagggtcggacacccaagggtgcctggcaggtcgcagagttggcaagccgggcctcgtatggggactcgggtgagggtggcgagtactggttccgaacgcacgcaggggagaagggagggacgcggcgctgacccttccaggtcagctggagttgacccgcccacctgggcttttcaaccccagtccgcgagtttctttcttgaaggtgtgggggctagattcattcacgtgcttcgtaatgaaataatccaaaaaataggaccaaagcgcccactggcaggagcgagggcggggcgccgcgctctataattattttctaagatgatgggggaggtttgttgcacgcgacagcccgctgaggaggcggggaccgagctacaacgcggttcggatttggcgggggtttttttccttaaaaaaaaaaaaaaaaaaaaaaaaaaagtctgggggaagaaaaaaactaaaattcttaaaaaaaaaaaaaaaaggctattatcaaactgatttctccctttttgtatgccggatgctgcatgagtctgaaacaccaataaacggagactgcatgagactcgcctccaatctcggttggttcctgcgttcgtcccgccggcccggcggtgctgcctttctggcagaaccttactgggtggtatacgcatgcgacttcccggtggccatctttactgtgggctgaagcctgtgcgcttactcgcgcatgtgcaagccttccctcgctttcctcttccaagtagccttgcctagagcggagcctcccgcgccatttctgtgcgcctgcgtagcgtgaccctgcgcagcctgggaggcgggtcttagctccaggtgcgtacggcatctgacttgacgtggcccacaactgaaaggtctggggagaaggcgccgtgtccgggtgtggagaggggcgtcgtggaagcgagaagagtggcccgtccctctcctccccctttccctctttcggaaagtggtttctgcggggcccgggagcctcggagtaccgaacctcgatctccggggcggggtccttggtggggactgagcgccccctcccggggacgggcggtctggccgcggagtcccctgcgggagcgtgattggctggaaacggtcccgaacccccaggggagcccgatccctgggggaccctggcttcggactccagtatctgtcgtcgcagggtccctgccctagtggcctatgtcccttgctcggggccatggagacactgcggccagtacggcggcgcctctgtctgaagaaggggaagtgacctccggcctccaggctctggccgtggaggataccggaggcccctctgcctcggccggtaaggccgaggacgagggggaaggaggccgagaggagaccgagcgtgaggggtc

SEQ ID NO: 15750 - DNA, 2300 bp, Homo sapien
cctgtctctataaaaaccataaaaaatattagctaggtgtggtggtgcacacctgtggtccctgctactttggaggctgaggtgggaggatcgcctgtgcctgggaggtcaaggctgcagtgagccgtaaatggagcacacgagtgcgctctagcctgggcaagagtgaggccatctcaaaaaaaaaaaaaaaaaaaagaaaagaaaagaaaaggaaaaaaaaatgactgctcttcaagtcaaaggtattagagactggagggtctctggtgcacagtaggaactgggaggaggataaagatcagtttcaggccgggcgcagtggctgtaatcccagcactttgggaggccaaggcaggcggattgcctgagctcaggagttcgagaccagcctggccaacatggtgaaacttcgtctctactaaaaatacaaaaattagccgtacatggtggcaggcaactgtagtctcagctactcgggaggctgaggcaggagaattgcttgaaccagggatgcagaggttgcagtgagtcgagattgcgccattgtactctggcctgggggacagagcgagactctgtctcaaaaacaaaaacacagctccgattgcaggctgtgaagggcagggaattgcactcattctcctccagccccttcccttacccaggtccaggcagcctcctttgtccccaaccccagggctcttgctccaggcagtcctgaggttggacgtaaggtcggtgatgcggccctgcccccagaccttcccacagcttcaggttcaggaaaaggcacatgaagtttggtataaacaaggacacaacttcacagagtttctcactgatttaagttaaatattctagtctttagagaatgggtcacatgactcaggaattgccaacagcctgttttcacccagcggcttcctggtttaccccctttaggagatgattaatggaaattgagaatgtgtctcataaattactttttttttttttaaagcagcacagttttaggaacttttcgagacagaacagctcagccagcctagacttccacttgtcctccctcctcccactcctgccaattaacaccagtcaccagaggcaagaaccgcctagatcagaagcgaccccaggaaccaggcttcagcacccctgatcttcatcaatattttctcaacttgcctaatcataggactgagctataattctttaaaaaaaaaaaaaaaacaaaaccccaaccacacacacacaaacagagacagggtctcgctatgttgctcaggctggtctggaactcctggcctcaagccatcctcccattcgggcctcccaaagtactgggattacaggcctgagccaccgcatccagccctaggctggaattcttaaccccactcctgctgctttttgcaggcctcacttctgactcactgggtctaagtttccgggagagagcctctggaccctgtgttctaggcaaacgcccctaagtaacagctcccacttcagatgagcttaatctgtgccaggtagtgttaagtgccctcaattaactcatgttatcctcacaagaacctgcaagttaagaaatttgcccaagagcacacagttatcaaaggacggagccggaagtccaacctggctataactgtagagaccacaaactaggaggcagtggcttctcaggcagaaacacaaagattctaagccgagaacaagaactagaggacctgggtggggctgtgtactgcccagatggtgctaatggcagttcaaaggtgagtgtttcctgtaagttgggccagcgcccagcctctgctcccccagaacctgggagggcagcacccaagataacctgagcaccccgttaccttggagccctgaggctgtctctgggccacccactcaaggtggcccccctacctgctcaaggctacatacagagggctgtcctgcccaaacagccacacccgagggccgacccagtgctctgtgtgccaagggagtttctggcagagccacctgataccccacgtgacagctggcctctcccccatcacccaggggctacccaggcagagagctgagaacacaggggccatcagcctcgctatcacctccacccccaagtgcttggctccccaagggacagctctaaaatccccagaatctcaggctggtgggtccagctgagcatcctagttttcactttctcctcccaaaaaggaaagaaccttggtcactaaattctacgccttctggaaatcactctgctaatgacttcctgaatgatc

SEQ ID NO: 15751 - DNA, 2300 bp, Homo sapien
caggctggagtgcaatggcacgatctctgctcactgcaacctctgcctcccaggttcgagcaatcctcctgtctcagcccccctagtagctgggattataggtacccgccaccacaactggctaatttttgtatttttagtagagacggggtttcgccatgttggccaggctggtctcgaactcctgacctcaggtgatccacctgccttggcctcccaaagtgctgggattacaggcttgagccaccacgcccggccaagttaaagggtttttaaacaagagctgggcagtgcaatggcatagctgtaaggcagcagggggtggtggggactgtggtaggtgggaaagcttgtgttccatctaaatggggcagctgctgcttgactgtaggctgtattgctggtcttctaattcttcaagtgaatcaggaattgggattttgtgaagactcacaatttctaaacaaaaagttgaagttttacagatcgtggggctcaagtataactcctcttgggctgtatccagccttgattctgtaatctgtggctcctgcctgtttttcctcggccaggccactcccttcttcccctcacttatatttttcacctggggttggaggctgggtagatggtggaattgatgaggaaccacttttttttttttttttttgagatggagtctcactctgcctctcataatgctgggattacaggcatgagccactgcacctgtcctggccagacatttttgaggccaccaccagacaaaagaggctcctcatcggccaggtgtgatggctcgcctataatcccagcactttgggaggcagaggcaagaggattgcttgaggccaggaattcgagaccagcctaggcaacataatgagacctcatctctccaaaaaaaaaaattagctagacatggtggcatgtacctgtagtctcagctacccaggaggctgaggcatggcttttgtgagctatgattgcaccactgcactccagcctgggtgacagagtaagactccgtctcaaaaaaaaaaaaaaaaaaaaaaaagtctgacctgagtctcttaaggatgaggctctggagcacctagtaaacttggtcccatttgtgtgactcaaagggacatgtccaaagtccaaagtgctgggggcaggggtggggcttaggtagggcatgtgacattcctgaacaggccaagcactgggtgaaactactcaggattcagaagcaggtgggatgggtgggtggaacatgataatcatcccccttctccttcctttccaccctacccttgctcacaactgcaggagctgaggatgggagagaactggggacgagggggccagagtgatttgcagtgttagtaatgcagctggttctatggaaggctcagttccatctgggatccctttatgagcagtggactaggtcttcacattcagcccaggattactaaagcataggaaagaggcagggaacatagacacagctcatgtaaacattccttttgtttatggccgaatcctagccactggactacctgaggcatacagatattctttggctatgggctgacatttgaatacagctggggcctcaggattctctgaaataaagggctgcctccctctggaggagccaggcagctcctcagagcagctgcccattgcgtgctggacaaggccatgtcaccacctccatggctccccagtttcccagcttgctgtatctctccaccgtaagagactgggagcaccttgatctgaagctctttgcagtgccggtggcagtgtagggggaagtagttgatgggagtgagggaaaggaattggcaaggaaccctgggcctctgtggctcactgcatcaagcagttcttggcaaaggtaaggtcaggatgggctgtgtcgtcttgggtggggtgaagacagggagcagtgggcatgcagatgcggacagggaagggtgcagtggcctggctggaggaggtagggccgtatcccacccagagtctgtcaccagattcatgcctgccccaccccaggctccccaggttcatcctgtgtcgtctcccccacctaccagtcatcttcttgtgagccctgggcttaggagtcaccatggcaactgaagagttcatcatccgcatccccccataccactatatccatgtgctggaccagaacagcaacgtgtcccgtgtggaggtcgggccaaagacctacatccggcaggacaatgagaggtgggtgtgggggctgggctgtgggggatccttggggatgtgggggc

SEQ ID NO: 15752 - DNA, 2300 bp, Homo sapien
cccgtttgctcctccagcctcccctccgtacccctccaggtgcctccttgagggcagtgaccccaagcgccagacgcttgagaagcttgggaggatgacgtagggtggagcctgcgacctaatcctcccatcacaaggggcacgcgaaaagcaacccatctgcagggcgctctggagcctctctagccgcctagagcctgcgagagcaaaggcggctggagacttagggggcggggagtaaagtgaggactgcaccaaatctcctggcctcttggggacgcaaagactcaggaggaggaattttatcgccttatctttgcctccaggaagtcataccctccacaaaaggaaagcagagatttttattcggtcttctcttttaccctttccttttccgtttctaactttgcttgacgttaatggttccttcctccctctcctcctctgcgctttggtacgagccaagggagaggggcggagggaggaaaagggaaaggaagccgacaggccttaaaggggccgcaactatttttttaagccactttttcctctctccaattttgcaacgacgggcgcggaggaggaggttcccggaagccacgcgcagctggagcagcggcgaccgcagctggaggcccggagcgcctgcggggctggcagaggcgagggaggttgcgggtaggaagggcggactgcgcgcgccccctgcgtcccgcgcacctcggggccggtccatgctcccgacggctgcgggcttcagcatctggggccaggttggggcggcggggtccagggcgcaggtggtgcggccgatgcgccgggccggaggctgaggccgcgctgcggggctgggacagcactggcatctccagagcaggcccggggcagcaagggaggcgccgcgatgccagacgaaaatatcttcctgttcgtgcccaacctcatcggtgagtgctgcccacggccccgggccgaacgagagggcgaggggccttggcgggctccctgatcctgccctgtctccccgcgtcccgttccaaggttatgcccggattgtcttcgccatcatttctttctacttcatgccctgctgccccctcacggcctcctccttctacctgctcagcggcctgctggacgctttcgatggacacgctgctcgcgctcttaatcaaggtgacagacacccctctcagccagccttggggttcaacaatcccctcctcccttcccctgcctcctcgggacctcagagtcagagggctgtcattcccatctctggaaaaagcagaacaggatggcctggggctttttgttttgtgttttgtttttttgtttttgagacagggtctcgctctgtcacttaggctggagtgcagtggcgcgatcatggctcactgcagcccccatcttctgggctcaagtaatcctcccacctcagcctcctgactagctgggactacaggagcgtgccaccacacccggctaatttttaaatttttgtagagactgggtcttgcagtgtcgcccagattggtccccagctcctagcctcaagcgatcctcctgccttgctcccaaagtgccgcgcccagcaagaatggactgattttgtagcaaaaggaatttaagctagctcttgagaactcactgcttgtgagaggtgtggattagcaagacatgacatggcggtggcgctgctggaggtctctctgaatacaagtccattcaggccaggggcggtggctcacgcctgtaatcccagcactttgggaggccgaggtgggtggatcacgagttcaggagttcgagaccagcctggccaacatggtgaaaccctgtctctactaaaaatacaaaaattagcgggcttggtgacgcgtgcctgtaatcccagctactcgggaggctaaggcaggagaattgcttgaacccgggaggcggaggttgcagtgagccaagattgcgccattgcactccagcctgggcgacagagcaagactctgtctcggaaaaaaaaaaacaaaaaacaaaaaacagtgtattcaacaggtgtttactggaggcctactgtgtgccctgcataagcagttggggttccagaaggcatgcttagagggaggatggagagggaagggtgatggcttctggagggttgactaattttttaatctgttctccagacccaactgtaaggcttcccctgaggcatcaagtctctatctagccctggagtcttggttctggggttgatgagttgcagacatagctttcctctcctcctaccctgttccctccac

SEQ ID NO: 15753 - DNA, 2300 bp, Homo sapien
ttttgtttttttttttccgagacagagtcttgctctgtcgcccaggctggagtgcaatggcgcaatcttggctcactgcaacctccgcctcccgggttcaagcaattctcctgccttagcctcccgagtagctgggattacaggcacgcgtcaccaagcccgctaatttttgtatttttagtagagacagggtttcaccatgttggccaggctggtctcgaactcctgaactcgtgatccacccacctcggcctcccaaagtgctgggattacaggcgtgagccaccgcccctggcctgaatggacttgtattcagagagacctccagcagcgccaccgccatgtcatgtcttgctaatccacacctctcacaagcagtgagttctcaagagctagcttaaattccttttgctacaaaatcagtccattcttgctgggcgcggcactttgggagcaaggcaggaggatcgcttgaggctaggagctggggaccaatctgggcgacactgcaagacccagtctctacaaaaatttaaaaattagccgggtgtggtggcacgctcctgtagtcccagctagtcaggaggctgaggtgggaggattacttgagcccagaagatgggggctgcagtgagccatgatcgcgccactgcactccagcctaagtgacagagcgagaccctgtctcaaaaacaaaaaaacaaaacacaaaacaaaaagccccaggccatcctgttctgctttttccagagatgggaatgacagccctctgactctgaggtcccgaggaggcaggggaagggaggaggggattgttgaaccccaaggctggctgagaggggtgtctgtcaccttgattaagagcgcgagcagcgtgtccatcgaaagcgtccagcaggccgctgagcaggtagaaggaggaggccgtgagggggcagcagggcatgaagtagaaagaaatgatggcgaagacaatccgggcataaccttggaacgggacgcggggagacagggcaggatcagggagcccgccaaggcccctcgccctctcgttcggcccggggccgtgggcagcactcaccgatgaggttgggcacgaacaggaagatattttcgtctggcatcgcggcgcctcccttgctgccccgggcctgctctggagatgccagtgctgtcccagccccgcagcgcggcctcagcctccggcccggcgcatcggccgcaccacctgcgccctggaccccgccgccccaacctggccccagatgctgaagcccgcagccgtcgggagcatggaccggccccgaggtgcgcgggacgcagggggcgcgcgcagtccgcccttcctacccgcaacctccctcgcctctgccagccccgcaggcgctccgggcctccagctgcggtcgccgctgctccagctgcgcgtggcttccgggaacctcctcctccgcgcccgtcgttgcaaaattggagagaggaaaaagtggcttaaaaaaatagttgcggcccctttaaggcctgtcggcttcctttcccttttcctccctccgcccctctcccttggctcgtaccaaagcgcagaggaggagagggaggaaggaaccattaacgtcaagcaaagttagaaacggaaaaggaaagggtaaaagagaagaccgaataaaaatctctgctttccttttgtggagggtatgacttcctggaggcaaagataaggcgataaaattcctcctcctgagtctttgcgtccccaagaggccaggagatttggtgcagtcctcactttactccccgccccctaagtctccagccgcctttgctctcgcaggctctaggcggctagagaggctccagagcgccctgcagatgggttgcttttcgcgtgccccttgtgatgggaggattaggtcgcaggctccaccctacgtcatcctcccaagcttctcaagcgtctggcgcttggggtcactgccctcaaggaggcacctggaggggtacggaggggaggctggaggagcaaacggggcgcgctaggaaattcctctgtctttagttctagaacccctgatctcctagcaacgaggctgcggaacctctgcagactccaagggttttatagcgtccggtagcgacacggagccggctcccccttttccagccttcctccccatctcccattctccatcccccacgacctataccagaggtccttaggcctccacgtctctccttttgccgagtagcccaaggtttccacccatctgccaggtctggggcgtcaagtcggctgcctcggc

SEQ ID NO: 15754 - DNA, 2300 bp, Homo sapien
gttcaaaaattcccccaccctgctgggatattgtgaaaccctcactctctcccctccaggttcctcacctctctcccaggacaaagagcatctcccttgaagcctcactcaccaggtgtctgtgcctcaggtcttggtgaagaatgctggaagtagaggacctagtcagagaaaggactatccccgtggccagaagagatgcggccagggcagacggggctaaggggattctcggccagcagtgaggagtgggtactgggttagcgggtgagaggggcatttcacaggtcctagggctggctgtgagatggatgagatgggcacagactcctggagagttcagctaggggtgggaggggtcagggactgtaaccaggcatagtgggggcagcggttctctagacacggtggtcctgaggcagggggttaccgcgtttggatatctgagtcgcttggtcttgtgactgcttttttttgatgggcacagggttcaagtggcagcaagcagtgcacaaagcctcctccatgagttctgcactgatctgggacaggtattcctcagaacgagataacgaagcctgggaaaggaaaagccggaggggttcagcctgggagctcccacatgggagtgctggctgtgggagttcccaggctggggcctgtgggtccaaggagcttgctcctgaaggactgggccttgagatttagctagaaagctctggacctgggggaggggggtttggtgggggtttagagtcagggcctagtgctgagagctatgagtcggggcttcaggactcagggttgaggctagagtctcagggcccgtggctcagacctggcacggggtgcctctgcctgggaggctttcacttcattacattcccacctctagggttccctgcagtgctcaccggacctcctctcaaggagggtgcagcttgagatggccagctgctcttcttctccccctcattccccatcggagtggacgccatccccctgggaacagtcgaagcctgagttgacctgagaaaccagcccgctttcccccagaacccagtccaccaccattccccgggcccaggtttaaacaaggcctttagaggaaacatcccgctgcctcattccctctcacaagaaaaaataataataataataaaggttgctttatatcttcgggagtgagagggaactcccgcaaccccctacccctcaccccttcgcctggtgggcctctccttccttcttccctcccaagcaccttcccaagccgaggcagccgacttgacgccccagacctggcagatgggtggaaaccttgggctactcggcaaaaggagagacgtggaggcctaaggacctctggtataggtcgtgggggatggagaatgggagatggggaggaaggctggaaaagggggagccggctccgtgtcgctaccggacgctataaaacccttggagtctgcagaggttccgcagcctcgttgctaggagatcaggggttctagaactaaagacagaggaatttcctagcgcgccccgtttgctcctccagcctcccctccgtacccctccaggtgcctccttgagggcagtgaccccaagcgccagacgcttgagaagcttgggaggatgacgtagggtggagcctgcgacctaatcctcccatcacaaggggcacgcgaaaagcaacccatctgcagggcgctctggagcctctctagccgcctagagcctgcgagagcaaaggcggctggagacttagggggcggggagtaaagtgaggactgcaccaaatctcctggcctcttggggacgcaaagactcaggaggaggaattttatcgccttatctttgcctccaggaagtcataccctccacaaaaggaaagcagagatttttattcggtcttctcttttaccctttccttttccgtttctaactttgcttgacgttaatggttccttcctccctctcctcctctgcgctttggtacgagccaagggagaggggcggagggaggaaaagggaaaggaagccgacaggccttaaaggggccgcaactatttttttaagccactttttcctctctccaattttgcaacgacgggcgcggaggaggaggttcccggaagccacgcgcagctggagcagcggcgaccgcagctggaggcccggagcgcctgcggggctggcagaggcgagggaggttgcgggtaggaagggcggactgcgcgcgccccctgcgtcccgcgcacctcggggccggtccatgctcccgacggctgcgggct

SEQ ID NO: 15755 - DNA, 2300 bp, Homo sapien
gctgaggcaggagaatggcgtgaacccaggaggtggagcttgcagtgagctgagatcacaccactgcactccagcctgggcaacagagcaagactccgtctcaaaaaaaaaaagaagaagctccatggctcctgtccttcctgtccaattgaagctgggataagagtactatcccactgtgtccatttctattatggaaacttatccagactgtattataattggccatttccttgtctgtccccacactgaactgtgaactcttcaagggctgagactgtaccattcatttcagtgtcccaagctcctaagacagggaccaacatatagtgcaaactcaaaaggtttggttaatatcgaatagccttggcagccatggaccctgcatgtaccttttcaccaggagttggcaggaggtatgccttgctgcaggtacggtttctgtccgagcaggagatggtggaagagaggggagagggctgagaattcagaatttgaggatcagggcagaatagaatggaagtgcacggttcaaaaattcccccaccctgctgggatattgtgaaaccctcactctctcccctccaggttcctcacctctctcccaggacaaagagcatctcccttgaagcctcactcaccaggtgtctgtgcctcaggtcttggtgaagaatgctggaagtagaggacctagtcagagaaaggactatccccgtggccagaagagatgcggccagggcagacggggctaaggggattctcggccagcagtgaggagtgggtactgggttagcgggtgagaggggcatttcacaggtcctagggctggctgtgagatggatgagatgggcacagactcctggagagttcagctaggggtgggaggggtcagggactgtaaccaggcatagtgggggcagcggttctctagacacggtggtcctgaggcagggggttaccgcgtttggatatctgagtcgcttggtcttgtgactgcttttttttgatgggcacagggttcaagtggcagcaagcagtgcacaaagcctcctccatgagttctgcactgatctgggacaggtattcctcagaacgagataacgaagcctgggaaaggaaaagccggaggggttcagcctgggagctcccacatgggagtgctggctgtgggagttcccaggctggggcctgtgggtccaaggagcttgctcctgaaggactgggccttgagatttagctagaaagctctggacctgggggaggggggtttggtgggggtttagagtcagggcctagtgctgagagctatgagtcggggcttcaggactcagggttgaggctagagtctcagggcccgtggctcagacctggcacggggtgcctctgcctgggaggctttcacttcattacattcccacctctagggttccctgcagtgctcaccggacctcctctcaaggagggtgcagcttgagatggccagctgctcttcttctccccctcattccccatcggagtggacgccatccccctgggaacagtcgaagcctgagttgacctgagaaaccagcccgctttcccccagaacccagtccaccaccattccccgggcccaggtttaaacaaggcctttagaggaaacatcccgctgcctcattccctctcacaagaaaaaataataataataataaaggttgctttatatcttcgggagtgagagggaactcccgcaaccccctacccctcaccccttcgcctggtgggcctctccttccttcttccctcccaagcaccttcccaagccgaggcagccgacttgacgccccagacctggcagatgggtggaaaccttgggctactcggcaaaaggagagacgtggaggcctaaggacctctggtataggtcgtgggggatggagaatgggagatggggaggaaggctggaaaagggggagccggctccgtgtcgctaccggacgctataaaacccttggagtctgcagaggttccgcagcctcgttgctaggagatcaggggttctagaactaaagacagaggaatttcctagcgcgccccgtttgctcctccagcctcccctccgtacccctccaggtgcctccttgagggcagtgaccccaagcgccagacgcttgagaagcttgggaggatgacgtagggtggagcctgcgacctaatcctcccatcacaaggggcacgcgaaaagcaacccatctgcagggcgctctggagcctctctagccgcctagagcctgcgagagcaaaggcggctggagacttag

SEQ ID NO: 15756 - DNA, 2300 bp, Homo sapien
gccagagcctggaagtgagacccccacggtggcctctgaggccctggctgaactgcttcatggggccctgctgaggaggggcccagagatgggctacctgccaggtgaggcccccagagtggcaggagtggcctagaggcagagggagggatatgggctcagggagatggggagccaggctagagaagagcaggcagagagagactgcagaggaaagagcctgcattcctgtgagattcagggaacacagaacgagactgtcagagaaagtcaaacctgggcacagacagaaccagagagacagagacagaatgattaggtgacagtcagacagaaaaacagacacatagaaacagagatggaaattcagagaaccagactcagagaaatggtggaagacagagacagagagaatgaaacacaaaaactagtggatctcgaatcatgaaatcagagtgcaatcagaatactaaacagggaaatggggaaataaagagttcgagagagaatgagacagaggagagaggagataaccagagagagaacgtgatctgagtgaggaggcagagagagaggctcagggagaggagtatcagggtggaaggggctgggtggagagaagggaccagaagagaaagaggggggactcaggctgtggaagccttgggaggaggtaggggctggggtggggaagggaaaggtggggggtgctgtaccttgtgcgggaggcttttgtggtatggcaggggaacccctagcttccctcagccctgctccccacccaaggtcctccatgtgctcctcctgtgctctgatattccctgcactgtcccaggatctgatcgggaccccacgctagccacccctccggccggccagactctcgcagtgccctccctgccacgggccactgagccggggacagggcctctgacaacagccgtcacccctaacggggtcaggggggcaggccccactgcgccagaactgctgaccccgcccccaggaaccacagccccacccccacccagccctgcctccccagggcctccccttgggcctgagggaggagaggaggagacgacgaccaccatcatcaccacgacaactgttaccactacggtgaccagcccaggtgaggcgacagcaaggggatgggggtgggaggaccggagaggtacacgctggggatggatgggagagaggctgctgggaactgtggaaggagtcctgggtacagatgggagaataataataacaaaggtagcatttctgtacccttactatgtaccaggcagtgttccaattgtttcagctatataacagttgggaaagggagttctggctcaggtgggagagggagcattgcttaaagatagtgatggacatggtggctctagcctgtaatcccagcactttgggaggccaggcgggcagatcacctgaggtcgggagttcgagaccagcctgagcaacatggagaaaccctgtctctactaaaaatacaaaattagccaggcgtggtggcgcatgcctgtaatcccagctactcagaaggctgaggcaggagaattgcttgaacccgggaggtggaggttgtggtgagctgagatccagccattgcactctagcctaggcaacaagagcaaaactccatcttaaaaaaataaaaataaaaaaataaaagatggtgaggggggcacagcagcgcacagctgtaatcccagtgatttgggaggccaaggcaggaggatcgcttgaggccaggagtttgagtccagcctgggaaatgtggcaagaccccatttctacaaaaagttttaaaaattgtctcaccatggtgatgtgcacctgtgggcccagctactcgggaggctgaggagggaggatcacttgagcccaggaatttgagactgcagtgagccatgattgcaccactgcactccagcctgggtgacagagcgagaccctgtctcaaacaaaacaaaaagatgatgagaagtgctaaggagaagggagatgaaggccagagttgcttggctgggagggcaaaagcacaggcattccttccatcccagccatttgtatctcctcagttctgtgtaataacaacatctccgagggcgaagggtatgtggagtctccagatctggggagccccgtcagccgcaccctggggctcctggactgcacttacagcatccatgtctaccctggctacggcattgagatccaggtaactggaccaaagcatgtgactgtgcagcttccaagccttttcctctgggctgtgggtgtgc

SEQ ID NO: 15757 - DNA, 2300 bp, Homo sapien
ctgttcctaattctgctgagctgtccctggatccagggtaaggacatgagactgtgggggtgggccccaggaaggcgtccagcggggtcctccaccctcctttctcttaatatcctgggtcttccgagcacatgggggaggggagaggcacagctgatggggaaggggcaagccagagctttcaggcttgaacccgaagccccttaaccctcaatattgagaaggcagagaaatgaatgagagaagcttttagcagtgtctcaggggctagatccaagaaggagggctgggaaagttggggggatgtctgcggaggcggcagaagcatggagggacctgggtgggagatggaggtgctgagagagatgccaggcgctgtacacacaactgttcttggatgaatggacaaagacagatgagcagaggcagggctcaaagaccagattttcagtcccccactctgacccccagccagactccagggaaggaggcagagactgcagaggaccagagagagagagggtgggggggagagagagagagagagagagagaaaagacagccacactgcagagacagaaacccagagagaaagccaggcactgcggaagcaagggctgggaggtgcggccagatcctctgcagagccccagggttggggggagatcaccactgaggtgaaagggaaggcagcaccggcgacccctctgccttgctggcgctgtccagggtccataagagctaaggtgttcaatgaaggcccacacagcccagggagaagggagaggggaggggagagaagaggtgtgggagtgggagtatgagggcagctgggagcccctcctccgatcttggccctcagtcgagcctgggaccatctgagcccctgcaggcccagctgatggaggagggaggaagagttctagaaaatatctctctggagaaggaaggggtgtggggaagtggagaagctcacacaacttcacctcctaggtctgcccctgaaggaggaggagatattgccagagcctggaagtgagacccccacggtggcctctgaggccctggctgaactgcttcatggggccctgctgaggaggggcccagagatgggctacctgccaggtgaggcccccagagtggcaggagtggcctagaggcagagggagggatatgggctcagggagatggggagccaggctagagaagagcaggcagagagagactgcagaggaaagagcctgcattcctgtgagattcagggaacacagaacgagactgtcagagaaagtcaaacctgggcacagacagaaccagagagacagagacagaatgattaggtgacagtcagacagaaaaacagacacatagaaacagagatggaaattcagagaaccagactcagagaaatggtggaagacagagacagagagaatgaaacacaaaaactagtggatctcgaatcatgaaatcagagtgcaatcagaatactaaacagggaaatggggaaataaagagttcgagagagaatgagacagaggagagaggagataaccagagagagaacgtgatctgagtgaggaggcagagagagaggctcagggagaggagtatcagggtggaaggggctgggtggagagaagggaccagaagagaaagaggggggactcaggctgtggaagccttgggaggaggtaggggctggggtggggaagggaaaggtggggggtgctgtaccttgtgcgggaggcttttgtggtatggcaggggaacccctagcttccctcagccctgctccccacccaaggtcctccatgtgctcctcctgtgctctgatattccctgcactgtcccaggatctgatcgggaccccacgctagccacccctccggccggccagactctcgcagtgccctccctgccacgggccactgagccggggacagggcctctgacaacagccgtcacccctaacggggtcaggggggcaggccccactgcgccagaactgctgaccccgcccccaggaaccacagccccacccccacccagccctgcctccccagggcctccccttgggcctgagggaggagaggaggagacgacgaccaccatcatcaccacgacaactgttaccactacggtgaccagcccaggtgaggcgacagcaaggggatgggggtgggaggaccggagaggtacacgctggggatggatgggagagaggctgctgggaactgtggaaggagtcctgggtacagatgggagaataataataacaaaggtagcatttctgtacc

SEQ ID NO: 15758 - DNA, 2300 bp, Homo sapien
taaaagcttctctcattcatttctctgccttctcaatattgagggttaaggggcttcgggttcaagcctgaaagctctggcttgccccttccccatcagctgtgcctctcccctcccccatgtgctcggaagacccaggatattaagagaaaggagggtggaggaccccgctggacgccttcctggggcccacccccacagtctcatgtccttaccctggatccagggacagctcagcagaattaggaacagcagctggggaggcggcgggtgctgggccctgggagtccccatggcgactcaccccgatctctctcctctgtgcctctctaagtaatctggctgccacctttcctccgtctccgtttatctttccctttaattgttttttttttttttttttttttcctcgtaggagtcagcaaagaaagacaatttctctgccccttgggatggaggggcagaattgggctaggggtcgcctggagcccacccccctttgctcagtctcctctgtcctcttctcgcggctctgtggtggagggggcgcggctccggctgcagggggtggggccgagagggccgaaggggccgggtggcctgggttaccctcctgctcaggcgcctgggtccactgggctgtctggaccccaagctaggggactggggaggagaaagacagcttctgggggtttagggtggggtcgaggatcgagggggtctccactgggctctagcggggcttgtcggggaggggaaggggtgggttggggaactgggagagccgaagctcgggcactggagctgcgggagggagaagctgagaaaggtatcgagcccacgtcagatcctggggacgggcggagggaggggcctgggatttatttgacggggagggaggaggaggaagtgcagatggaggagggagggatcatacgagccagggccgtaatcctcactcccgcggcccctaggggaggcaaaggaaactctctggtcccagcagtaattagccccctccgcctgccattccagcacatctggaatctgaatctcctcttcccagggtgccgaggggctgcatagcttggttcgcgcctgctaggcccccaattatgccccctgttcacattcagacctcccaaggggcttcccttccccttttacagtagctcgggtggaatgggctctccctcctccaggggaatagagagcttccacgattgtgacaagtctcgtgggtgacgggccggggtttggggaggagagacagacccctcctcttccataaaccctgaccccggccagctaacaggcggcctcggctctgattttccctccggagcgcccttttcagcaccagcggcgcgcggacagctcccctcgccccgccggggcgggcccggcccgacgccgcccgcgattggctgaggccgctttcggtgtttgccaggctcgcgggctcccgggctgcctagggccagcgggagtcacaggccgaccgaccgacggaccagccgcccgacggactggcctcagcatccttgcccgcagtcccgggcgcctgcccagccgtcagtccgcgctcgccccgcccctcaggccccgcccctcaggccccgcccgatacgacccgccccttctttcgcattgcgggacggctggaggctggcaccgtggcccctgcgccccacgtggcgccctttccgggcggggggggtggggaggcacctccagcgacaactctcccccctcccccggcacccggctgatttgctgtgccactgggagggttcgggggtggctgagctgagagggctccgggaaggagtgacgtcagggtgagtgggagcccaggaaggagcgagtaggagagagggagcgagagccaggcaggaccgcagggtcggggctagtgaggagcgagggcaaggagagagcagtgaggccggagagaaagaagctgccgcggaggaagacaggctgcgggttcccgggactgcaggtccaggcagggtaggaaccgctgcccaggggagctaggaggaagcggggagagagagcgagcgaaaagcgggggtggggaggaaagggggagattgaggtgggagagagaagcagagcgagagagaggaggctgctggaaggagaaagaagagggtgaggaggcgacagagggagaggaggaagaagaggtagaaggagagagaaaggggagagaaaggagagaggagggttggaggtgcatgaaggaggggagagggagcttcagcgtggagagaggaccgcggaaggagaga

SEQ ID NO: 15759 - DNA, 2300 bp, Homo sapien
ctctgtggtggagggggcgcggctccggctgcagggggtggggccgagagggccgaaggggccgggtggcctgggttaccctcctgctcaggcgcctgggtccactgggctgtctggaccccaagctaggggactggggaggagaaagacagcttctgggggtttagggtggggtcgaggatcgagggggtctccactgggctctagcggggcttgtcggggaggggaaggggtgggttggggaactgggagagccgaagctcgggcactggagctgcgggagggagaagctgagaaaggtatcgagcccacgtcagatcctggggacgggcggagggaggggcctgggatttatttgacggggagggaggaggaggaagtgcagatggaggagggagggatcatacgagccagggccgtaatcctcactcccgcggcccctaggggaggcaaaggaaactctctggtcccagcagtaattagccccctccgcctgccattccagcacatctggaatctgaatctcctcttcccagggtgccgaggggctgcatagcttggttcgcgcctgctaggcccccaattatgccccctgttcacattcagacctcccaaggggcttcccttccccttttacagtagctcgggtggaatgggctctccctcctccaggggaatagagagcttccacgattgtgacaagtctcgtgggtgacgggccggggtttggggaggagagacagacccctcctcttccataaaccctgaccccggccagctaacaggcggcctcggctctgattttccctccggagcgcccttttcagcaccagcggcgcgcggacagctcccctcgccccgccggggcgggcccggcccgacgccgcccgcgattggctgaggccgctttcggtgtttgccaggctcgcgggctcccgggctgcctagggccagcgggagtcacaggccgaccgaccgacggaccagccgcccgacggactggcctcagcatccttgcccgcagtcccgggcgcctgcccagccgtcagtccgcgctcgccccgcccctcaggccccgcccctcaggccccgcccgatacgacccgccccttctttcgcattgcgggacggctggaggctggcaccgtggcccctgcgccccacgtggcgccctttccgggcggggggggtggggaggcacctccagcgacaactctcccccctcccccggcacccggctgatttgctgtgccactgggagggttcgggggtggctgagctgagagggctccgggaaggagtgacgtcagggtgagtgggagcccaggaaggagcgagtaggagagagggagcgagagccaggcaggaccgcagggtcggggctagtgaggagcgagggcaaggagagagcagtgaggccggagagaaagaagctgccgcggaggaagacaggctgcgggttcccgggactgcaggtccaggcagggtaggaaccgctgcccaggggagctaggaggaagcggggagagagagcgagcgaaaagcgggggtggggaggaaagggggagattgaggtgggagagagaagcagagcgagagagaggaggctgctggaaggagaaagaagagggtgaggaggcgacagagggagaggaggaagaagaggtagaaggagagagaaaggggagagaaaggagagaggagggttggaggtgcatgaaggaggggagagggagcttcagcgtggagagaggaccgcggaaggagagagagacagcccagagtggaatgtggaagggaaacagtccagcggggagccagggggcagccatggaagggacaggtggggagctggggggacaggggaactggggtccggaggacgccccaggcctcttggccagggcctccctgatcatgctcccgtggccactacccctggcctcctcggccctcaccttgctcttcggggccctcacttccctgttcctctggtactgctaccgcctgggctcccaagacatgcaggccctaggggctgggagccgagctgggggtgttcgtggtgggcctgtgggatgctcggaggccggcgggccaagcccagggggtcctggggatcccggggaaggacctaggacggaaggcctagtgagccggcggcttcgggcctacgcaaggcgctactcctgggctgggatgggtagagtgaggcgggcagctcagggtggcccaggccctgggagagggccaggggtcctaggtattcagcgcccaggcctgcttttcctaccagacct

SEQ ID NO: 15760 - DNA, 2300 bp, Homo sapien
aagctgctctccaggagctccacgtcgtgccgctgggcgtcccgcggcacaaagggggctgaaggcaggtctggtaggaaaagcaggcctgggcgctgaatacctaggacccctggccctctcccagggcctgggccaccctgagctgcccgcctcactctacccatcccagcccaggagtagcgccttgcgtaggcccgaagccgccggctcactaggccttccgtcctaggtccttccccgggatccccaggaccccctgggcttggcccgccggcctccgagcatcccacaggcccaccacgaacacccccagctcggctcccagcccctagggcctgcatgtcttgggagcccaggcggtagcagtaccagaggaacagggaagtgagggccccgaagagcaaggtgagggccgaggaggccaggggtagtggccacgggagcatgatcagggaggccctggccaagaggcctggggcgtcctccggaccccagttcccctgtccccccagctccccacctgtcccttccatggctgccccctggctccccgctggactgtttcccttccacattccactctgggctgtctctctctccttccgcggtcctctctccacgctgaagctccctctcccctccttcatgcacctccaaccctcctctctcctttctctcccctttctctctccttctacctcttcttcctcctctccctctgtcgcctcctcaccctcttctttctccttccagcagcctcctctctctcgctctgcttctctctcccacctcaatctccccctttcctccccacccccgcttttcgctcgctctctctccccgcttcctcctagctcccctgggcagcggttcctaccctgcctggacctgcagtcccgggaacccgcagcctgtcttcctccgcggcagcttctttctctccggcctcactgctctctccttgccctcgctcctcactagccccgaccctgcggtcctgcctggctctcgctccctctctcctactcgctccttcctgggctcccactcaccctgacgtcactccttcccggagccctctcagctcagccacccccgaaccctcccagtggcacagcaaatcagccgggtgccgggggaggggggagagttgtcgctggaggtgcctccccaccccccccgcccggaaagggcgccacgtggggcgcaggggccacggtgccagcctccagccgtcccgcaatgcgaaagaaggggcgggtcgtatcgggcggggcctgaggggcggggcctgaggggcggggcgagcgcggactgacggctgggcaggcgcccgggactgcgggcaaggatgctgaggccagtccgtcgggcggctggtccgtcggtcggtcggcctgtgactcccgctggccctaggcagcccgggagcccgcgagcctggcaaacaccgaaagcggcctcagccaatcgcgggcggcgtcgggccgggcccgccccggcggggcgaggggagctgtccgcgcgccgctggtgctgaaaagggcgctccggagggaaaatcagagccgaggccgcctgttagctggccggggtcagggtttatggaagaggaggggtctgtctctcctccccaaaccccggcccgtcacccacgagacttgtcacaatcgtggaagctctctattcccctggaggagggagagcccattccacccgagctactgtaaaaggggaagggaagccccttgggaggtctgaatgtgaacagggggcataattgggggcctagcaggcgcgaaccaagctatgcagcccctcggcaccctgggaagaggagattcagattccagatgtgctggaatggcaggcggagggggctaattactgctgggaccagagagtttcctttgcctcccctaggggccgcgggagtgaggattacggccctggctcgtatgatccctccctcctccatctgcacttcctcctcctccctccccgtcaaataaatcccaggcccctccctccgcccgtccccaggatctgacgtgggctcgatacctttctcagcttctccctcccgcagctccagtgcccgagcttcggctctcccagttccccaacccaccccttcccctccccgacaagccccgctagagcccagtggagaccccctcgatcctcgaccccaccctaaacccccagaagctgtctttctcctccccagtcccctagcttggggtccagacagcccagtggacccaggcgcctgagcaggagggtaacccaggcca

SEQ ID NO: 15761 - DNA, 2300 bp, Homo sapien
ctttgttgctcctccatttctgatagtaccctccaaccaaggaccaccaggaagcacctgtagttgaacaagggaggctgaacaccacagacatctcagcaagaacatgtgtgaaaggacttattacaggattggaactttcattaggggacttcctaggcgggtccaaaaaggggggcatttgctctgggttggatgctatcaggaagtagggataattctttttggttatcttaataattcttatctagaagatgggaggaatgaatcaagctaaaactgtacttggtaaagaagcagcagtggccaggtgcagtggctcacacctgtagtcccagcactttgggaggccaaggtgggcatatcaccggaggtcaagagttcaagactcacctgggcaacttggtgaatccccgtctctactaaaaatacagaaatgatctgggcatgatggtgggtgcctgtaatcccagatactctggaagctgaggcaggagaatcgcttgaacctggaggtggaggttgtggtaagccaagattgcatcactgcactccagcctgggtaacagagcaagacttcatttcaaaaacaaaacaaaacaaacaaaaacaacaaccaaaaaaaaagcagcagtaacttacgctgtgggagagaggattgtgttggtaatttttgtggtttggacaatgttcttgtttctgtattgaggctttattatggaatggtctttttctagatcagtcagagagtgaccttgtctgatgttttttgtgaaattattttgctcaacaggacaccaccatggccgtgctgttggtgccaggtcagctcctagcaacatcaaggcttctggagtgagggtgcaaaccagctcccagctggcagcagttgcttttctcttttacaccgccacactcgaaatcagaaaattggcaacccctttggtagaacatgagctcccggtcactacaggcccatttatacccagtaacaggcccaggtcacacatttacactccgaccttcctcctgcgtgtgcatcccttacaccaaccacgcccagagaaaagtcactcgtctagcatctcccagggacctgctggcagggctgaagatagaactctgactctgtgttttccctccagcaaccccccttgctagacattaagacagattgttaaatccctgatgtatcggcttctaaactggatgcagatcgggtcagataaaaacacttctcagtgcaccttcttgtcaacagtgggttcctatctattcttctttcttttgggattgggtgctaggtcccacgacattagctgggattctaagacctttgctcagctgctgcggccaccactgacacgccctctgctcctcaaatacggagaacagttcagtgttcctgcctgaggatctctgcatttgccttccctctgcctggaactcttccctcacatccgcttcccagcttcagctcggcatcacctcctcagagaggccttccatccttggtgcccgggcaccactgctacccgttttggcctctgttttttttttttttttcaaaggacgttatgttgcccaggctagagtgcaacggtccgatcacggattactgcagcttccaactcctggcttcaagcgctccttctgcctcggcctcccgagtagctaggcttacaggctggggttacaggtgtgagccacagcgcccggccgctttggcctcctttaagagcttccctccgcgctttgttcgcagttctggtcacagtctgttcagtgcgcggggctgggaggcgggaaactgcccaatgcccagacctctctgtctgtttcccctcaagctcgtgaagctctctgacagcagagacccaatcacgaggtggagacttcgctttccacatcgggcagggggtcggccgcatcctcgatctggtcctggtgactcgagaccagagaggagcgcacgtcgacccgcccggggaacccgcaggccacacgccaaacctctacgggatcccccagcgaggccactgcgcatgctccatactcgcagccccgcccccattcaggggcggggccgcgcctgcgcagctgcccggcgccggcttccgggtggtgcgagcgagatggggcggagggccggtcttgcagagtagctgcggtgagtgggcgtgtgcgccgagcggtctggcccaagggctgggggccggccgagggtcttcgggagcaggccgcagggcgcggagagatcctgggatcgccgtccgccgctgctacccggcatgtcggcg

SEQ ID NO: 15762 - DNA, 2300 bp, Homo sapien
ggctcatgcctgtaatcccagcactttgggaagccaaggcaggcagaccacgaggtcaggagatcgagaccatcctggctaacacagtgaaaccccgtctctactaaaaatacaaaaaaaattagctgggtgtggtggcgggcacctgtagtcccagctactcgggaggctgaggcaggagaatggcatgaacctgagaggcggagcttgcagtgagccaagatcgcgctgttgcactccagcctggagacagagcgagactccatctaaaaaaaaaaaaaaaaaagaattaccccttccttcctgatgcatccaaaccagagcaaaccctcttgcctcaaatcctctcctgaaacataacacgagcataagtcctacaataagtctttttttttttttttttttaattagacacgtggggtttcactatgttgcccaggctggtcttgaactcctgggcctaagcgatcttcctgccttggcattccatattgctgggcttacaggcgggagccaccatgcccagtctaagtcatcttcaacacctctttctgagatgccttagagttccccatattatgtgggtctgcctcattgctatgagtccgtaaaactgactttgttttttgttttgggttgtttttttttttttttttttagacatggtctcattctcttgcccaggctggagtacagtagtgcaatcatgacctactgcagcctcaacctcccaggctcaggtgattctcccacctcagcccccttgagtagctaggactacaggcacatgccaccacaccccactaattttttgtattttttgtagagatggagtttcatcatgttgcccaggctagtctcaaacccctatgttcaagcaatcctcccaccttagcctcccaaagagctgggattacatgcatgaaccaccacactcagtcccccaacgttgttttaaaactttcttttaggtgtgttcttggtggcccttaacagaaggacattgacactggaatctggatgtttgtttgttttggagacaggatcttgctctgtcacccaggctggagtgcagtggcacaatctcggctcactgcaacctctgcctcctgggttcaagcgaatctcgtgcctcagcctcccaagtagctgggattacaggtgcctgccaccacacctggctaatttttgtatttttagtagagacagggattcaccatattggccaggctggtcttgaactcctggcctcacgtgatccacccacctcggcctcccatagtgctgggattataggtgtgagtcactgcacccggcctggatttttttttttcagtgaaagatactgattttttttaagttgactcaaagcaagttttaaacactctgtgtccacttcatgttgctatcacagaatatcacagtctgcgtagtttaggaacaatagacatttatttggcttatggttctagaggctgtgaagtccaagatacaggagctgcctctggtgagacatcatcacgtggcaagagagcatgagagagagaaagagggggctgaatttgcttttataacaaacccattcctgaaataatggcattaatccattgacctaattgcctcttaaggatctcacctctcaacagtattacatcagggattaactttccaacacctgagatttgagggactcattcaaaccatagtactctgaaattggatatataggtctatgggtgagattcccactgagggttgccagtttgcaacctttcagttgaatggtctccctcctggatgtcaaggttaatactgctatgaacagctattatgcacctaagttgaaccagggagagaacacatccttccgcatgtactattttatttaatgttattttctactaagtcattcagaactctctggactctcttcatgctgtgtaatttgcaaggttgcctgctgcatgtttggttataaatgaggtcaaatcccaattttgcaggaggacgtggatgtatgcccattcccttcacactgtgagccagtagccatgggaactataatcaagtacacaataactcccccatgaacaaatcctcagggaacaagcttcaattgaatgaaactggcttgaccacagaggaatctgggggactttctgagcttcgcggacttgtgccgcctcctgactttaagctggctctggaggaggaggaagtggaggtatctcaggtatggacctctttctggaagctgggacttggaccaggcaaagaaaggaggcggtggggaaaattcc

SEQ ID NO: 15763 - DNA, 2300 bp, Homo sapien
tgtaatctcagttactcgggaggctgaggcaggagaatcccttgagcctgagaggcagaggttgaggtgagctgagattgggctgttgttgagttgtaggagttctttatatattatagatattaaccccttataagatatatgatttgatatttcctctcattctgttggttgccttttcactgtcctttcctttttttgtttttgttttttgtggggcagagttttgatcttttgcccaggctggagtgaagtggtgcaatctcagctcactgcaacctccactccccaggttcaagcgattctccagccttagcctccggagtagctgggattataggcgcccggcaccatgcctggctaattttgtacttttagtagagatggggtttcaccatgttggccaggctggtctcaaactcctgacctcaggtgatccacccgcctcggcctcccaaagtgctaggattacaggcttgagccaccgtgcccagcctgttgtgtccttcgatgcacagaaaagactcttttctctactgaacgcccacagcacccttgtcaaaaatcatttgactagtcagggcacagtggctcacgcctgtaatcccagcactttgggaggccgaggcgagaggactgcttgaggtcaggagttcgagacatgcctgggcaacatggcaaatggcaaaaccccgtctctacacacaatgcaaaagttagctgggcatggtgggtggcgtgtgactaccggctgtctcaactacccaggaggctaaggcgggaggatctcttgagcccaagacgtccagactgcagcgagctttgattgtgccactgaactccagcctgggcgatgacagagcaaggctctgtcaaaaaaaaaaaaaaaaaaaaaaaaaaatcggccgggtgtggtggttcacgcttgtaatcccagcactttggggggccgatgcgggcagaccacgaagtcaagagatcaagaccatcccggccaacatggtgaaacctcgtctctactaaaaatacaaaaattagctgggcgtggtggcgtgcgcctgtagtcccagctactcggaaggctgaggcagaagaatagcttgaatccgggaggcggaggttgcagtgagtcgagatcgcgccactacactccagcctggcgacagactgagaccccgtctcaaaaaaaaaaaaaatcatttgtatatgcgaaggttttgtgccacaaacttttgtggctgttgatacaaacgacatggcctctgccttaaggaagccacagtcgaattaaatagattccgtttcaagtagcatctgtcctgtgtgcttagtgggcactgggcccatgttttcccacattttaccctttaagcttctgatccaaccggtgagatagataggatgatcctctttagtagaggggtaagcttagtcccctgagagcgcggctatggcttatgcgagggtacggacagtcaggatttgaacccaaagttcctggctccatgtgtcatgctacctccagtcagatgttctcacctccaaaacttgggcagaagtgaactgagatgctctctactgagcaactcttcagctccagcatcctatacattaaggagtcactaaaagtcagggtccacgagaaaggtgcagatcggggtgcacagaagagcggagtccaaaacaccactcccagccccagtggacagagtcctcaagtggcagccctgcaactctgagcggatgccgagtcctcaccgggaacccgggcgcggctggtctgtgctattggcgcgggtaggggacgcacagcccaaaaatgcccgcgacaagcttctggggcagttctcgccagtctctctggagggagcctacgggttctgcgacgtttctcgcacttgctccctggcctcgctcccgtttccacccctcccacggaggttttcctttctggtggctccttccttgggtgtccctttggtacgcccccaccctggcggtgagctgcgaggctggcgcccgcgtggccactgcgcatgcggacccggccgcggggcggggccgcgcgaggaggagggtcggggacggaagcgcagagcacggaccccgccccctcgcggccccgctcgtgacgtcgcggggggcgccggcctccgcccggccccgaggggtaagagcgagcggctggcggatccgacgcgcgagaccgggaggggacgagggcgttgcaatcgttcggggcgggggctttccggggagggggtgctcaggtgcaccagcggcggcggaccctcagactc

SEQ ID NO: 15764 - DNA, 2300 bp, Homo sapien
gtggcgtgcgcctgtagtcccagctactcggaaggctgaggcagaagaatagcttgaatccgggaggcggaggttgcagtgagtcgagatcgcgccactacactccagcctggcgacagactgagaccccgtctcaaaaaaaaaaaaaatcatttgtatatgcgaaggttttgtgccacaaacttttgtggctgttgatacaaacgacatggcctctgccttaaggaagccacagtcgaattaaatagattccgtttcaagtagcatctgtcctgtgtgcttagtgggcactgggcccatgttttcccacattttaccctttaagcttctgatccaaccggtgagatagataggatgatcctctttagtagaggggtaagcttagtcccctgagagcgcggctatggcttatgcgagggtacggacagtcaggatttgaacccaaagttcctggctccatgtgtcatgctacctccagtcagatgttctcacctccaaaacttgggcagaagtgaactgagatgctctctactgagcaactcttcagctccagcatcctatacattaaggagtcactaaaagtcagggtccacgagaaaggtgcagatcggggtgcacagaagagcggagtccaaaacaccactcccagccccagtggacagagtcctcaagtggcagccctgcaactctgagcggatgccgagtcctcaccgggaacccgggcgcggctggtctgtgctattggcgcgggtaggggacgcacagcccaaaaatgcccgcgacaagcttctggggcagttctcgccagtctctctggagggagcctacgggttctgcgacgtttctcgcacttgctccctggcctcgctcccgtttccacccctcccacggaggttttcctttctggtggctccttccttgggtgtccctttggtacgcccccaccctggcggtgagctgcgaggctggcgcccgcgtggccactgcgcatgcggacccggccgcggggcggggccgcgcgaggaggagggtcggggacggaagcgcagagcacggaccccgccccctcgcggccccgctcgtgacgtcgcggggggcgccggcctccgcccggccccgaggggtaagagcgagcggctggcggatccgacgcgcgagaccgggaggggacgagggcgttgcaatcgttcggggcgggggctttccggggagggggtgctcaggtgcaccagcggcggcggaccctcagactctgccctcccctccctttaacccccttccagccggacgggaggcggggcagggctgagcatttgtgacacctacatttccgtggctcccttcttttcccccgacccctgtttatctcttcgccttccagaagttcttttccatcaggccgtcgcaccttgcgtgggaaggagcaccccacttggaagcaggaggcggggttcagatcttggccctacccctcctgtgttaaagtccgcgagcctcagtttccctcacagtattttttgcctcgccttacccggttttgaggatctgtacgagaaagagaaaggaagtggacatttgttgaattcctgcatggccaaataccacgcagactgcttcatccgccacgtttaatccttattacttggtgttctcagaactcccatttcatggattcttaagctcacagagtcagtgaataacagaaagggattcagatctagccgtttagctgcacagtggagttcttctccagagtcttcccttgtctgggctctggctggaactattcctcagccaaatcctcgccccagaacagtgcttcctgtttctccagctgagaagtctccctttcagtttccttcttccagcacggagtacactgctctgcctccacttagattacttcagaaatgaaatgcagcaaatatttatccagcagtgcagggagttgaacttttggagtcgggaaccttggattcttgttctggctctgccacttactgtgtggccttgggaagtcctttgtcttctctgagctttcttttctctttgcgtaaaagcggtgctcttgtcccattctccctccctgtcttccagcaggctctccccggaggctcagccccctctgctccccatgggcaactgccaggcagggcacaacctgcacctgtgtctggcccaccacccacctctggtctgtgccactttgatcctgctgctccttggcctctctggcctgggccttggcagcttcctcctcacccacaggactggcctgcgcagccctgacatcccccagg

SEQ ID NO: 15765 - DNA, 2300 bp, Homo sapien
aacacttatgtagaaaagtccaatagtataaaaggacagcttggcaaattattataaagtggatacttataaataccactgagtagaatattaccagctgtccagaaaccccccatggtcccttccttcctgacaatgccctctctctccctagaaattactgtcctgctttataatgtattgccatgtatgtattcctaaataatatagtttggttttacttatttttgaaactatgtagacagaatcatacacattcttttgtggctgacttctttcaagcaacattgtgattttaagactcataactagttcacatccaagcatttgggtaacaatggtgagttaagagggttcacatttgatgatttgtcctgaatatgaaccatgtttgtcttgcttttgtcctgaaattccaatacccagttttatgatggaaattttgtaaaattcaacttgaaccgctcagaagagtctaactgatgatactcatttactggggacatagtatgtgcccaagaacttgacatgcaccttctgtcttccatttagtcatcgttacctttagaaaaagctgattccgttaacaagatctttggagggaatcagcttcacaaacgtagcagtgggtgggggtcatgttggttaaccagttcacacatcagctcactaaaggaaaaaatatttctgcaaaaaatcttcacttgtcagaggggggtgcatgaaatttgagagccatgtgttatgcatccagctcttgaactggtctcagcttcagctggctgcagtgccctaggaagttactatgggaaaagtggaaatagttgaggcccagggaactgatcaggccagaggaagtggaagctcaagatcaactgtgcttattttgctgatggctgggcctaaatgccccaaccacctacttgggacaggaaatgacaggaccctctcaaccttggactgggaaaggagggcttcctggcccctgacagaccctggggtcctgaggctaccttagttgggattaaatgcccgtattggtctctagctgtcactccctctgctccttcctcaatttctgcacacatctcagagcttcctctagcagctcttcgacctgttttgttgttttattttctttctccccaggtgtgaatcaacttcttgggccttggctctgagttggaaaaggttttagaaaaagtgaagagctggaatgtgggggaaaataaaaagcttttttgcccagtggcgtgtatggtgtttattgggggttggattgaggtggggattttagggtaggcaggcttagaagttttgggggactctttcctgttgactctctagtttggacacaggttggcatagggcataggttacttgagctctccccatggttgacttggctttggtaaacacctgtcttgttttcttctacgaaataaaatggataattacagttagttgggcgggtggggtgtcaggtcatggaaatgctgtgacataaatgcactgtgaccttggcaagtcttgcaacctgcagcgcctcaatttccgtaagagatttgaccgattgagttttcccagcgtcgacgcgcaaagattcctcgcacttggaggcccttttccaggttagatggttgctaacctcggagcagtctattttcccgccttttccgcgcccagcagcagcttcctttgcccctcccaacttccaccctgcgcgcagtcgcagatcgccgctgctgtccgtccacccgcgccccctcaaagcttcccctagcaacaagctcgggctcagagcgaaggcggggcgagcgcatgcgctgcagctctgtccaccgccagtcgtgggacagagtgccgggctcctccccttgcaagtctagctcttctccccgcctcctccggcctggggtccgcgtggcggggcgggcgcgcactcgggcttggcggctgccggtctcccaggccgcggcagtgaggagagagggcggggctgagtcctctgcgcccccgccccctttagcccggcgtccctaccgcgcctgcgcgctcccgcccggtctccatcttggaattgggaggaagagggagagggagaccgggacgagaccggggctgtggtgcggagagaggctgagacggagaagaggagaggcagagagggcgcggggaccgtcagcagcaccttagctacaatcgttcagctattctcggaagagagaagggagagggaggaggccggggcgggagtgggggctgtcaccctcggaccccggcgtgagaggggccgtgcg

SEQ ID NO: 15766 - DNA, 2300 bp, Homo sapien
cagaggggggtgcatgaaatttgagagccatgtgttatgcatccagctcttgaactggtctcagcttcagctggctgcagtgccctaggaagttactatgggaaaagtggaaatagttgaggcccagggaactgatcaggccagaggaagtggaagctcaagatcaactgtgcttattttgctgatggctgggcctaaatgccccaaccacctacttgggacaggaaatgacaggaccctctcaaccttggactgggaaaggagggcttcctggcccctgacagaccctggggtcctgaggctaccttagttgggattaaatgcccgtattggtctctagctgtcactccctctgctccttcctcaatttctgcacacatctcagagcttcctctagcagctcttcgacctgttttgttgttttattttctttctccccaggtgtgaatcaacttcttgggccttggctctgagttggaaaaggttttagaaaaagtgaagagctggaatgtgggggaaaataaaaagcttttttgcccagtggcgtgtatggtgtttattgggggttggattgaggtggggattttagggtaggcaggcttagaagttttgggggactctttcctgttgactctctagtttggacacaggttggcatagggcataggttacttgagctctccccatggttgacttggctttggtaaacacctgtcttgttttcttctacgaaataaaatggataattacagttagttgggcgggtggggtgtcaggtcatggaaatgctgtgacataaatgcactgtgaccttggcaagtcttgcaacctgcagcgcctcaatttccgtaagagatttgaccgattgagttttcccagcgtcgacgcgcaaagattcctcgcacttggaggcccttttccaggttagatggttgctaacctcggagcagtctattttcccgccttttccgcgcccagcagcagcttcctttgcccctcccaacttccaccctgcgcgcagtcgcagatcgccgctgctgtccgtccacccgcgccccctcaaagcttcccctagcaacaagctcgggctcagagcgaaggcggggcgagcgcatgcgctgcagctctgtccaccgccagtcgtgggacagagtgccgggctcctccccttgcaagtctagctcttctccccgcctcctccggcctggggtccgcgtggcggggcgggcgcgcactcgggcttggcggctgccggtctcccaggccgcggcagtgaggagagagggcggggctgagtcctctgcgcccccgccccctttagcccggcgtccctaccgcgcctgcgcgctcccgcccggtctccatcttggaattgggaggaagagggagagggagaccgggacgagaccggggctgtggtgcggagagaggctgagacggagaagaggagaggcagagagggcgcggggaccgtcagcagcaccttagctacaatcgttcagctattctcggaagagagaagggagagggaggaggccggggcgggagtgggggctgtcaccctcggaccccggcgtgagaggggccgtgcggccggacgtcctcggggtgggcccccagtcggtggccgaagacctacagctcaggcccctgggtcccaaatttccaggctttgcccctcctcctttctcagatacccgggtaacagtcctcatagtccagatatccgggactcgggtcccaacctctctaaacctgggtctctgtttcatagaatttcaaatatcaggttcaggcccctgcgtgcaccagtatccggggttcattccccgggcgttcaaatatcggattcagtctccatcccgttcagatattcggggttcagaccccacaatcagaaatccggaattcggcagctgtcgccctcgacgagggggaggactggaccgcgaggtcagattaggttgtcaccccctcccctccaggggaggcttcccgggcccgcccctcaggaagggcgaaagccgaggaagaggtggcaaggggaaaggtctccttgcccctctccctgcttggcagagccgctggaggaccccaggcggaagcggaggcgctggggcaccatagtgacccctaccaggtgagacacggggtgcaggggcgcgggtccctgtgtctagttctgagaagaaagggtgcgcctttctgagaagctggacttgggtaggccctctcaggatggggaagcccagctgagcgagtggtcagcctctggctagccttgccttctgttgccaccc

SEQ ID NO: 15767 - DNA, 2300 bp, Homo sapien
ctgcagcccccagggcacgccgggcctcacccttcatgcctagcgcttccagttctgcccggaggatactcaggcgctccttgtgtgagcaacaggagcccaacagcttcttgtagtttcgatgggcaccacaggcccgaatgtagcgcttcagcctcatcacagccgggtggtcctctccacggcgacctgagccagcctagcaaggaaagagcagctgaaggccaagcctgctgggcctgaggcagggtctccctcttccctaatagtggcctcccacccctcctcaccctcaccttccctcctttggcctctggacttccatctgaggaggaagaggagcttcgtgtcctgcctttcctggagctcttcttggaagagcggttcttcctctccccctgggggcctccccctgcctcgctgtcacttacctccctctccaagtcactttcctcaccactggtgctgcccagtctggccatctttctagagcctttagctgtgggttcccccttcccactgtcttcctcgtcctcgctgcttccactcaacctcttcccacccttaagctgggtcctgtcctcactcttcctctgcactgggggttctctatctctcccactgtcatccccactgctggctgcctctttctgctcttcctcgctgtctgagtctcccaagagcctctttgcctggcttttctgcttacagctcctctcctccctagctgactttctccggccattgctcctggttctgggtttccaatcccccttttcctcatcctcttctttctcttcctcctccacttcctcctctctctgctctttcttctgggctaggatctcctcttcactctcctgttcactttccttcaggcttttagttcctttatttccctccaccttctttgctgtcctctgaacgggttctgcctcgctctcctcactttcttccctggcctgcttcctactgactgaggccttgcctggtgcctgcttctttaccacaggtttcttcctagtcttccccttgtaccccttttcctcctcctcactgctctcctctcccctctgtgcgggcaggtccctctgccgttcctcatcactgctctcctcaactgcctttgaggctcgccttggattctcctctttggctgggctgacttctgctgccaccccattctttgctgggggtccaaagtagtctgggctggaggcttcagagccggactctggaatatggagaggagagagggttgagacaggctcctcctgtcccttctcccttcacttcggataggttgcctcgagccctgccctgacagttggaggggcagcaggaaacagctatctgtacttgctgttcccggttcctgactcactagccttgctccctcatctaacgcctggggacataagagatgcgcagtgaatgcttcttgagtgaaccaacgatgcagaaggcccccacagcagggaggaagcactaacccgactctgaattgaagcggaacctttttctctccgggtcgctacaaggggtgggaggcctcttgcccttcttggtaaggtccagtttgtcttccctggaagcggcttcatccacctgtgtgtgcgccaagagggcaaactatgcaccaaggctgcgctcaccgcgccccgtcaggcccctcctcctcagcagcaagccccgcctccgcctcccgcggcccaggctccggcccggcacacctgcatcttcagcagctcctcctccaccagccgcttcagtgcctgcttctcctcgggctccaggtggctgcggcccgagtgagctaagtacctccgccgcacgatggaatgcgtaagcgtgctgcagggacatggtgtcaggacggagtcccgacccacccgcgccctttccaaccccatctccaaccccctgggcacctgaggtccgggcggcctcggaagaagctacgggtgaactcctgcatctccttctcccgcgccattttgctcaacccgggattgacggctcccgcctttttttcttctcggcctccgtcagcgcgtttgacagcggctcgcgcacgcgcagtgctgcggcaacgtggggcgagggaccgttggcccttggccgcggaccgcgtgggccgagaactttgccagacgagacttgttttctctgggcagttggagggtctcgcggctcctacccttttttggaacggatcattttaaaagttctcgttagaaaccaattcggcgccggcaccctttgggtgaaacctaatcagcccgcgacgctgcctttct

SEQ ID NO: 15768 - DNA, 2300 bp, Homo sapien
cccccttcccactgtcttcctcgtcctcgctgcttccactcaacctcttcccacccttaagctgggtcctgtcctcactcttcctctgcactgggggttctctatctctcccactgtcatccccactgctggctgcctctttctgctcttcctcgctgtctgagtctcccaagagcctctttgcctggcttttctgcttacagctcctctcctccctagctgactttctccggccattgctcctggttctgggtttccaatcccccttttcctcatcctcttctttctcttcctcctccacttcctcctctctctgctctttcttctgggctaggatctcctcttcactctcctgttcactttccttcaggcttttagttcctttatttccctccaccttctttgctgtcctctgaacgggttctgcctcgctctcctcactttcttccctggcctgcttcctactgactgaggccttgcctggtgcctgcttctttaccacaggtttcttcctagtcttccccttgtaccccttttcctcctcctcactgctctcctctcccctctgtgcgggcaggtccctctgccgttcctcatcactgctctcctcaactgcctttgaggctcgccttggattctcctctttggctgggctgacttctgctgccaccccattctttgctgggggtccaaagtagtctgggctggaggcttcagagccggactctggaatatggagaggagagagggttgagacaggctcctcctgtcccttctcccttcacttcggataggttgcctcgagccctgccctgacagttggaggggcagcaggaaacagctatctgtacttgctgttcccggttcctgactcactagccttgctccctcatctaacgcctggggacataagagatgcgcagtgaatgcttcttgagtgaaccaacgatgcagaaggcccccacagcagggaggaagcactaacccgactctgaattgaagcggaacctttttctctccgggtcgctacaaggggtgggaggcctcttgcccttcttggtaaggtccagtttgtcttccctggaagcggcttcatccacctgtgtgtgcgccaagagggcaaactatgcaccaaggctgcgctcaccgcgccccgtcaggcccctcctcctcagcagcaagccccgcctccgcctcccgcggcccaggctccggcccggcacacctgcatcttcagcagctcctcctccaccagccgcttcagtgcctgcttctcctcgggctccaggtggctgcggcccgagtgagctaagtacctccgccgcacgatggaatgcgtaagcgtgctgcagggacatggtgtcaggacggagtcccgacccacccgcgccctttccaaccccatctccaaccccctgggcacctgaggtccgggcggcctcggaagaagctacgggtgaactcctgcatctccttctcccgcgccattttgctcaacccgggattgacggctcccgcctttttttcttctcggcctccgtcagcgcgtttgacagcggctcgcgcacgcgcagtgctgcggcaacgtggggcgagggaccgttggcccttggccgcggaccgcgtgggccgagaactttgccagacgagacttgttttctctgggcagttggagggtctcgcggctcctacccttttttggaacggatcattttaaaagttctcgttagaaaccaattcggcgccggcaccctttgggtgaaacctaatcagcccgcgacgctgcctttctcactggtcacgggcaacagctaggctgctgttatttcgcaaggcagaagagaaaaggcatcctcgcgagcagatgaggaacctcggggataaatccttttgtggcttcaagtgtctaagtacattagagtcaggaacggcgctttccagcgtccgccatttttgtggcgtcaccgcgtcgctgctacgccatccccagcgcagtggctgccgcgctcctgtcccagtgtcccccgggaggtcggcccgtgcggtgacgcccctgagcgcggggtacgccgggagttgtagtcctgacggcacagccttgcagcgtctccggaagtggaggcgggagcggcacggcagccactgcttggggtagcgggagggcagactctgggcgccactcccgggccggtcatgaacgggccggcggacggcgaagtggactacaaaaaaaaataccggaatctgaagcggaagctcaagttcctcatctacgtgagtgctgccgcgggaaggctgtg

SEQ ID NO: 15769 - DNA, 2300 bp, Homo sapien
ggactacaggtgcccaccaacatccccggctaactttttgtatttttagtagagacagggtttcactgtgttagccaggatggggtttctttcttttgagacagtcttgctctgtcacccaggctggagcacagcggtgctatcatggctcactgcagccttgacctttcaggcaagggatcctcctggttctgcctcccaagtagctgggaccacatgtatacaccactatacatggctaatttttttttaattgagatggggtctcactatgttgcccaggatggaaggctggtttcttctctggtcccaactcaaatgtcactctgtgaaaggcctttcttgagtactccattcagaggttgcctgctgcctgcttgtgtggtctgcaagctaagaagggcgtttttttttttttttgagacggagtctcgccctgtcacccaggctggaatgcagtggcagcgatctcggctcactgcaacctctgcctccagggttcaaatgattctcctgcctcagcctccccagtagctgggattacaggtgcacgccaccacacccgactaatttttgtatctttagtagagacgaggtttcaccatgttggtcaggctggtcttgaactcccgaccttgtgatccgcccacctcggcctcccaaagtgttgggattacaggcgtgggccactgcacctggccaagaatggcttttaagcttttaaacggttggaaaaaaaaaaaactaaagaaaaatttttcatatggaaaaatatgaaattcaaatttcagtgcctataaagttttatagaaacatagccatactcatgtatttgcctatggggtacggctgctactacaatggcagagttcagtaggtgcttcaaagattgtatgttgcaaaaagcttacttaccatctggccctttgcagaaacaattcatcaacccctgttctactataatcattaccgcataactgttttcattaccttcaagtccttcctatgacctaaaattctagtctattgtcttcatttacttattcttcccaactagaatataaattacaagaggccaagggctttgcctatctctgcctctgctgtatcccctgtgccaagcacagtgcctgaaacacaataggtgctcagtaagtgcctgaatgaaagaacggtggaggtggaaggcaagcaactaggcttaaggaccactgggggctgcatcagccaccactgcctaaaaggcgggggcccaggaagcttgctaagtaccaggaaccatgctctccaccaatttttgaagaccttgctcacccgaagagtcttcatccacgttctcgtactgcagaagtcggtctaggaggaaactgaggggagggaaggagacacggacagtgattttccagcgcagcaatgtcctcctgggtacctgtccctcccagctggcccatcggatacttgaaagagcccatgcacttgtggccctactcggggatggggtccgaatgtagatttcctaggaagcacatcgccctccgcccctgcaacgtgcctcacctcttgtcccgggacaccttcagtaatttcctttgcgctttcctcagctcctcctggaagcactcgtgctcctgtatcacgggcaaggggtgcgctgggccaacggtcctccgtgaagggccccggaaccagcggccgctcgccccacccactttacacctgggtaaactgagatcttgtccgcgccaggcctcatcccccacagccttcccgcggcagcactcacgtagatgaggaacttgagcttccgcttcagattccggtatttttttttgtagtccacttcgccgtccgccggcccgttcatgaccggcccgggagtggcgcccagagtctgccctcccgctaccccaagcagtggctgccgtgccgctcccgcctccacttccggagacgctgcaaggctgtgccgtcaggactacaactcccggcgtaccccgcgctcaggggcgtcaccgcacgggccgacctcccgggggacactgggacaggagcgcggcagccactgcgctggggatggcgtagcagcgacgcggtgacgccacaaaaatggcggacgctggaaagcgccgttcctgactctaatgtacttagacacttgaagccacaaaaggatttatccccgaggttcctcatctgctcgcgaggatgccttttctcttctgccttgcgaaataacagcagcctagctgttgcccgtgaccagtgagaaaggcagcgtcgcgggctgattaggtttcacc

SEQ ID NO: 15770 - DNA, 2300 bp, Homo sapien
gcatctgaggctggggtctccaccgtgggctgtggtgagcgagcgggggaaccaggcaggcagacaggtcctggggctgaatgaggggacagtgggcagttggagcctagaggggtgggtgacaccctgactagaccagcgcctggtgcagaggaggacagagcctccgagaaacagaggcggggccctgcagggccccttgggggacaggcaggctcaggagcagaggggagccccggaggagaggaaggagctggcaagatgatacagggacaacctagaagtgggtgggtgaggacggggtggtgcaacctcgacttctgcaaggagtgggttggcagcccagcccctgtggagtcagcttggggtctgcagggcccaggcctcccacctgccaccggctggcacacaccaccctctccctcgacacctaggaagggaggccagtgagggccccacagaccgaggaggccgtcgcctggccctcagccaggatggctaggtatgatgggctcactggctcacacgccctctcctagccaggggtgctgcatgaggggccgcaggggcgatcgcatgaccatcaacatccaggagcacatggccatcaacgtgtgccccgggcccatccggcccatccgccagatctctgactacttcccccggggaccaggacctgaagggggcggcgggggcggcggggaggcccccgcccatctggtccccctggctctggccccccctgcagccctccttggggccaccacgcctgaggatggtgcggaggtggacagctatgactcggatgatgccagtgagtctgggggcttggaggccccatgtgctggtgggggtctccaggcttgccgtggtggggggagagggggatgggccctgctggctgtgcatgtaggtaggggaggagggcagtgggggggtggcagggacggccaccacagctgcagtcagcgtggagattacagcttcagcaaggctcaatattcagtatttctgctgagacactccaccacccacacagccccagttgcggccgagccagggacccagacgcacacacgcatgggcccactcagcctcttgcactcacactcgcgggctggcaagagagagagacacacagagccagtgcccacctgctggcctctcgcacacacctgtctccataccgacccatgctgcctttcctctctctccagccgccctaggcacgctggagtttgaccttctctacgaccgggcctcctgcactctgcactgtagcatcctcagggccaaggtgggcactccctgccacccaagcccgggcccggtttgcgtgcagcccccagagggggcccattcctccttcccttcccaggcctgctccttcgtcctgcccttgccccctccttctgggctcctccagggtccagctctacaagagggatggagagaggtgccgggagcctctagccctctcccctgccctcctctccagggcctcaagcccatggatttcaatggcctcgccgacccctacgtcaagctgcacttgctgcctggagcctgtaaggtaacagcctcctctcgccccgcccggcccagcccatgactccagcctgtggggctggaggacaggtattgagaacctttcatccccacatcccaggccaataagctaaaaacgaagactcagaggaacacactgaatcccgtgtggaatgaggacctgacttacagcgggatcacagatgacgacatcacgcacaaggtgctcaggtgagggcccccctccccaccacccagcagcagctcggggacagctgacattgtaaccgctggttggttgatctatgtcccattaagcccgtacctctctgatgctcaagaaccatcagcggctccctagcccctttggcagcaggccaaaattcttccctgccattcctgcccctcaatatctcctgcctgccaggtgtggtggctcacacctgtaatcccagcactttgggaggccgaggtgggcggatcacttgaggtcaggagttcaagaccagcctggccaacttggtgaaacccccgtctctactaaaaatacaaaaattagccgggcgtggtggcatgtacctgtaaatcccagctactcgagaggctgaggcaggaggatcacttgaacccgggaggcagaggttgcagtgagccgagatcgcaccactgcactccagcctgggtgatggagactccatctcaaaaacaaaacaaaagtatcttctgcccctcaaacagaggactcccttctt

SEQ ID NO: 15771 - DNA, 2300 bp, Homo sapien
agagatcctcccaccatcacgaggtcaggagatcgagaccatcttggctaagaaggtgaaaccccatctctattaaaaatacaaaaaaattagtcaggcgtggaggcgggcacctgtagtcccagctacccgggaggctgaggcaggagaatggcatgaacctgggaggtggagcttgcagtgagccgagatcacgccactgcactccagcctgggcgacagagcgagactccatctcaaaaaaaaaaaaaagaaaagaaaaaaaaagaagagagatcctcccacctcagcctcttgagtagctgggaccacaggcacacaccactatgcctggattttttttttttttttttttttttttttgtagagacagggcctcaccatgttgcccaggctggtcttgaacttctgagctcaagggatcagtccgtctcagcttccccccagcccagacactttggctttgcccattttatgggtaataagtgatatctcagggttttttgtttgtttgtttgtttgtttgttttgagactgagttttgctcttacagcccaggctggagtgcagtggcacgatctcagctcactgcaacctccgcctcccgggttcaagcgatcctcctgcctcagcctcccaagacacataccaccacgcccggcatttttagcagagatggggtttcaccatgttggccaggctagtctcaaactcctgacctcaggtgatccacccacctcggcctcccaaagcgctgggattacaggcgtgagccactgcgccccgccccctcagtgttgttgactttacatttctcttacttttttttttttttttttttaagagactgtgtctcactgtgttgcccaggctggcttcactcaagcgatcctctcgccgcagtccctggagtagctaggattacaggcacccgccaccactctcggccccatttctcttatttaaaaaaaaaaaaattgccgtgaaatacgcatatcgaaatgtaccatcttcaccatttttaagggtaagattaggtggtgttaggtatgttcagttgtcgtgcaaccagattgctgttttaaataacagcacttagagatgccgacttcgtgccaggcccagtttgggacattagggactcccagatgaatcagccgctccagtggaactccctgctggtgggggaggcactggcgaagcggtgctgagccgagtcctgacggcgctggagctgaggggcagtgcgggatgccccaggaaggctcctaggaagaggggacccacggtgacttcctaaggaagcgcggttcccaggtagaggagcgcatgtgagccaagatccctaggcctgagccgtctaggtgtgtcccaggaactgcaggaaacggttgggtgagtcagtggtgggcagcgagggtgataagccccttcgtgtcttcgggatggtaagtttggggcacaggtgagtgaagaccgaaggccaggggtggactgacactccgtggcaggcgcagggccgggcaggggggcggcttgggggtggcaaggtttgggtgagaaatggcagcccatggggaactaccgcagggctctgagaccttcagagccaagccccgacgccccttcccacctgcggggcagaactggggatggcaggggggagggtggttcccaaaggagataccatccctggtaaggggacatgggcccctgggagttgggttgggccacaaggagagaggcctgaacggccaaagggagggggcgtgggggaagccgcagcatcagacctctgcctcctccctcagatcgtgaggctccccagcctggctcgggagaccccgagatccccggccggtgacagcaggcgaccccctgctcctgtcaacctgtgggtccctacggacgtggggaagggaggagggaggccccagctccctgcgggggaggggcgtgaagacgcgcgggggtggggggagatgagccggcgtcgccatgacaacgaggccggtggtccggccttggggacccgggagggagggaggcgccgtggccgcgcgcgcgggcgggggcggggggccaggtctcccaggagtagttggggaacacccggcgattctggcggctgcttcctggtggcgcagggagcccgcgtgtttgcgagtgcgtgtgtgtgcgaagttctccgggtaagtgtgccagcgcgcgcctgggtgtgtgcaagggtgtgagcgtgcacacgtgggcacgggcgtgtgcgcgcgggggtgcccggttggatgtgtgcacacgagtgt

SEQ ID NO: 15772 - DNA, 2300 bp, Homo sapien
cttggcctcccaaaatgctgggattacaggcgtgagccatggcgcctggcctgcacttggcttttctaagttaaaatgaaactgtgaaatgattctagggccaggcacagtggcgcacgcctgtaatcccaggactttgggaggccgaagcgggaggattgcttgagtccaggaatttgagaccagcttgggcaaagtagtgagaccttgtatatttaaaaaaaaaaaaaaagatgattctaaacaagagcaaaacagcctcttgtggctgcaccctatttcactgcatggaattacatcatgactgatttaactggtcccctgcttctgggtatctcagttgtttccagtcttttggaacgtgctacatttaagaattttgaacttcatggccaggcgcggtggctcacagctgtaatcccagcactttgggagaccgaagcaggcggatcatgaggtcaggagttcaagaccagcggggctaagatggtgaaacaccgtctctactaaaaatacaaaaacttagccaagtgtggggcgtgcgcccctgtaatcccagctacttgggaggctgaggcaggagaattgcttgaacccaggaggcagaggttgcggtgagccaagatcgcaccattgcactccagcctgggcaacaagagtgaaagtctgtctcaaaaaaaaaaaaagaaaaaaagaatttgaacttctattatttggcttatgggttggcatatctgtaagataaaatcctaaaagtggaatttctgggtctaaggattttttttttttttttttttttttgagacagggtctcactctgttacccaggctggagtgcagtggagtgattatagcttactgcagccttgaccttctgggctcaagagatcctcccaccatcacgaggtcaggagatcgagaccatcttggctaagaaggtgaaaccccatctctattaaaaatacaaaaaaattagtcaggcgtggaggcgggcacctgtagtcccagctacccgggaggctgaggcaggagaatggcatgaacctgggaggtggagcttgcagtgagccgagatcacgccactgcactccagcctgggcgacagagcgagactccatctcaaaaaaaaaaaaaagaaaagaaaaaaaaagaagagagatcctcccacctcagcctcttgagtagctgggaccacaggcacacaccactatgcctggattttttttttttttttttttttttttttgtagagacagggcctcaccatgttgcccaggctggtcttgaacttctgagctcaagggatcagtccgtctcagcttccccccagcccagacactttggctttgcccattttatgggtaataagtgatatctcagggttttttgtttgtttgtttgtttgtttgttttgagactgagttttgctcttacagcccaggctggagtgcagtggcacgatctcagctcactgcaacctccgcctcccgggttcaagcgatcctcctgcctcagcctcccaagacacataccaccacgcccggcatttttagcagagatggggtttcaccatgttggccaggctagtctcaaactcctgacctcaggtgatccacccacctcggcctcccaaagcgctgggattacaggcgtgagccactgcgccccgccccctcagtgttgttgactttacatttctcttacttttttttttttttttttttaagagactgtgtctcactgtgttgcccaggctggcttcactcaagcgatcctctcgccgcagtccctggagtagctaggattacaggcacccgccaccactctcggccccatttctcttatttaaaaaaaaaaaaattgccgtgaaatacgcatatcgaaatgtaccatcttcaccatttttaagggtaagattaggtggtgttaggtatgttcagttgtcgtgcaaccagattgctgttttaaataacagcacttagagatgccgacttcgtgccaggcccagtttgggacattagggactcccagatgaatcagccgctccagtggaactccctgctggtgggggaggcactggcgaagcggtgctgagccgagtcctgacggcgctggagctgaggggcagtgcgggatgccccaggaaggctcctaggaagaggggacccacggtgacttcctaaggaagcgcggttcccaggtagaggagcgcatgtgagccaagatccctaggcctgagccgtctaggtgtgtcccaggaactgcaggaaacggttgggtgagtcagtggtgggcagcga

SEQ ID NO: 15773 - DNA, 2300 bp, Homo sapien
aaatttggccaggcacagtggctcatgcctgtaatctcagcactttgggaggccgaggcaggcggatcacctgaggtcaggagttcaagatcagcctggccaacatggtgaaaacccatctctacaaaaatacaaaaaaattagccgagcatgatggcgggtgcctgtaatcccagctactcaggagtgtgacgcgggagaatcacttgaacccgagaggcggaggttgcggtgagccgcgatcgagcaattgcactctagcctgggtgacagagcgagactccatctcaaaaacaaacaaacaaacaaacaaacaaagaaataccaaaatttattattttaatgtattctttggaacaggtaacctatgcatgtggcacaaaattcaaaaaatacaaaaggatgtacgttgaaaagtaagtctttcctcttcctgccctgtctccccagaggtcaccatagttatattttcttctgtgtatttattatttttttattattatttttattttttcactctctcagcttgtcaagagacacagttaccattcttgtgcaggcctccagaaacaacatatgaacaactaagcaaacacggctaagctctttccctctcaaatggcagtattccaagcatgcttctctgcacttgcttttcttttttgatttttttttcttttttctttttcttctgagatggagtcttgttctgttgcccaggctggagtgcagtggcatgatctcggctcactgcaacctccgcctcccaggttcaagcaattctcctgcctcagcctcccaagattacaggtgcccgccaacatgcccagctaatttttgtaattttaatagagacagcgtttcagcatgttggctaggctgatcttgaactcctgacctcgtgatcctcccgcctcggcctcccaaattgcggggattacaggtgtaagccaccatgcccagcctgcactttgctttttttttctttgagatggagtctcgttctgtcgcccaggctggagtgcagtggcgcaatctcggctcactgcaagctctacctcctgggttcatgccattctcctgcctcagcctcccaagcagctgggactacagttgcccgcctccacgcccagctaattttttgtatttttagtagagatggggtttcaccgtgttagacaagatggtctcgatctcctgacctcgtgatccacccgccttggcctcccaaaatgctgggattacaggcgtgagccatggcgcctggcctgcacttggcttttctaagttaaaatgaaactgtgaaatgattctagggccaggcacagtggcgcacgcctgtaatcccaggactttgggaggccgaagcgggaggattgcttgagtccaggaatttgagaccagcttgggcaaagtagtgagaccttgtatatttaaaaaaaaaaaaaaagatgattctaaacaagagcaaaacagcctcttgtggctgcaccctatttcactgcatggaattacatcatgactgatttaactggtcccctgcttctgggtatctcagttgtttccagtcttttggaacgtgctacatttaagaattttgaacttcatggccaggcgcggtggctcacagctgtaatcccagcactttgggagaccgaagcaggcggatcatgaggtcaggagttcaagaccagcggggctaagatggtgaaacaccgtctctactaaaaatacaaaaacttagccaagtgtggggcgtgcgcccctgtaatcccagctacttgggaggctgaggcaggagaattgcttgaacccaggaggcagaggttgcggtgagccaagatcgcaccattgcactccagcctgggcaacaagagtgaaagtctgtctcaaaaaaaaaaaaagaaaaaaagaatttgaacttctattatttggcttatgggttggcatatctgtaagataaaatcctaaaagtggaatttctgggtctaaggattttttttttttttttttttttttgagacagggtctcactctgttacccaggctggagtgcagtggagtgattatagcttactgcagccttgaccttctgggctcaagagatcctcccaccatcacgaggtcaggagatcgagaccatcttggctaagaaggtgaaaccccatctctattaaaaatacaaaaaaattagtcaggcgtggaggcgggcacctgtagtcccagctacccgggaggctgaggcaggagaatggcatgaacctgggaggtggagcttgcagtgagccgagatcacgcca

SEQ ID NO: 15774 - DNA, 2300 bp, Homo sapien
cctggctttaggggaagtcgcggcactgggtctgcagagtccgctgagcacgcaccttcgttgtgaaactaaggaaaccctggagtgtccttgggcttgggtgggatggaacatgcccgtgacagacaggcccacctgccaatcagaagggcgctctccttagctgggatggggccgcaggagtggaaatggctgttgggaggtggcagagatgggagatggggtggccacgggggagccgccggccacagaagaggaaacggaggtgcagggagcggagtctgcgaaggacgcgtggatggccaagagatgtgcctcggaaagggccgagggacttcctctgaccaacccccgacggccattcccagccatccgttttcctgcagccgcggatgcaacctgtggaagaggcgggaggaggcccgggagtccgccccgctgcgcctttcctagggtgggagcgtggactcaggcgcggccgctgctgccacctagtgggagacgcctgctactcctctcggttcctaaccccagggtcgttcccggctgagcactaaggagggggcgggggaggacggagagagccctgtgcccctggatctgcggataggatgcaagggggagcctcagagaggaaccccccccccaggaagtgtgcattgcccacactacttttcccctctgtgccgtgatttcctcccgtgtataagggaggcaagagtacctgcctctgggctgggcttggtggctcacgcctgtaatcccaacactttgggaggccgaggcaggcggatcatccgagttcaggagttcaagaccagcctggccaacatggtgaaaccccatctctactaaaagtacaaaaatcagccgaacagtgatggtgcgcgcctgtaatcccactccaggaggctgaggcaggagaatcgcttgaacccaggaggtggaggttgcagtgagctgagattgtgcgtctgcactccagcctggcggacagagtgaaactccatctcaaaaaaaaaaaaaaaaaaaaaaaaaaaaaagagtacctgcctctgagggtcagtgcaagagcaaatgaacaaatttgtgcaaggtacttggccataaatggggtccagccagcatagtaataggtgttcaataaatgctacctgctgggcatggtggctcatgcctgtaatcccagcactttgggaggccgaagctggaggatcacctgaggccagaagttcgaaaccagcctgggcaacatagcaagccctcatttctacaaaaaatgcaaaaattagccgggcatggtggcacatgcctgtggtcccagctactcaggaggctgatgtgggaggatcacttgaggccaggagttcaaggctgcagtaatcataccactgtactccagcctgggtgacagagtgagaccctgtctctgaaaatacataaaataggccgggcgctttgggaggccgaggcgaacagatcacctgaggtgaggagttcaagaccagcctgaccaacatagtgaaaccctgtctctactaaaaatacaaaaattagccgggtgtggtggcagacagataaaaggaagggatttatccaaagctgtaatcccagatactcaggaggctgaggcaagagaatcacttgaacccaggaggcagaggctgtagagagccaagatggcgccactgcattcccacctgggtgacagacagagaccctgtctccaaaaaaatgaaaataaataaaacaaatgttacctgtggttgatccaaggggtaaccggaggtgtgtggccctgtgccaccaccccaaattgtgcctgttgtccaaacacagcttcctttagttcgggctttcagcaagatggccgtgccgcatccctcctctttgtaaatgctggggctgccaccattatggttttatcatcagcgacattccagggggtgaagactggtcccaacctctcttctcctctcctcttctgatgagagtgagggatgggggaggggtcccagctcctagcactttctcccctcaccccaaagtgccatcagaacagctctgggctgtgacatcacagagcccccacctcatgataggagtcatgaggctgtggccatgggtgctggtgtgggtgtggctggctgcactaggggccatagaaactggtaagaagctgtcttgggagcagcaggaaggcaggcagctctgggagcataaagtgtgatgcccacttagggactcggaagccaaccctgcaccctctcattttctctccactcttctctcccatcctg

SEQ ID NO: 15775 - DNA, 2300 bp, Homo sapien
ccgggcccagtccccaggcctcactttccttatgggccagtgaggagcttgcaccagcccaccccgcagtcctttcccactctgaaactaggctgtatgtggaagttgcagagaaaggggagctagtagcattaaggaaactgaggaaaaagtgaggggtgggaatttagagaaggccaggaggggctggcagtctgaagaacagggcctgggcatcctagggctccctgggacttcctgagaggcagctgccccgcgctctcgccaccgtttccccttcttccactccttgcccctccaacgcctgcaatgagagggctgtgccacttctgaactgggtgacctcagggagcctcaggatcgttgatggccctgtgggaaggacagacgcagtgacctcggagctcctgcagcagacaggacatgggcagccctgcagcacagtcaggtgccccctctggccaatgtcagcttccttccccgccatcgggtgagggggcctctggctctgaggatgctgtgttgagatgtttttgctcctatcccctccttcagctcttccttctgagaaagcaccacttactccctctcccagggaacgctctcttccgctggaatggccacccaaagctcggacccggggcaggccacagagggatggcttggtgagggaggagatgccaggcatttgcaaagtgctgatgggaagcagggtcaggcccctgtgggggctcagggccccctcccagctggccaaggagccctgggcccccttcctccccaagagaagagctggcccctgtcccctgtccccagcagccccctgtgccaccgcagctgctgttcctttaagggcctccccctccctctttctctgctccccccatctctgtcgcagccgcggctgtggctcagagctgcatggggagacgccgctgcaggtccggtttctcggtgtctggtcggtgccatcattttcctgcccctcccccgtcctccccaagctggccacttcccctccccctccccctccccaccgagggggcagggggctgggcacggagtctctatgatgatgccatgtgcggtgtctgtgccgggcggcagggactggggcggcagcgagaggaggcagtggagccaggagagcggtggtgaccgctgaccgcttgcccggctgctcctccgctccctcccgcccacctccttcctttggggctggtactcagacccacccccaccccctccccgcctcctcgggccctcccagcctctcacgtaagcctcccctccccacctgcctggtggctccctcccctcccccatccgcatcctcctcctcctgtcccctcttcctctctgtccctcaccaagccatcccctctttgcctctccccatccctcgctggcctgctcctgctccccttctcccatcctcccctcccccgtctctgcccagccagccccctcccgactccccagtttcatcggactccctggccccatcccgtccccgccctggcccctttgtgccccttctcatcgttttctccctccttcccgggcttggcgtcccttctccacccctaactccttccactcggcctccctgccccttcacggcccgcctgcctccctgcccaagtcctgagccaccatgctgaccccgatggtggccgggggggtggtgttccccggactcttcctcctctccaagaacacgctccagcggctgccccagctacgctgggaggaggccgacgcagtcattgtctcagccaggtaaaccactttctttcccctcagcccctgtctgcttcttgggcttctcagggaatggaagggacctggcacttctctggaccctcagcggtgggggactgggagctcctgtgggggtccggggctttacccccaggcttcctctctcctcactgcctgccttgctcactgttctgggagacctcatccagcccggccatctggtctactagtgttcagcccgcctctctcttcttccccgtacaccctcccaccctccaaaacagggccagcatgcggcgaagacattcctataagacattagggactgaggccagggccagacagctaggtgtcattcagggtgagtgtttgggggccagggatggaggagtggatggtacaactctacacccctagaacagggccagagtgcagagtggaggctggtggcagtcaggagacagtgggaaagtgactggggaactcggggtcacaaagggtccagagtgaggcctgcgtcatgactggacagctaa

SEQ ID NO: 15776 - DNA, 2300 bp, Homo sapien
cagcatgttgggaggcagaggtgggtggatcgcttgagcccaggagtttgagaccagcctggctaacgtggtgaaacttcatctctacaaaaaatacaaaaattagctgagcatggtggtgtgcgcctgtagtcccagctactggggatactgaggtataaggatcatttcagcccggggaggttgaggttgcagtgagccatgatcgcgccactgtactccagcctgggggacagaatgagaccctatctcaaaaaaaaaaaaaaaaaaaaaaccccacaaaatttctaaacctgtttcttctgtaaaacagggataccaagtaagaaccagtagaaatcacctggtactgtgcccagcatgtagtaaaaactcagggagctggatcccctttccccctcccgtgaagggctgaggacaggagctaggtccgctattgtctctacaaccgtctctaaatcagcgtgagacttcttgggtgctttcctacagattgccgctagagggcagcacaaaacagcaaatcccagtccctggcctttctttgggggaggcgaggagtgggctctggcagagaaaggcaaaccatagggttgactattgaacttggagaccaaaggagtttgcataacaggcccttgtcatgctgaagtccacaggacagttgggagcaggatgggaggccagaagtcaaagggggcagtgtctctggctcaggtcccacagctccacccgggcccagtccccaggcctcactttccttatgggccagtgaggagcttgcaccagcccaccccgcagtcctttcccactctgaaactaggctgtatgtggaagttgcagagaaaggggagctagtagcattaaggaaactgaggaaaaagtgaggggtgggaatttagagaaggccaggaggggctggcagtctgaagaacagggcctgggcatcctagggctccctgggacttcctgagaggcagctgccccgcgctctcgccaccgtttccccttcttccactccttgcccctccaacgcctgcaatgagagggctgtgccacttctgaactgggtgacctcagggagcctcaggatcgttgatggccctgtgggaaggacagacgcagtgacctcggagctcctgcagcagacaggacatgggcagccctgcagcacagtcaggtgccccctctggccaatgtcagcttccttccccgccatcgggtgagggggcctctggctctgaggatgctgtgttgagatgtttttgctcctatcccctccttcagctcttccttctgagaaagcaccacttactccctctcccagggaacgctctcttccgctggaatggccacccaaagctcggacccggggcaggccacagagggatggcttggtgagggaggagatgccaggcatttgcaaagtgctgatgggaagcagggtcaggcccctgtgggggctcagggccccctcccagctggccaaggagccctgggcccccttcctccccaagagaagagctggcccctgtcccctgtccccagcagccccctgtgccaccgcagctgctgttcctttaagggcctccccctccctctttctctgctccccccatctctgtcgcagccgcggctgtggctcagagctgcatggggagacgccgctgcaggtccggtttctcggtgtctggtcggtgccatcattttcctgcccctcccccgtcctccccaagctggccacttcccctccccctccccctccccaccgagggggcagggggctgggcacggagtctctatgatgatgccatgtgcggtgtctgtgccgggcggcagggactggggcggcagcgagaggaggcagtggagccaggagagcggtggtgaccgctgaccgcttgcccggctgctcctccgctccctcccgcccacctccttcctttggggctggtactcagacccacccccaccccctccccgcctcctcgggccctcccagcctctcacgtaagcctcccctccccacctgcctggtggctccctcccctcccccatccgcatcctcctcctcctgtcccctcttcctctctgtccctcaccaagccatcccctctttgcctctccccatccctcgctggcctgctcctgctccccttctcccatcctcccctcccccgtctctgcccagccagccccctcccgactccccagtttcatcggactccctggccccatcccgtccccgccctggcccctttgtgccccttctcatcgttttctccctccttcccgggctt

SEQ ID NO: 15777 - DNA, 2300 bp, Homo sapien
ttacaggcacatgccaccatgcccagctaatttttgtatttttagtagagatggggtttcaccatgttggtcaggctggtcttgaactcctgaccttgtgatctgcccgccttggcctcccaaagtgctgggattacaggcgtgagccactgcgcccagcccttaattgatttttttagagacggagtcgcactctgtggcccaaggctggagtgcagtctcgtgatcaaagctcactgcagcctcaacctcctgtcctcaagtgatcctcttgccttggcctcccaaagtgctggtactacaggtgtgcaccaccacacttggccttttttttttcttttagagtcagagaatgcagatcaatgtctgacctgtagtctaagcagcatttaatgatgtgacactaattattaacccaacctcacagatgaagaaattgaggcccataaaggctttgcccaccatcattcagagaaaggaagagcctaaatttagaattttaaaaactgcagcttcacttaaggggcacacattttaagaggatgcctcgagaatgtttacatatgtatacactggtgatcaatataaggccatttccaacacttcagaaggttccctggggtctcctcccagtcaataccttccccaagttaaacgctgttcagatttttcatgatagatgttttgcttttctgaatttgatgtaaacagagccatacagtgtgtttctttatttgtttctttatttcagcaatagggaagtgaaatgtttctttgattatctgtggactctgaatttgaagtccatgtacacccacagtagaaatggccttctttaccttttatcctacaccgccttttaaatcaataattacttaggactacttttttgggggggcagggtcttactctgttgcccaggatggagtgcagtggtatgatcatagctcactacagccttgaactcctgggatcaagcaattctttccattctttcgcctcatccttccaagtacctgggaccacaggtatatgtcattgcactggactattttattcttcttcttcttctttttttttttttttttgaaacacagtctcgctctgtcgcccaggctggagtgcagtggtgccatctcggctcactgcaagctccgcctcccaggttcacgccattctcctgcctcagcctccggagtagctgggactacaggcgcccgccaacgcgcctggctaaattttttgtatttttaatagagacagggtttcaccgtgttagccaggatggtctcgatctcctgaccccgtgatctgcccgcctcggcctcccaaagtgctgggattacaggcgggagccaccgtgcccggcctattattctaattttttgtagagacaggggttccactatgttgcccaaactggtcttgaactcctggcctcaagtgatcctcccacctcggtctctgaggtgcggggattccagcctgaaccactgcacttgctgttttttttttattttattatttatttatttatttatttattttttgagacagagtctctgtcgcccaggctggagtgcagtggcgagatctcggctcattgcaacctctgcctcccgggttcaagcgattctcctgcctcagcctcctgaatagctgggattacaggttcccaccatcacgcctggctaatttttgtatttttagtagagacagggtttccccatgttagccagtatggtctcgaactcctgaccgcaggtgacccactcgcctcagcctcccaaagtgctgggattacaggcgtgagtcaccacgcccggccctgcacctgctcttatttcccctctccttttctttctttgagccctgtccctgaaacatagctgtccatcaagtcaccaatggattctaattggccaattctaggcaaggcttgctggaaccgccccccagcccccacaggaagcaaatgatagggcacatgtatcaactggcgggccattaggaggatggcaccttctagccactccaccaatggaagagcatactcctgccctccccaactgcctctacagagcagcctcgtgcctttgcagtttgacaccttccttttatcccgagaaggtcccttggaagacacttcaggaaggcaggatggcaggacctggttcccttcatcctgcctgtgcctgctccacacctctgctccccagagtagatgggaggggaggtctttctaaacaaaaatgatatctatgtaaatatatgtagtttcaggcttgcacctgttattt

SEQ ID NO: 15778 - DNA, 2300 bp, Homo sapien
aaaacaatgcttcattcgtggatggtgtttggtttcaattcattcatagaatcagtgagtattggctgagtgcagtggctctggcctgtaataccagcaacctgggaggccgaggtgggaggatcatttgaggcaggagttggagactagcctggccaacatagtgagaccccatgtctactttattaaaagaaaaaaacaggccaggcgcagtggctcacacctgtaatcccagcactttgggaggccaaggcgggcagaacacctaaggtcgggagttcgagaccagcctgaccaacatggacaaaccccgtctctactaaaaatacaaaattagctgggcatggtggcacttccagctactctggaagctgaggcaggagaattgcttgaatccagggcggaggttgcagtgagctgagatcacaccattgcactccagcctgggcgacaagagcaaaactccgtttcaaaaaaaaaaaaaaaaaagaaaagaaaagaaaaaagaaagaaagaaagaaaaagaatcagtgagtattcaccaaggctcccagggctaggccaagtactagagctcaggatacggagatgactcagaccaggccccagacacttgcagtctaattgtggagccagacatggaagtgaggaattcaagtatcttgtgagaagtgcgagaacaacagtatctgtaggatgctgtgggaattcacagtccaaagcagccacctctgcctgaggttggcagggagacctcacagaggcaaaactgaggacgtgcttgagggatgaggaagaggtttgaggggaagacagagggtgttccaggcagagggatcagcaactgcaaagctgtggaaatgtgagaccctacacactggttcaggaagcttcagcagatcctactgaaggtggcttatgcctgtaatcccagctacctgggaggctgaggctggaggactgcttgagcccaggagttcaagaccagccttaacaacatagcaagaccacatctctaaaaattcagaaaaaaaggctgggcacagtggctcatgccagtaatcctagcactttgggaggccaaggcgggcgggattgcctgaggttaggagttcgagaccagcctggccaacatggtgaaaccccgtctctactaaaaatacaaaaattaggtgtgcgtggtggcagtcgcctgtaatctcagctactcgggaggctgaggcgggagaatcgcttgaacccaggagacataggttgtagtgagccaagatcacaccattgcactccagcctgggagatgagcgaaaatctgtctccaaaaaataaataaatcaattaataaataaatcagtaaaaaagaaccgggcccggcgcggtggctcacgcctataatcccagcactttgggaagctgaggcgggcgcatcacttgaggtcaggagttcgagaccagcctggtcaacattgcgaaaccctgtctctactaaaaatacaaaaattagccgggtgtggtagtgcgcgcctgtaatcccagctactcgggaggctgaggcaggtgaatcacttgaacacgggaggcggaggttgcagtgagccgagatcgcgccactgcactgcagcctgggcgacagagcgagactccgtctcaaaaataaataaataaataaataaataaataaataaataaatataaataaaatataaaaagtagcattgatgtttacaatatccctgagcggcaggcgtttctcccttttgcagatgctcagtggcttggccggagatacatccaagtggtgggtgtagcctgggggttcaatcctcctgtggcgccccagaacccggtgcctcctccaacgtccggcatctgatgaggatccgacccaggcgggcggcggcgggattcgctcttccccttcgctccccgcgagaaagccccgagggccgcggcggcgcagagccggtgacagttgaagcttaggcgggaagagggaggcgcgaggcgggaagagggagtttgggcctcggcagccgccgtacaaacaccgctctggtcaccatggcaacagcgggatgccgcgaacggcttctgggcggggccggtccctcggacgattggacctagcttggcgcggaatccgtgaattgcccgcggcccgagggtgcaggtgatgggtgctgaccgactggggaagcccggagtgtggggactgaggaggggagtggcctggggcgcgctggagcctgcgaggaaggcgccgcctcggatcccccgccccccattccccttcccgaattcca

SEQ ID NO: 15779 - DNA, 2300 bp, Homo sapien
ggagaatcacttgaacccgggaggcagaggttgccccaagctgagatcccaccattgcactccagcctgggtgacagagcaagactccgtttgaaaaaacaaacaaacaaatagatctaattcttttgaaaacattaaaattgattgggcgcagtggcgcatgcctgtaatcccagcactttgggagaccaaggtgggtttagcccaggagtttgagactagcctgggcaacatgatgaaaccctgtctctacaaaaaaatacaaaaaatgaattagccaggcgtggtggcacgtgcctgtaatcccagctacttgggaggctgaggcaggagaatcgcttgaacccaggaggcggaggttgcagtgagccgagaccgcgccatggcactccagcctggcaacagagcgagactccgtctcaaaaaaaaaaaaaaaaaagtacaaaaaatgagccgagcacggtggttcatgcctgtaatcccagcactttgggaggccaaggcgggcagatacctgaggtcaggaattcaagaccagcctggtcaacatagcgaaaccctgtctctactaaaaatacaaaattagccaagtgtggtggcacatgcctgtaatcccacctacttgggaggctgaggcaggagaaccgcttgaatccagaggtggaagttgcagtgagtggagatcacgccattgtgctccagcctgggcaacaggagtgaaactccatctcggaaaaaaaaaaaaaaaaatggccgggcacagttgctcactcctttaatcttagcactttgggaggctgaggcaggtggatcatctgaggccaggagttccgagaccagcctgaccaacatggtgaaacccccatctctactacaaatacaaaaattagctgggtgtggtggctcacgcctgtagttcagctactcagaaggctgaggcagaactacttgaacccaggaggtggaggttgcagtgagccaagatcgcaccattgcactccaccctgggcaacagagtgagaccctgtctcaaaaaaaaaaaaaaaattaaaaataggtaaattgccattttcaaagatacctgtaaagatttttaaaatcattcatgaatgcggtctgttcgttgcacagagtagatgctcaaaaatggtgaatgagaccctctattttggtctcatgctgaagaagtccataaagcccacaagtcattttcatgatggacagaaaaatgtgtgtgctttctctgtctactgcctcaactgcacagaccccgggactgtagcagaaccatcttttgagcttgacaccgggaggcccaaattctagcacgggacccagggccagttgctctctggtcctcagtctcctcacccataaaatgggaaggagagaaccctgaatcattgcttctagcttctgaactcagttgttcagaacaaggactcactgctgatttttcaacagcacagggaattgcactgttcctgggaatgatggacagtaccctctgttccactgggcaagtgagatttcccaggcctctctgttcccttctccccttagagagcaacagacgtggccccatcccacctccctcaaccctctctctcctccctcaggactgggcacctcgctgcccccgctgctgcccactctgcgactgtgcctgtacgtgccagctccccgactgccagagcctcaactgtctctgcttcgagatcaagctccgatgaggacccagggcccctgccctctggggagcggccagcccccagggcccatgtgccctcctccctgaagagcctttccccacgccactggaaccacagatggcctgccgagcacccaggcctgggaactggaagtggcagcgcagggcctggctccctgcagggcaggactcttggccggctggacggcagctcctctggagggccagaaaagagaggggctagtgctcgggcaggtgccctggcttcccttcccctccacacgtcaacgattctatttgaagttgggcaggggggtggcgctgctcaccacacacaagtgttataggaggagtctggcccttgagtaccgggtacgcaggggtgcctcaaccacactccgtccacggactctccgttattttaggaggtgagtgtagtgccagtatctactctccttcttaaaaaaaaccagggctccagagaatcagaacagccaccatcaccgcagggagtcaagggaggagggagattagagaaggagccagggagggtggcagggaggccacgtgatccgagtcccctcacccc

SEQ ID NO: 15780 - DNA, 2300 bp, Homo sapien
aagaccagcctggtcaacatagcgaaaccctgtctctactaaaaatacaaaattagccaagtgtggtggcacatgcctgtaatcccacctacttgggaggctgaggcaggagaaccgcttgaatccagaggtggaagttgcagtgagtggagatcacgccattgtgctccagcctgggcaacaggagtgaaactccatctcggaaaaaaaaaaaaaaaaatggccgggcacagttgctcactcctttaatcttagcactttgggaggctgaggcaggtggatcatctgaggccaggagttccgagaccagcctgaccaacatggtgaaacccccatctctactacaaatacaaaaattagctgggtgtggtggctcacgcctgtagttcagctactcagaaggctgaggcagaactacttgaacccaggaggtggaggttgcagtgagccaagatcgcaccattgcactccaccctgggcaacagagtgagaccctgtctcaaaaaaaaaaaaaaaattaaaaataggtaaattgccattttcaaagatacctgtaaagatttttaaaatcattcatgaatgcggtctgttcgttgcacagagtagatgctcaaaaatggtgaatgagaccctctattttggtctcatgctgaagaagtccataaagcccacaagtcattttcatgatggacagaaaaatgtgtgtgctttctctgtctactgcctcaactgcacagaccccgggactgtagcagaaccatcttttgagcttgacaccgggaggcccaaattctagcacgggacccagggccagttgctctctggtcctcagtctcctcacccataaaatgggaaggagagaaccctgaatcattgcttctagcttctgaactcagttgttcagaacaaggactcactgctgatttttcaacagcacagggaattgcactgttcctgggaatgatggacagtaccctctgttccactgggcaagtgagatttcccaggcctctctgttcccttctccccttagagagcaacagacgtggccccatcccacctccctcaaccctctctctcctccctcaggactgggcacctcgctgcccccgctgctgcccactctgcgactgtgcctgtacgtgccagctccccgactgccagagcctcaactgtctctgcttcgagatcaagctccgatgaggacccagggcccctgccctctggggagcggccagcccccagggcccatgtgccctcctccctgaagagcctttccccacgccactggaaccacagatggcctgccgagcacccaggcctgggaactggaagtggcagcgcagggcctggctccctgcagggcaggactcttggccggctggacggcagctcctctggagggccagaaaagagaggggctagtgctcgggcaggtgccctggcttcccttcccctccacacgtcaacgattctatttgaagttgggcaggggggtggcgctgctcaccacacacaagtgttataggaggagtctggcccttgagtaccgggtacgcaggggtgcctcaaccacactccgtccacggactctccgttattttaggaggtgagtgtagtgccagtatctactctccttcttaaaaaaaaccagggctccagagaatcagaacagccaccatcaccgcagggagtcaagggaggagggagattagagaaggagccagggagggtggcagggaggccacgtgatccgagtcccctcacccctttccttcccacaggtccctggccaaagatttatttctcttgacaaccaagggcctccgtctggatttccaaggaagaatttcctctgaagcaccggtgagtgggcaggggctccctccccatcaatagggccgacccaagtcttcctcccccttcccccatgccgggccccacgatagtgtgaatgtcaggggcttcaggtttccctaaatataggtccctgccagaggatccgtggcgggaaaagggcaggggtcattagagaagatcggggacacatgtggggcgggcaggagctgccttataaccagcccgggaacccctagctcactcgctgctgaccaggctctgccggctccttcggcctcgccgcaggtgggccccttgcaggaccgggccggggtggggatggggttggggttgggccaacagggtccagatggggtccaggtgaggaggggagatttggacgataggagcagggggctcagcatctgggaggcagatcagttcggggacggattttcttt

SEQ ID NO: 15781 - DNA, 2300 bp, Homo sapien
cactgggcaagtgagatttcccaggcctctctgttcccttctccccttagagagcaacagacgtggccccatcccacctccctcaaccctctctctcctccctcaggactgggcacctcgctgcccccgctgctgcccactctgcgactgtgcctgtacgtgccagctccccgactgccagagcctcaactgtctctgcttcgagatcaagctccgatgaggacccagggcccctgccctctggggagcggccagcccccagggcccatgtgccctcctccctgaagagcctttccccacgccactggaaccacagatggcctgccgagcacccaggcctgggaactggaagtggcagcgcagggcctggctccctgcagggcaggactcttggccggctggacggcagctcctctggagggccagaaaagagaggggctagtgctcgggcaggtgccctggcttcccttcccctccacacgtcaacgattctatttgaagttgggcaggggggtggcgctgctcaccacacacaagtgttataggaggagtctggcccttgagtaccgggtacgcaggggtgcctcaaccacactccgtccacggactctccgttattttaggaggtgagtgtagtgccagtatctactctccttcttaaaaaaaaccagggctccagagaatcagaacagccaccatcaccgcagggagtcaagggaggagggagattagagaaggagccagggagggtggcagggaggccacgtgatccgagtcccctcacccctttccttcccacaggtccctggccaaagatttatttctcttgacaaccaagggcctccgtctggatttccaaggaagaatttcctctgaagcaccggtgagtgggcaggggctccctccccatcaatagggccgacccaagtcttcctcccccttcccccatgccgggccccacgatagtgtgaatgtcaggggcttcaggtttccctaaatataggtccctgccagaggatccgtggcgggaaaagggcaggggtcattagagaagatcggggacacatgtggggcgggcaggagctgccttataaccagcccgggaacccctagctcactcgctgctgaccaggctctgccggctccttcggcctcgccgcaggtgggccccttgcaggaccgggccggggtggggatggggttggggttgggccaacagggtccagatggggtccaggtgaggaggggagatttggacgataggagcagggggctcagcatctgggaggcagatcagttcggggacggattttcttttggagaaggaagtcaggctcaaggaagacgtttggcaggaactgtgaccccgcatgccagaggccgagcagcggccggtgcatagccgcgcattctggttttctgtggcgcagaggactaccagcctggctgcggcggcccggcggagagcgcgcacgcatgcgcgacccagcccggcctgccagcctggaactcggatggggaggtctcgcctccgcgcgccgctagttccgccgccttctcgcgctccctgcgtgtcctctcgatgccctttcctccgcctcccttacgcctgggccagtgacagggtgtcggctccgcgccgattcagcccgcgggcgaggcaggctaacgcacgactgcgcgatgtggcccctatggtgacacgcgctgcagccgcgaagaccggaagctggggcggccccgggccgcgcgcgctgggcctgggaggcgaaactcagcttccttcgtttccgacttttccatccgcgtcctccacttccccgttccgccctcccccattgccaacattctggctgagtcacggcgccccagagcgcgccaggctgggggaaaggagcagaagggagggccctagcgacccgcgggatgtggtccgagtcacgtccgaggggggtggggagggatcgtgttctcggcgcccgccccttcctagcgcggcctctgggctgcgcctctcgggggcggcccgtagcccagtccgtcgcctgccattggacgccgcccgctcctcgtaaaggaaaaagctcggcggagggcggagtggtgcctttaaaaggccgggcgccgccttccgcctgcccgcctcctgcgccgccccttccgaggctaaatcggctgcgttcctctcggaacgcgccgcagaaggggtcctggtgacgagtcccgcgttctctccttgaatccactcgccagcccgccgccctctgccgccgcaccctgcacacccgcccctctcctgt

SEQ ID NO: 15782 - DNA, 2300 bp, Homo sapien
tgtggtccgagtcacgtccgaggggggtggggagggatcgtgttctcggcgcccgccccttcctagcgcggcctctgggctgcgcctctcgggggcggcccgtagcccagtccgtcgcctgccattggacgccgcccgctcctcgtaaaggaaaaagctcggcggagggcggagtggtgcctttaaaaggccgggcgccgccttccgcctgcccgcctcctgcgccgccccttccgaggctaaatcggctgcgttcctctcggaacgcgccgcagaaggggtcctggtgacgagtcccgcgttctctccttgaatccactcgccagcccgccgccctctgccgccgcaccctgcacacccgcccctctcctgtgccaggtgagcgcccctcttcacgtgcggggaccagggaccgtggagagggatcttgggggcagtggcgggttgggcgtccgcgtggaggcctcccccatcccatgccagcgtctccccactaccaggcacacacaggctccccggcccctccagcctgaggtcctctaactgcgcaatgcagcggctgcgcgcgctgagtcatggcgggggaggaagccggacgagatgaaggaccattctcccccttttcttgcagggacccctgtggcaaaggattagggccccttagccctggcggggatcctaagaggcagtgaggggtgggggccggcccatgtacagccccagggttctcgcaagtgggagcttggtttctgtcctgggaaacggggcgcccttcgcgaggagggaaacccctccgcggtgcttgatgcccccttaacactttccctgtctctccttatcgggcgaccttgattctgagcccggaacagctgcagccatgcgaagcgacgggagcatttttcaggggaaggcgcttgctcctccacgttcttgccccgtaggaacagtgacgatggcaaagcttaccgctttcctcgcctcgggctagggcttgttccgccgccctttcctgggcttctccttgctctcttatatttttcctaatgcccctttcctaccacccgccccctcccttgtggggaaaagcctgaccttgggatgtccttgaagccttggagcccgggccagccctgggatcttgaggggattggaaggaacaccccagtggcagtcagaagagctgggttctaatctcagatctggctccggggttgctgtgtggcttgaagcacagacctttcccatatctgggccctttcccacgagggtgttgggccctctgcttgattcacgatctttacattctaaaatactccggttcggttttgttttcaggcaaggtgaccccatggcaaggcgcaagccagaagggtccagcttcaacatgacccacctgtccatggctatggccttttcctttcccccagttgccagtgggcaactccaccctcagctgggcaacacccagcaccagacagagttaggaaaggtacaggggcaggcctagcaaagggaagttgggcgtaagagagagctggggaccagaagtgccccagggcctgctgggtgtggggcaggggaggtagggaacatttccctgacctccaggagaggggccctggtcatcgggagatgatgggaaaccctagctaactagtccttcccctctgtttcctgtatccaggaacttgctactaccagcaccatgccctaccaatatccagcactgaccccggagcagaagaaggagctgtctgacatcgctcaccgcatcgtggcacctggcaagggcatcctggctgcagatgagtccactggtgcgggcaggagacagaatgggtggagggtgcagggttgggagtggcaggctgatcccctaattcccatgtgacactcccagggagcattgccaagcggctgcagtccattggcaccgagaacaccgaggagaaccggcgcttctaccgccagctgctgctgacagctgacgaccgcgtgaacccctgcattgggggtgtcatcctcttccatgagacactctaccagaaggcggatgatgggcgtcccttcccccaagttatcaaatccaagggcggtgttgtgggcatcaaggtaaggggagggcctccggacgtgaggtttgagatggaagtggaggaaggaaatccaggttagtgaggcagggaatgaatgctggattggtggcctagagacttgcatggagcctgcttcaggcttagggcatttactcgacatttttaatcctcacaattctgagagaacagtatcattcccacttt

SEQ ID NO: 15783 - DNA, 2300 bp, Homo sapien
cccaaagtgctgggattacatgcttgagccaccacacctagccccggattcaaatttcagtgtaacatccccaatccactgttatacaagcaatgaacaagttatttaacccctctgagccagtttcctcctcttaaaaaaggcacaaaacttaatagaaagcaactaagaagccaggcacggtggctcaagctggtaatcccagcactttccgaggccgaggagagtggatcacctgaggtcaggagttcgagaccagcctgaccaaaatggtgaaaccccgtctctattaaaaatgcaaaaattagctgggcgtggtgacgggtgcttgtaatcccagctactcaggtggctgaggcaggagaattgcttgaacccaggaggcggaggttgcggtttgccaaaatcgctccactgcactcccgcctgggcgacaagagcaaggaaggctctgtcttaaaaaaataaataaatgaaaatacaaaaattagccaggcgtcgtggcacatgcctgtaatcccagctacttgggaggctgaggcaggagaatcgcttgaacctgggaggcggaggttgcagtgagccgagattgtgccactgcactccagtcggggtgaaaaagcaagactccgtctcaaaaaaaaaaaaaaaaaaaaaaaaagaggccgggcacggtggtacacgcctgtggtacagcactttgggaggctgaggcaggtggatcatgaggtcaggagatcgagaccatcctggctaacacggtgaaaccccgtctccactaaaaaatacaaaaaaattagccgggcctggtggcgggcgcctgtagtcccagctattcaggaggcagaggcaagagaatggcgtgaacccgggaggcggagcttgcagtgagccgagatggcgccactggactgcagcctgggcgacagagcgagagagtgagactctgtctcaaaaagaaaaacggaagcaactaagaaatgtcaagagtgccattttggaatcagagaagtcatgctgactgaggcacaggcttggcgtgggaaaagtggactccaatctgttaacttctgaagttgtccacggcaaatatttctctgacggcacaggaagagatctgaacttggcttccctcatccattgaacaagtattaacaagtatctatatatgcctaccgtgccaggccttattctaaccactggggctgcaatatttaaaaagacaaagttggatcctccaaggactgtggtggggaaggctgacaaaacaagtaacaaaaatgtgtaacattaaaaaaaaagtgtaatgttaaaaaaaaaaagtgtaataaagttacaaagcctagccccagctcggcttgtttccctagctgaaatgggggatggccgggcgcggtggctcacgcctgtaatcccagcactttgggaggcccgaggcgggaagatagcttgtgcccaggagttcgaggtcacagtgacctatgatagccccaccgactccagcctgagcgatagagcgagaccctgtctctaatttagaaaaaagaaagttgtggccgggcgcggtggctcacgcctgtaatcccagcactttgggaggccgaagggtggtggtgggtgggggcgcggatcacctgaggtagggagttagagaccagcctgaccaacatggagaaaccccgtctctattaaaaatacaaaattagcccagcgtggtagcgcatgcctgtaatcccagctactcaggaggctgaggcaggagaattgctggaacccgggaggcggaagttgcggtgagccgagttcgtgccattgcaccccggcctgggcaacagcaaaactccgtctcaaaaaaagaaaagacagttgtttaaacatttttatgaaatgatatgggaggggactggtctagggtttctaatagcctccacatcgcccagcggcagagcccacaaaactgccactggccgccaccgggttcctccacctccttcccgatctcaggctggagaagtggtgcaggggtcgctgcgaaaggagaggagcgtgtatgacgccacatccggcgcgcggcggaactggcctcctttgcttccgcggcggggccggaagtaggagcggcggcggcggcggcggcggcggtcgaaagcggagtgaaagagggaggcagggagccggagagccggaaccggagtcgcagcggcggtaatagtgcgagactcctctaagtcaccgtccttagcgcgggaccgcggggttcgacgggagttagcgggggtgcggccaggccgttggacgcc

SEQ ID NO: 15784 - DNA, 2300 bp, Homo sapien
ccctgacctgagctcgctgctgaccctgccacagattggctgtgtgtctctggacaggtggcttggccactctggacctctaccaaataaagagctggccggccaggcacagtggctcacacctgtaatcccagcactttgggaggccgaggcgggtggatcacaaggtcaggagattgagaccatcctggctaacacggtgaaaccccatctctaccaaaaatacaaaaaaaaaaaaaaaaaatcagctgggtgtggtggcgggcgcctctagtcccagctactcatgaggttgaggcaggagaattgcgtgaacccaggaggcagagccttgcagtgagcggagacagagcgagactccgtttcaaaaataataataattaataaagagctggcctaaacaagaggtcaaaaactcaagtgccaggctgggtgtggtggctcacgcctgtaatcccagcacttttgggagtctgaggcaggtggatcacctgaggtcaggagttcgagaacagcctgactaacatggtgaaaccccatctctactaaaaatacaaaaattagctcggcgtggtggtgggcgcctgtaatcccagctactcggggccaaggcagcagaatcacttgaacccgggaagcggaggttgcagtgagccgatatcgcgccgttgcacttccagcctgggcgacagagcaagactccctctcaaaaccaaacaaacaaaaaaacctcaagtgcctgcaaggccaagcagatactgtagatgtgtaaagggtagcatagattggcagggttgggagttgggggcaggctgggcaaactggagtgagcaaggcctacttatattttaatactttaaagttatttttattaaactgtctgctgtccaaacataatacatgttgtaggccaaaatggccatgaagctaccagtttgcaaaccctgaactgtgaaatcttttagccacttccctatcttctctgttggagccatcattagtacttaaaaaagtacctttgagtcagggagttctattctactctgtgtttgtgagaaatacggccctgcccctctgggccacagtttcctcatatgtaaaatggggccactcatgtccacttcccaaccccagtgccttgtggtgagactgttgctccggggatgacggtcccgcccctcctttcaggaacaggcctttgagagcagccagaagtacaaagaggggaagtacatcattgaactcaaccacatgatcaaagacaacggctgggactgacccccgctcccccgacgcatgtggctccagcccggcctggccgccagggagcgccactggcttcccgccacccgaagggagctctggaccctcagagcccctgcagaggacggatctagctcctgtatatatattttattgcatgcactgtgaccttggggggagaacagaagggggacgacgcccccgcacctcctgcgatctggctggcttggatctcgtttttaacccgttcctgccccacctgccctatagttatggcctgtgttctgctctcctggtcccagtgcaccgtctgctctgtgaactcctcccaccaggcccttcttaccccacgcgtgtctgtccccctcgttctgtagcgtttgtacataataaaacaatggagtggagacagctcaggctcgcgtgtaatccgggaagggggagctcaagcggagatttccgcccctatagacctgtgcggttctgagccccggcggggcatggggtaggcacagccgtccaagctgggtctccgggaaccgggacggtttcactgctggcggaggtcctgagcccactctggctgcctacgccgtgacctcggctgatctgcgtctgctcatctgcagcgtttggccgccgcctaggggcagcgtcccagggaggcaaccgcgccgccggcctcgcagccccctcgcggtcggactgcaactcccagcggcccccgcgtggtccgtccggctccttcgggcgcgcctcagcgctgagcctgccgggaagtgtagttccgagggttccccagcgcgggaccttcgggaaaccctggcgcgaggcgtcagaagctgtcggactgtgagcgccttcgaactttggaggcttggctcgggatggaggtttttttagcatggggaccagggaggactacggtgctcgggactgggctgcggcctcctcgcggccccgagtgccctgtgaaatcagctcaggccgcgtccctctagcctgcactttccctctgttcacgctgcttccctcca

SEQ ID NO: 15785 - DNA, 2300 bp, Homo sapien
gaaaaaaaaaaaccaaccaaccaactcagattctggtccctattctgttacttaccagttgggtgatcttgggcaagttacctaacatctctgggcctccctgtcttcttctgtagagataataatagcttctacctagaggatcactgcaatgattgaatgagataatagacgccaggcacacaacagtgcaaggcacataaacattccataaatggtgactctgattatatcctaactctctaatggggatccaagtgcctgggagagaagggatgggttaagagaaaagttctacaccccttgcaaggtgcaagataaagagaatgtggtcagggatgctgacttgtgtgagctcggcctatgcaatctgaaaggctatagggtgacagcttgtcaggaggaggtgttggaaggtcaggtcaaaggctagcctggggtcagaggtgggtgactcacatatttccagcccaaagtggtcttgcagttctcgcagtggatgtcggcgacagcatggaggccggtcagcagcacccgctcctcggctggcccgcagcccacgttcaccctgtggggacatggggtagtcccagggagggtcctgccatcacagggcccaccccctcaagcactgtgtctgtcctcagcatccaagaaatgatgctcacaatttcctgcctgcaccggggaactctgggagtctcagcaggatgccaggggtcacaggtcacaacagaggtcagggaaagcaagaagggaggccagatactcacactgagttgaagaggtaggcacgcccctgactgccctggaaggactaaagggtgagagggtgggaagagaggagggggtcagggctgccggtggggagctgccaggcagcccctataggttccagccccactgtggcctggttggttaccttggagatgaggtcgtcgtggttggccaggtgagcgcggcagtgggcacagctatacctccggtgacaatcatccaagtaggcctgaaacgtcttgggctttgaaatccgcaccatggcgggggccgggggcagtggccccacgcggggagcggcccacggggagcagagggagcccagtgcctgccggggagggagtaggtgggctgtcaggacctgggccacacacatgcgaggcactcccagagccgtggggactcgctctgtcacactgggctgctctctcctttccccagagccagcagcctctccggggaccagaggcgtctcggttttgactcagtgaggaggcctcaggttgcatccatggggaaactgaggctcggaggtgcccagggtgagtcacccgcctgcttccggcctcacccttgctgacctggcagctgaagctggaggaaggggctttggaggggctgggctgtcagttcccagtttcgggggagcatgggcgggtaggcactggttggtccttgcgacctcatctggagagcagtggggttcactggtggtttagggggttcatcggggagagggtcccccacctggaggaggtaggaggcctcgccgtgaaggttgagggtcacctaggaggggaggggctctcacctgcgggcgccaaggcctcctctacgctcaggggctcttacctgcaacgcggagccttacctggactccggggctcacctggggcgcgggggtgggggcgggcgccgggggagggggcagtcctcgcgggctgggcaggggcgcggggcgacacgcagccctgacggcgcgggcctcacctcgcctgggcgcgcggggcccggtccgccggggtgggctggcctgggagtggggggcgctcctggcgggcgccgtcccccccgggcccgggttcgcaggcgcctggacttgtttacaccgagcccagctgctgccgccgctgcggcgggagggggaggggacccgcctcctgtcccggcggccgccgtggccaatgggcgctccgcatgcaaatgagggggcgcgtcacacggcggccggcgcaggccccgaccgcccctcccccgccgcccgctcccgccggcccggaaatgcggctgcggcccgcgcgccccaggcctgctcgcattcctgcttgtggcccgcgcaggggcggggtcggaaggtctaggccgggcgcggagcgaggaagcgggtggcgctgggacgcatgctctgggggagatgagtataatgacccgcgtttgtccgccgcccgtgccccgctcaatccccgcatcaatcccgtgaggccgtttctcccgttggctccactgtaccgggggctgaggcc

SEQ ID NO: 15786 - DNA, 2300 bp, Homo sapien
atccaagaaatgatgctcacaatttcctgcctgcaccggggaactctgggagtctcagcaggatgccaggggtcacaggtcacaacagaggtcagggaaagcaagaagggaggccagatactcacactgagttgaagaggtaggcacgcccctgactgccctggaaggactaaagggtgagagggtgggaagagaggagggggtcagggctgccggtggggagctgccaggcagcccctataggttccagccccactgtggcctggttggttaccttggagatgaggtcgtcgtggttggccaggtgagcgcggcagtgggcacagctatacctccggtgacaatcatccaagtaggcctgaaacgtcttgggctttgaaatccgcaccatggcgggggccgggggcagtggccccacgcggggagcggcccacggggagcagagggagcccagtgcctgccggggagggagtaggtgggctgtcaggacctgggccacacacatgcgaggcactcccagagccgtggggactcgctctgtcacactgggctgctctctcctttccccagagccagcagcctctccggggaccagaggcgtctcggttttgactcagtgaggaggcctcaggttgcatccatggggaaactgaggctcggaggtgcccagggtgagtcacccgcctgcttccggcctcacccttgctgacctggcagctgaagctggaggaaggggctttggaggggctgggctgtcagttcccagtttcgggggagcatgggcgggtaggcactggttggtccttgcgacctcatctggagagcagtggggttcactggtggtttagggggttcatcggggagagggtcccccacctggaggaggtaggaggcctcgccgtgaaggttgagggtcacctaggaggggaggggctctcacctgcgggcgccaaggcctcctctacgctcaggggctcttacctgcaacgcggagccttacctggactccggggctcacctggggcgcgggggtgggggcgggcgccgggggagggggcagtcctcgcgggctgggcaggggcgcggggcgacacgcagccctgacggcgcgggcctcacctcgcctgggcgcgcggggcccggtccgccggggtgggctggcctgggagtggggggcgctcctggcgggcgccgtcccccccgggcccgggttcgcaggcgcctggacttgtttacaccgagcccagctgctgccgccgctgcggcgggagggggaggggacccgcctcctgtcccggcggccgccgtggccaatgggcgctccgcatgcaaatgagggggcgcgtcacacggcggccggcgcaggccccgaccgcccctcccccgccgcccgctcccgccggcccggaaatgcggctgcggcccgcgcgccccaggcctgctcgcattcctgcttgtggcccgcgcaggggcggggtcggaaggtctaggccgggcgcggagcgaggaagcgggtggcgctgggacgcatgctctgggggagatgagtataatgacccgcgtttgtccgccgcccgtgccccgctcaatccccgcatcaatcccgtgaggccgtttctcccgttggctccactgtaccgggggctgaggcccagggaggtctcgcggctccctaggttatccagctagtaagaggcgaagctggaattctcactgtgggcccattccatggcttttgccagagcgccagggacacactcagttcaccttctagcagggaagacccaaagatgcgcgcccctggcagccagggcgtcggaccaggcaattcctactgtccagcatcacctcctccaggcctctcggatgcctctgttgggacagctaagttcctcttcaaagactcaatttcctggtcataagctgtaaacagattctactcccgctttttcttctttgtcgcacgtctaccctatttgggaaagtttaaaccttagccaatcgggatcagctcagattgtgcggtccaaccccccagccaatggggaaaggacacagaaacaggaactgcgttagggttaaaaaccacttccctcctttgttggcgggtgctcttgggattgcaaccagcgcaagcagcacccttctgcagaagtaaagatgccttgctgggaagtcttctgtctcagtgctggtttttcttgactacactgagcacttgttttcaacaaatttgagggtcttctgggatcccattctcctttgggaggggtagcgattacttttcctcgtgagacacg

SEQ ID NO: 15787 - DNA, 2300 bp, Homo sapien
ttggaggtttcttgcactcatatgaataatcgcttcgtactttttggccgcttccctcgtgggaatttcaggcccctcttagcattagcgggtcggtataatccccgactggaaaaccgccctaagccttatgaggtgaccatggaaccaagtctggactccacactcgattcgtgtccactgacatgtctcagccatgcactttcaacctccaagtgaccccaaccaccaaggaaatactttgtcgccccagtagcaacttttcttaccttggtctgtgcacagagttacccacttgcctgggaattttaaggctccttcctgcccacgttgctgaaagtccggatttattcctcactttgggtggacccgatcctccgctccttgggccactgcaacaaggcagtgggacgtgtctcacgaggaaaagtaatcgctacccctcccaaaggagaatgggatcccagaagaccctcaaatttgttgaaaacaagtgctcagtgtagtcaagaaaaaccagcactgagacagaagacttcccagcaaggcatctttacttctgcagaagggtgctgcttgcgctggttgcaatcccaagagcacccgccaacaaaggagggaagtggtttttaaccctaacgcagttcctgtttctgtgtcctttccccattggctggggggttggaccgcacaatctgagctgatcccgattggctaaggtttaaactttcccaaatagggtagacgtgcgacaaagaagaaaaagcgggagtagaatctgtttacagcttatgaccaggaaattgagtctttgaagaggaacttagctgtcccaacagaggcatccgagaggcctggaggaggtgatgctggacagtaggaattgcctggtccgacgccctggctgccaggggcgcgcatctttgggtcttccctgctagaaggtgaactgagtgtgtccctggcgctctggcaaaagccatggaatgggcccacagtgagaattccagcttcgcctcttactagctggataacctagggagccgcgagacctccctgggcctcagcccccggtacagtggagccaacgggagaaacggcctcacgggattgatgcggggattgagcggggcacgggcggcggacaaacgcgggtcattatactcatctcccccagagcatgcgtcccagcgccacccgcttcctcgctccgcgcccggcctagaccttccgaccccgcccctgcgcgggccacaagcaggaatgcgagcaggcctggggcgcgcgggccgcagccgcatttccgggccggcgggagcgggcggcgggggaggggcggtcggggcctgcgccggccgccgtgtgacgcgccccctcatttgcatgcggagcgcccattggccacggcggccgccgggacaggaggcgggtcccctccccctcccgccgcagcggcggcagcagctgggctcggtgtaaacaagtccaggcgcctgcgaacccgggcccgggggggacggcgcccgccaggagcgccccccactcccaggccagcccaccccggcggaccgggccccgcgcgcccaggcgaggtgaggcccgcgccgtcagggctgcgtgtcgccccgcgcccctgcccagcccgcgaggactgccccctcccccggcgcccgcccccacccccgcgccccaggtgagccccggagtccaggtaaggctccgcgttgcaggtaagagcccctgagcgtagaggaggccttggcgcccgcaggtgagagcccctcccctcctaggtgaccctcaaccttcacggcgaggcctcctacctcctccaggtgggggaccctctccccgatgaaccccctaaaccaccagtgaaccccactgctctccagatgaggtcgcaaggaccaaccagtgcctacccgcccatgctcccccgaaactgggaactgacagcccagcccctccaaagccccttcctccagcttcagctgccaggtcagcaagggtgaggccggaagcaggcgggtgactcaccctgggcacctccgagcctcagtttccccatggatgcaacctgaggcctcctcactgagtcaaaaccgagacgcctctggtccccggagaggctgctggctctggggaaaggagagagcagcccagtgtgacagagcgagtccccacggctctgggagtgcctcgcatgtgtgtggcccaggtcctgacagcccacctactccctccccggcaggcactgggctccctctgctccccgtgggccgctccccgcgtggggc

SEQ ID NO: 15788 - DNA, 2300 bp, Homo sapien
ctgaatatccctccggcattgttccatctcgtgctggagttttcctgaggaaaggacatgttcgggtggctgctcaatggggatgtggggccacaaggcccacagggcagggttatgtgggggagggactgagtgattagcctgaggtggggtaggcgggggaagatggtctaggggatcctatacattggcatctttagatgtagaatctgacttaactgggttgtcctaggagggtactgagtttggtttctcttttacgtcatcctttaagggaaagggaaggacatgttcctgtctccaacacagagcataatctatttcctcttgagagactggactttttttattaacatactggattaagagttggcatatccaatcctcgtctgatccaaactttggccaaaagactgagggtctgaggataggttctttggtccaaataaaacagcaatattttatcattcactgtctttccttgtgttacatggttctttcattatacctccagtactctaacataaggcccagaggactgtcagggggaattttattgtctgcttggccttttgtactccctgtcttacttggggtatttcccattctggaggttggtgcccatttcctaggggcttaacctctcccttttcccattggaggtttcttgcactcatatgaataatcgcttcgtactttttggccgcttccctcgtgggaatttcaggcccctcttagcattagcgggtcggtataatccccgactggaaaaccgccctaagccttatgaggtgaccatggaaccaagtctggactccacactcgattcgtgtccactgacatgtctcagccatgcactttcaacctccaagtgaccccaaccaccaaggaaatactttgtcgccccagtagcaacttttcttaccttggtctgtgcacagagttacccacttgcctgggaattttaaggctccttcctgcccacgttgctgaaagtccggatttattcctcactttgggtggacccgatcctccgctccttgggccactgcaacaaggcagtgggacgtgtctcacgaggaaaagtaatcgctacccctcccaaaggagaatgggatcccagaagaccctcaaatttgttgaaaacaagtgctcagtgtagtcaagaaaaaccagcactgagacagaagacttcccagcaaggcatctttacttctgcagaagggtgctgcttgcgctggttgcaatcccaagagcacccgccaacaaaggagggaagtggtttttaaccctaacgcagttcctgtttctgtgtcctttccccattggctggggggttggaccgcacaatctgagctgatcccgattggctaaggtttaaactttcccaaatagggtagacgtgcgacaaagaagaaaaagcgggagtagaatctgtttacagcttatgaccaggaaattgagtctttgaagaggaacttagctgtcccaacagaggcatccgagaggcctggaggaggtgatgctggacagtaggaattgcctggtccgacgccctggctgccaggggcgcgcatctttgggtcttccctgctagaaggtgaactgagtgtgtccctggcgctctggcaaaagccatggaatgggcccacagtgagaattccagcttcgcctcttactagctggataacctagggagccgcgagacctccctgggcctcagcccccggtacagtggagccaacgggagaaacggcctcacgggattgatgcggggattgagcggggcacgggcggcggacaaacgcgggtcattatactcatctcccccagagcatgcgtcccagcgccacccgcttcctcgctccgcgcccggcctagaccttccgaccccgcccctgcgcgggccacaagcaggaatgcgagcaggcctggggcgcgcgggccgcagccgcatttccgggccggcgggagcgggcggcgggggaggggcggtcggggcctgcgccggccgccgtgtgacgcgccccctcatttgcatgcggagcgcccattggccacggcggccgccgggacaggaggcgggtcccctccccctcccgccgcagcggcggcagcagctgggctcggtgtaaacaagtccaggcgcctgcgaacccgggcccgggggggacggcgcccgccaggagcgccccccactcccaggccagcccaccccggcggaccgggccccgcgcgcccaggcgaggtgaggcccgcgccgtcagggctgcgtgtcgccccgcgcccctgcccagccc

SEQ ID NO: 15789 - DNA, 2300 bp, Homo sapien
atctccttctaggaacagaactggcaaagaggcaagaggtcactgagggcctctgtcacccaggtgaggacctgagccaagcttcagctctgggtgtggcagaagcaggtggggccatgattgctttgggaggggcccagcagcgcccagcctgacccagattgccaggcctcctcacacctgctgccagatcagcagttcacatagctgtggggaccccactggcctgcccccacccacgctgcctccttgcctcctccggtctcttcctgtcttcagccaggtgtggcctgatagaaagaaggcatgcgcacctgggctcaaactccagctgtgccacttagtaagtgctgtgtgatattgggcaaggcacctcacctctcggcgcctcagtttccggagtcaatctatttatctttttttttggttttgtttttttgagacagtgtctcgctctgtcacccaggctggaatgcagtggtgcaatcatagctcactgcagcctcaaaactcctgggtgcaagggatcctcccagctagctggacgagccattgcaaccggctaattttttttttttttttttgtggagctggggtcttgctatgttgcccaggccagtctcaaactcctgggctcaagcgatccaccacctcagcttctcaaagtgctgggattataggcgtgagccactgtgcccggccgagacagttctaataatgaaagcataaagccctaagcattgttctaagaggtttacatgtattaattcctttaatcttacagcagtacctcaagctaggtactattattatctccatttacagataaggaaactgagacccagcctatccagctgtgagggtgaaatgagagatgttgaggtcagggctccagtgggtctgcccggggggtgctaacgactcctcttctgcctgcttctctctttaggacctgcctcctgcctgcccctctcccgccagactgttagaaaatggacactgtgcccagcccggaccttggcagcccaggccggggtggagcatgggcctggccacctctctcctttgctgaggcctccagcttcaggcaggccaaggccttctcctccccacccgccctccccacggggcctcgggacctcaggtggccccagttcaatctcccgctgctgctgctgcgcccttaccttccccagcgtcccagtctctggcagttctggaatggaagggttctggctgccccaacctgctgaagggcagaggtggagggtggggggcgctgagtagggactcagggccatgcctgcccccctcatctcattcaaaccccaccctagtttccctgaaggaacattccttagtctcaagggctagcatccctgaggagccaggccgggccgaatcccctccctgtcaaagctgtcacttcgcgtgccctcgctgcttctgtgtgtggtgagcagaagtggagctggggggcgtggagagcccggcgcccctgccacctccctgacccgtctaatatataaatatagagatgtgtctatggctgaccctggctctgtctgtgttcgcgacgcccccgccctgccccgtgcggctctgaggacagacttgacttgggctttcaggggcctggtgcccttcactcccagctgcccagggctggggacggggctctggagagctccagactcctagaaagaagggggtcagttttccccttagtcactgtcctgtcctctcgctaatggcttcctgtctaactggctgggggtgattcggggtgactcaggagcaccctacacacccctggatcctctgaaatggcaaggggtaggcatgttggatgcgctggctacaagtaccagtgagagggagaggtcctgacagtcctgggtggtttttactcccctcatgtagcccaggacggggctgctgggggctgggaagggcctggggatatgagagccagggctacttgcctcacctcctgacactaccccagcttcagccgaaccctgcagcctggctccaagccagcccagcggcaggctcagcaggtcccaggggcgtggcagtggccagtagtagagccggcccacactggctaggcaggcagcacagtcccgcggacggctgagcgtgtggctgcaggagcttctgtgggagtacggtcatgagccttttgctgtactatgccctccctgccctgggcagctatgccatgctctccatcttcttcctgcgccggcctcatctgctgcacacgcccagggctcccaccttccgcatccgcc

SEQ ID NO: 15790 - DNA, 2300 bp, Homo sapien
catgagttcaagacctgcctgggcaacagagcaagagcccatctccacaaaaagaaaacaaacaaacaaacaaaaaaacattatttcccctacataccagatgagaaagttgaggcacagacaggttgagatcctaaagccagtgagtagtagagaggagatttcagacatccatgggttaactccagagttgctgctctttttgtaggtttttttttttttttaatttatttatttttgagacagagtctcactctgtcatccgggctgcagtgcagtgacacaatcttggctcactgcaacatctgcctcctgggttcaagtgattctcgtgctgcagcctcctgagtagctgggattacaggcacatgccgccgtgcccagttaattttgctatttttagtagagacagggttttgccatgttgcccaggctggtggtctcaaactcctggcctcaagcagtcctcccgcctcagcctcccaaagtgctgggattacaggtgtgagccaccactcctggcccaagttgctgctcttaactgtgaagttctcctgcctcccacagtttattattatccccgtttccccggtagggaaactgaggcctcagaaatgaagccccttgctcaggatcagcaactgtgatgcaacagaggctcagagccctgccgctgggtaatggcagcagcttccccagctggtggtgcaggttggcagatctattgagtcccaggggccctggctggaggaggtgtgcagcctcgccttcagagcctgttttccttaaccaagtgcctcccactgccccctgcctgggggggtctgcggaaccatcctcagctacattgtgcaggacctgatggagactgacctgtacaagttgctgaaaagccagcagctgagcaatgaccatatctgctacttcctctaccagatcctgcggggcctcaagtacatccactccgccaacgtgctccaccgagatctaaagccctccaacctgctcatcaacaccacctgcgaccttaaggtcagagggttgggcacctgtcccctcctcccccagggtctggggcttccagtgaccagtagaagaagccttgggcaggagaacattgcaagcaaagggaacagtggaggcaaagacaagggggcgtgactgcttaggctgcagaggccttgagcgccgagcttagcagctaggtctgattccagatttgtgatttcggcctggcccggattgccgatcctgagcatgaccacaccggcttcctgacggagtatgtggctacgcgctggtaccgggccccagagatcatgctgaactccaaggtaggaggggctgcccactcctgaaaggaacggaccagttcccaggaagccctggagctacctctgagccagacactgacccccatgacacaggaattctaccctctgggccttgggctctgcaaggaagctgagcattgagccctccaggcctctgccttctgcctggtgttggatctaacttggaggtggtggcctggcgcagacaacaggaccctgttgaggctggcccaggagctcaccacttcctcctctcccccagggctataccaagtccatcgacatctggtctgtgggctgcattctggctgagatgctctctaaccggcccatcttccctggcaagcactacctggatcagctcaaccacattctgggtgagggaggcccggctggctgagttggggatgattagcttttccgaggtgagatttctcgagagtccaagtcagggataccaccacgtgtggggtgcctccagcatctcatggtatctcaatgaggtatagatattatccccattggatagatgggaaaagcaaggctaagtcccacacctgaggaggcaccagacctaggatttgagcctcggtctgcctgaacccagcccccttgctctgcaccaccatgctaatgactaggaggtgactgagggattggcatgggttgctgggctggggggtcttgttcttgccttgttgcctattctgttcccagaaagaaagaggtgatcatttaccaagtcacctccttatccacaggcatcctgggctccccatcccaggaggacctgaattgtatcatcaacatgaaggcccgaaactacctacagtctctgccctccaagaccaaggtggcttgggccaagcttttccccaagtcagactccaaaggttcgagagacatgagggtgggtgtgggataaaccttgggtgtcgtggagggtgtgtgagcccagcagccgct

SEQ ID NO: 15791 - DNA, 2300 bp, Homo sapien
ccaggctggagtgcagtggcaccatcagagctcactgcaacctcaacatcctgggctcaactgatcctcctgcctcagcctcccaagtagctgggattacggacgcatgccaccacacccagctcatttttgtatttttggtagagatgggatctcactatgttgcccaggctggtctccagctgctggggtcaagcaatcagcctgcctcagcctcccaaagtgctggaatcacagaggtgagccaccacgaccagccagcatcattttccagttaaatgttaatagtatctacttcatatggctgctgtgaggattacaggaggtagtgtacataaaagtgcctggcaagccaggtgccgtaatctcagcactctgggaggccaatgtgggtggatcacctgaggtcaagagtttgagaccagcctggccaacatggtgaaacctcgtctctactaaaaatacaaaaattagccgggcgtggtggctggcgcctgtaatcctagctacttgggaggctgaggtgggagaatgacttgaacccaggaggtaggggttgcagtgagcttgcactcctgcctgggtgatagagcaagactccgtctcaaaaaaacaaacaaacaaacaaacaaaaaaaaaccaaaagtgcctggcacagaagagatggtaagtctacattagttgaatatgcgtctatgaaccagaacaaatcccagtccagtcctccaaggaaatgccaacctcagtcactagaggggaatctcagtcacactctaactgagcttccagcagcaggaggtggcagcttgcagctctgatacaccagcctttcctatgctgggaaactcactcccactcagcaaacctggctccatgctgaactccatagtgttttctctgagtcactatattctcccgcagttgcaaaatgatctggcaaaagtccctctagggtttttactgcttactgagtaacatccaaactccttgccagaatccagagccttcctaatctggccccaacctacctctccaggctgaaacctcatcatttttttactgcagccatgctggacaagttatgcttctgcctttatgcctcagctcaccccgatccttctccttcatgcctttcttcagtccctaccttctgcaaccctactttttctcttcttctttttgttttttgtttttgagacggagtgttgctctgtcgcccaggctggagtgaagtggtgcaatctcagctcactgcaacctcctcctctcgggttcaagcgattctcctgcctcagtctcccaagtagcttggattacaggcacgtgccaccatgcccagctaatttttgtatttttagtagagacggggtttcaccatgttggtcaggctggtctcaaactcaggtgatctgcccacctcggcctcccaaagtgctgggattacaggcgtgagccaccgtgcccagccccccaatttttttttttaattagcagggcgtggtggcgcgcactcgtagtcccagctctttgggaggctgaggtgggaggatcacttgaccccagggaggttgaggctgcagtgagcaattattgcaccactacactccagcctggacgacagagagagaccctgtctctataataaaataaaaacagtctaggactctgagaggcatggaattagaaagagtctctgtgtcagaagacaccattttgagtctcagctgtcactactagtgaccttacccaagttagtaaacctaactctcagattctccatctgtaaaatttgatccatttattagaacattatttttaacctagggtgatcccgggcccaggttctggtgggctgccgcatacattggctgggtggctctggtaggtcacgccctggccgcttcgccatcgaggggagggtgaggacagtctccgaggcggcgctgccgaacctcccggtgacctggaggccgcggagcccgcagggacccatggcccccgaacctggggcaagaagggcgggcgcgcgcggggcgggtcacgtgacagctccaggcccacgcggggccggggcaagggcggggcctggcgcgcgcggccctgcgggtgacaggcaggcgggaaggggcggggcctcgggcggggccgccgtggggaggagggcggtgggaggggaggagtggagatggcggcggcggcggctcaggggggcgggggcggggagccccgtagaaccgagggggtcggcccgggggtcccgggggaggtggagatggtgaaggggcagccgttcgacgtgg

SEQ ID NO: 15792 - DNA, 2300 bp, Homo sapien
tagctgggactacaggcgcacaccaccatgcccagctaatttttttttttttgagacggagtttcactcttgttgcccaggctggagtgcaatagtgccatctcagctcactgcaacctccgcctcccaggttcaagcaattctcctgcctcagcctccagagtagttgggattacaagcatgcaccaccatgcccgggtaatttttttttttttttttttttgagatggagtctcgctctgtcacccaggctggagtgtagtgccacgatctcggctcactgcaacctccgcctcctgggttcacaccattctcctgcctcagcctcccaagtagctgggactacaggcgcctgccaccatgcctggctaattttttgtatttttagtagagagggggtttcaccatgttagccaggatggtctccatctcctgacctcgtgatctgcccgccttggcctcccaaagtgctgggattacaggcgtgaggcactgcgcccggccagagcctcataactttgtgaggtgggcagttcaaatcttattaattccccatttaccaatgacaaaatgaggttcagagagattagccctcttggccaagatcgcacagccagtcagtggcagaggtgggacttgaacccgtcccttgctgttccttgaacttctccacacgacagggctgtccctcagcctacaggtcacccctctagccttgcctgttggctcttcctaatcctttcaggcccagcccagatactttttaaacaagaatgatgagagctaactttttttaaaatgagacggtcttgctctttcacccagagaagactgggtgataacagtggctcaatcttggctcactgcagcctctgcctccagggttcaagctattctcatgccttagcctcctcagtagctgggattacaggggtgcatcactacaccacgctaatttttgtatttttagtagagatgcggttttaccatgttggccaggctggtctcgaactcctgacctcaggtgatccgccagccttggcctcccaaagtgctgggattacaggcgtgagtcactacgcatggctgagagctaacgtttattaagcacccgccactttctagatgaggtccttactgacttccttgggttattttaggtaatcatccccatacctcttacgtggcaggtatgactgttacagagggagaaaccgaggctgagaaaggctaagtagcggccacacctcactcagcaggtgacaggctgcggtcgcactcatgacatagtctgactctagagcaggcctttcctgcccgctgttgctgcctccagaagcctctctgaatccaagggtgggaactattcctccttgccctcgagccttcgccaaagccagggcttggagcggccgtgggctcctcctccttcccccaggctgggctcttcaggggcggaaacctgcctggcttgcctgccttgctcgaccctgtagcccctggcacgaagtaggtgcccgtgatgccggattatttcagcaggagggcaggggtgttcccgatgaagccaggagatccagggaggagaagcgactcccggggccacccatgcttagatctcagagccaggcaagagccaggtcccgggggtccaggagcgcgctcggggctcctcctcgcccgcgccccccgcgcccctcgcgccccccgcgccccccgcgccccctgcgctcgcgtctgcggggccgggaggaaggggcggcgcagccgggccggggcgggcaccgaggcctggcgggcgggcctggggcgctttcgtgcctgccagggaaaggctggcgaggaggctgggggcggacgcagggaggaaagaagcaatggggtgctcttgcgttttgacattttaaaaagaagtttagattcgcttcccggagccgggatggcagcctgcgctatggttggggaccaacgtggtgcacgggcaggggccggggagagaggcggccgcagcgggagcccgggagcgcagggcgggcctggaagagctccgccccaaggggcgcggccaccccggaggcgggcgcacggctgcttctcattcattgtcttgacaagagcatcttcagcgggcgagtccccggctcctccagctccttcctcctcttcctcctcctcctccacctccggcttttgggggatcactgtcctctctcggcagcaggtgaggctgggcctgggaggcgcgggtgggccggggcgagggccacctgtggggcggcgcgcgcgtgggagccgcgggc

SEQ ID NO: 15793 - DNA, 2300 bp, Homo sapien
cccagccagcgccggggccaggtagcgggcgcagcagcccgtggggggacgctgcttggagtgggggccgccggggccccagagcgctctgcggaggcgagggctagggaccaccgcggccaagatggaggtgggtggccgggggtcagcacagtgtcgagggcccgactccccacggaattgagtctcggggagggtggggacgagggcagggtggggtgagcggggcagctgccctgggcttggagacaggaaggggttgagagcaaaacaagaaaagaccaagttcccctttccgtggtttccgggcctggtacctgtggtgggggaggaggcagggtggggcgatggcttcctgtcccccacctctggtccggggctcccctctctccagatacaggctgctcctcaagactggggctcttcacatacgctcctcaccgctctttgggcaggccgacctagcagcctcttcgggagtcctggggtggccgggggtgctggagcccccagtgagtaggcgaggctgaggctaggggcagaggctctgggcatggcaccctccaagcggcagcacaggccccttccctgagcaggaaggtgatgcggtggcacaaggtcgcccctggagttccttgctccccacccagacactgggggaaaccatcctacctggacctcagagcagtcggagtggcctctcccttcctgtgtgcagtttacatgggggtggagatggctcttaagggcacctgcttttctgagcggaggcgagaggcagaggtatggggaggaggagatacctggacctgagccagagacctgctggggaagctatcctgccgcctcactcccctcaggcagcccccacgccacttcctcctgtgtccagccccatgccagcaggcgagggaggccagctcctgtccctgcctttaggaagcgctgtgtgggtgtgagggaggtgggctctggacacggtaactaagagagaacccaccctcggagccatctgggctgatgacgcctgagtctgaaccattaggaaggacgggctctgcatccatcagccagtcagtcaacaaacatgcagtggggcaacaccacgccaggctctgttgcagaggctgagggtacagattgagagggtggctcagagtggcctggggccagggagaagggggcttgcaggttagagggaaggagaggctggggaaggcaagcaggcatcagccacagagggaagaatagggagcccctggagatgatgctgggaccttaaaagccagactgaggggtgtcctgggggaggtggggaccactggaagatcagagttgacctgaagggagaaatgctcttatgctgtgtgcccccagaatgagccggcaggtggtccgctccagcaagttccgccacgtgtttggacagccggccaaggccgaccagtgctatgaagatgtgcgcgtctcacagaccacctgggacagtggcttctgtgctgtcaaccctaagtttgtggccctgatctgtgaggccagcgggggaggggccttcctggtgctgcccctgggcaaggtgagcccctggggccctggggggagcagctcctccaccggacccatggctctgtgcaggtcctgattaggtgacggtcaccaggccttccagggcctgtgttgccatctggaaaactgagctgggccccatgagccttacacttcctccagctcctctgtgctgtggctgtgtggaaactgacgctcagaaggagccaacacaagatgggtcacaccagtgaccaggactacagacagtcctgcagacccatgatcagccctcctgagcctcagcctggggctttctccccatggaaacacagagggggttgggatggggtctgggggccctggcagcgttctcagggttgggagggactctggctctgggcctgtctgaggacctagcaactctgtcccccagctcgcaggcagggatgatgcaagaggtgctctcccccacccgcagccctgccctcccctggagcctgctgccccctccgctggctggctgctgccccgcacccccagcacactcctgtgctctttggggggtaagacaggaaggggagatgggccccaagttgttaccttaaaagggctgatggaagcaaagagaagaggaagtggttgtcggggtgagagctgggcccgcgccccacatggctgtcacacaggaagccctgctgaagcagctgtccccggaagaagccatttccaaacctctgctcctgcctggggcc

SEQ ID NO: 15794 - DNA, 2300 bp, Homo sapien
acctgcttttctgagcggaggcgagaggcagaggtatggggaggaggagatacctggacctgagccagagacctgctggggaagctatcctgccgcctcactcccctcaggcagcccccacgccacttcctcctgtgtccagccccatgccagcaggcgagggaggccagctcctgtccctgcctttaggaagcgctgtgtgggtgtgagggaggtgggctctggacacggtaactaagagagaacccaccctcggagccatctgggctgatgacgcctgagtctgaaccattaggaaggacgggctctgcatccatcagccagtcagtcaacaaacatgcagtggggcaacaccacgccaggctctgttgcagaggctgagggtacagattgagagggtggctcagagtggcctggggccagggagaagggggcttgcaggttagagggaaggagaggctggggaaggcaagcaggcatcagccacagagggaagaatagggagcccctggagatgatgctgggaccttaaaagccagactgaggggtgtcctgggggaggtggggaccactggaagatcagagttgacctgaagggagaaatgctcttatgctgtgtgcccccagaatgagccggcaggtggtccgctccagcaagttccgccacgtgtttggacagccggccaaggccgaccagtgctatgaagatgtgcgcgtctcacagaccacctgggacagtggcttctgtgctgtcaaccctaagtttgtggccctgatctgtgaggccagcgggggaggggccttcctggtgctgcccctgggcaaggtgagcccctggggccctggggggagcagctcctccaccggacccatggctctgtgcaggtcctgattaggtgacggtcaccaggccttccagggcctgtgttgccatctggaaaactgagctgggccccatgagccttacacttcctccagctcctctgtgctgtggctgtgtggaaactgacgctcagaaggagccaacacaagatgggtcacaccagtgaccaggactacagacagtcctgcagacccatgatcagccctcctgagcctcagcctggggctttctccccatggaaacacagagggggttgggatggggtctgggggccctggcagcgttctcagggttgggagggactctggctctgggcctgtctgaggacctagcaactctgtcccccagctcgcaggcagggatgatgcaagaggtgctctcccccacccgcagccctgccctcccctggagcctgctgccccctccgctggctggctgctgccccgcacccccagcacactcctgtgctctttggggggtaagacaggaaggggagatgggccccaagttgttaccttaaaagggctgatggaagcaaagagaagaggaagtggttgtcggggtgagagctgggcccgcgccccacatggctgtcacacaggaagccctgctgaagcagctgtccccggaagaagccatttccaaacctctgctcctgcctggggccagttgggacaggctccctggcccctctccttttgggaggacccacccctgcagccccaccactcacactcgctctctggggagctgcctccacccccccagcccccatacacctgtcctggctccagggccagttgtgcccatggaagcctcactcggggaagctggggtgggggtgccaaccctaagggcagagacagactgagacagagaccggcgggaactctgccagggtcttgcacggcccccaacctctgccatgcgtggccagccctcctggggtttgcccaggccattttgggactggaacaagagaagaacaacccgcccccgtccccaccccaggccctggtccagctcccagggacaccacagctttcctctctgggcctctctgaaggaggtgtggggaggttggattgggtttgggaggcaaaagcacctccaaggccctgctgtgcctttagactggacgtgtggacaagaatgcgcccacggtctgtggccacacagcccctgtgctagacatcgcctggtgcccgcacaatgacaacgtcattgccagtggctccgaggactgcacagtcatggtgagtggtggtggggacccaggggctgggagaggggctctaggatgggatctgacatttggagtcctgaagactcactggcccctcctctgcaggtgtgggagatcccagatgggggcctgatgctgcccctgcgggagcccgtcgtcaccctggagggc

SEQ ID NO: 15795 - DNA, 2300 bp, Homo sapien; identical to SEQ ID NO: 15714

SEQ ID NO: 15796 - DNA, 2300 bp, Homo sapien; identical to SEQ ID NO: 15715

SEQ ID NO: 15797 - DNA, 2300 bp, Homo sapien
tcttctgctaggcacgcgttcaccagcctggggcgagagatggggttaggaaaaggccagcggtgatcgcacaccccgaggctagggtgacccaagagactggtgtccccaaggttgtagtccccaggccgtgggaacacgtacttggagagagggtctacatcgaaatactcgaagcaggggtcacgaaggcgggatcctcaaggtccctgagccacgccagggggagtgcgggagtcaggttgcaggggtagggggagtggctggggttgtggtacaggagctaggcaaggtgctcccagggccttacctgtgtctctgaagcagcggtttcccctcgaacttggccgacaccaccaggactcggaagctacaggagcaacggttgagggtcgtgtcctccacctcctaccgagcggaagaatatgaatggtgccgaacccgccccccgagctcttttccccttgtccggcggctcaactcaccacatgctccgcctccaggtcccgctgcagcttctcgcggaggtattcggcgctgagttccatggcggcagtccagctggaacggcagcccagcagggacacaaccccagctcgggcgccggccacgctaccttgctgccttacaggagccacttccgctggaaaactcacttccgcccttactaaggcgtacgtcaacgcagtacttccgccctcaagcagccgggctttccagcggtccaggcttttcgcgcttgccatgtgtcagccaatcagagcctgaggaaggtgggactcgggcggagccgatgctgaatggtacgcgctcgccgactggacagcagtctggcttccgcggtcggacttctacacccgcctccagacaggagaggggcacgtaccggcgctacggcttcctgcaggctgcctccggatagtccccgagagcttgttccgaagcaagcaccctgcagccctagcgatccagccctcccctggaccctaggtcacggcaatcaaccccctgctgtggttcccgaaccccaaggcccgatgggtcccgcgggggtcgcggcgaggccagggcgctttttcggcgtctacctgctctactgcctgaacccccggtaccggggccgcgtctacgtggggttcactgtcaacactgctcgtcgggtccagcagcacaatgggggccgcaaaaaaggcggggcctggcggaccagcgggcgagggccctggtgagagggggaggccttctgtgccgggaggaaggcgtcccagaggaggcggaccccgcggggcacaggcctgttgagaaggaccggccaggactgtgacagaggcggggcgtctgtggtggggacggggcctgtcgcaggggaggagcgtgacggggaggcggtgcccggggcatctccgcggcggaactcagggaaggagctagctggggcgggggtgatgatccaggctgggttccagcatagggctcttggtgggcacgctggggtcgggtggaatgcaggagagagaggaggtgggacaggtgggtacctgggctggaggcagggcctgaggtgggcaggtgcagagggctgcacttctcggctgaagccgggaatgaggaccccgctctcgggtgggattggaggggacccgcggctgaggcgctgggctgcgacagggacatcaccgttctcctcctcagggagatggtgctcgtcgtgcacggcttcccgtcctccgtggccgcccttcgggtaaggaaggagaccgggcagcggcggccgggtgagggcttgggttccgcccctcgctccgagccgccctgatgcccctgtacgccgcccgcagtttgagtgggcttggcagcacccgcacgcctcgcgccgcctggcgcacgtggggcctcgcctgcgaggagagacagccttcgctttccacctgcgcgtgctggcgcacatgctgcgcgcaccgccctgggctcgcctcccgctcacgctgcgctgggtgcgcccagacctccgccaggacctctgcctcccgccgccgccgcacgtgcctctggccttcgggcctccaccgccccaggccccggccccaaggcgccgcgcaggtccctttgatgacgcggagcctgagccagaccagggggatccaggggcctgctgctccctgtgcgcccagaccatccaggtgaggtccccccgaggaatggatggctctagagtccagacgacttcggatccagctctttcttgagggaaacccactgacacgctttggccaccctatccccatctctaagatgctgat

SEQ ID NO: 15798 - DNA, 2300 bp, Homo sapien
aaaaaaaaaaagggccgggcgcggtggctcatgcctgtaatcccagcactttgggaggctgaggcgggcggatcacgaggctaggacatcgagaccatcctggctaacacggtgaaaccccgtctctactaaaaatacaaaaaattaaccaggcgtggtggcgggcgcctgtagtcccagctactcgggaggctgaggcaggagaatggcgtgaacccaggaggcggagcttgcagtgagcagagatcgcgccactgcactctagcctgggcgacagagctagactccatctcaaaaaaaaaaaaaaaaaaaagagggtcatgctctgtcgaccacactggagtgcagcggagtactgatggcctagggaagaaccttttctttgaaggggaaatggtgaaggccctgagcagggcctgctttgctcaggaatggccgtaagtcctatagcatcagcatcttagagatggggatagggtggccaaagcgtgtcagtgggtttccctcaagaaagagctggatccgaagtcgtctggactctagagccatccattcctcggggggacctcacctggatggtctgggcgcacagggagcagcaggcccctggatccccctggtctggctcaggctccgcgtcatcaaagggacctgcgcggcgccttggggccggggcctggggcggtggaggcccgaaggccagaggcacgtgcggcggcggcgggaggcagaggtcctggcggaggtctgggcgcacccagcgcagcgtgagcgggaggcgagcccagggcggtgcgcgcagcatgtgcgccagcacgcgcaggtggaaagcgaaggctgtctctcctcgcaggcgaggccccacgtgcgccaggcggcgcgaggcgtgcgggtgctgccaagcccactcaaactgcgggcggcgtacaggggcatcagggcggctcggagcgaggggcggaacccaagccctcacccggccgccgctgcccggtctccttccttacccgaagggcggccacggaggacgggaagccgtgcacgacgagcaccatctccctgaggaggagaacggtgatgtccctgtcgcagcccagcgcctcagccgcgggtcccctccaatcccacccgagagcggggtcctcattcccggcttcagccgagaagtgcagccctctgcacctgcccacctcaggccctgcctccagcccaggtacccacctgtcccacctcctctctctcctgcattccacccgaccccagcgtgcccaccaagagccctatgctggaacccagcctggatcatcacccccgccccagctagctccttccctgagttccgccgcggagatgccccgggcaccgcctccccgtcacgctcctcccctgcgacaggccccgtccccaccacagacgccccgcctctgtcacagtcctggccggtccttctcaacaggcctgtgccccgcggggtccgcctcctctgggacgccttcctcccggcacagaaggcctccccctctcaccagggccctcgcccgctggtccgccaggccccgccttttttgcggcccccattgtgctgctggacccgacgagcagtgttgacagtgaaccccacgtagacgcggccccggtaccgggggttcaggcagtagagcaggtagacgccgaaaaagcgccctggcctcgccgcgacccccgcgggacccatcgggccttggggttcgggaaccacagcagggggttgattgccgtgacctagggtccaggggagggctggatcgctagggctgcagggtgcttgcttcggaacaagctctcggggactatccggaggcagcctgcaggaagccgtagcgccggtacgtgcccctctcctgtctggaggcgggtgtagaagtccgaccgcggaagccagactgctgtccagtcggcgagcgcgtaccattcagcatcggctccgcccgagtcccaccttcctcaggctctgattggctgacacatggcaagcgcgaaaagcctggaccgctggaaagcccggctgcttgagggcggaagtactgcgttgacgtacgccttagtaagggcggaagtgagttttccagcggaagtggctcctgtaaggcagcaaggtagcgtggccggcgcccgagctggggttgtgtccctgctgggctgccgttccagctggactgccgccatggaactcagcgccgaatacctccgcgagaagctgcagcgggacctggaggcggagcatgtggtgagttgagccgccggacaaggggaaaagagct

SEQ ID NO: 15799 - DNA, 2300 bp, Homo sapien
gctggaaaactcacttccgcccttactaaggcgtacgtcaacgcagtacttccgccctcaagcagccgggctttccagcggtccaggcttttcgcgcttgccatgtgtcagccaatcagagcctgaggaaggtgggactcgggcggagccgatgctgaatggtacgcgctcgccgactggacagcagtctggcttccgcggtcggacttctacacccgcctccagacaggagaggggcacgtaccggcgctacggcttcctgcaggctgcctccggatagtccccgagagcttgttccgaagcaagcaccctgcagccctagcgatccagccctcccctggaccctaggtcacggcaatcaaccccctgctgtggttcccgaaccccaaggcccgatgggtcccgcgggggtcgcggcgaggccagggcgctttttcggcgtctacctgctctactgcctgaacccccggtaccggggccgcgtctacgtggggttcactgtcaacactgctcgtcgggtccagcagcacaatgggggccgcaaaaaaggcggggcctggcggaccagcgggcgagggccctggtgagagggggaggccttctgtgccgggaggaaggcgtcccagaggaggcggaccccgcggggcacaggcctgttgagaaggaccggccaggactgtgacagaggcggggcgtctgtggtggggacggggcctgtcgcaggggaggagcgtgacggggaggcggtgcccggggcatctccgcggcggaactcagggaaggagctagctggggcgggggtgatgatccaggctgggttccagcatagggctcttggtgggcacgctggggtcgggtggaatgcaggagagagaggaggtgggacaggtgggtacctgggctggaggcagggcctgaggtgggcaggtgcagagggctgcacttctcggctgaagccgggaatgaggaccccgctctcgggtgggattggaggggacccgcggctgaggcgctgggctgcgacagggacatcaccgttctcctcctcagggagatggtgctcgtcgtgcacggcttcccgtcctccgtggccgcccttcgggtaaggaaggagaccgggcagcggcggccgggtgagggcttgggttccgcccctcgctccgagccgccctgatgcccctgtacgccgcccgcagtttgagtgggcttggcagcacccgcacgcctcgcgccgcctggcgcacgtggggcctcgcctgcgaggagagacagccttcgctttccacctgcgcgtgctggcgcacatgctgcgcgcaccgccctgggctcgcctcccgctcacgctgcgctgggtgcgcccagacctccgccaggacctctgcctcccgccgccgccgcacgtgcctctggccttcgggcctccaccgccccaggccccggccccaaggcgccgcgcaggtccctttgatgacgcggagcctgagccagaccagggggatccaggggcctgctgctccctgtgcgcccagaccatccaggtgaggtccccccgaggaatggatggctctagagtccagacgacttcggatccagctctttcttgagggaaacccactgacacgctttggccaccctatccccatctctaagatgctgatgctataggacttacggccattcctgagcaaagcaggccctgctcagggccttcaccatttccccttcaaagaaaaggttcttccctaggccatcagtactccgctgcactccagtgtggtcgacagagcatgaccctcttttttttttttttttttttgagatggagtctagctctgtcgcccaggctagagtgcagtggcgcgatctctgctcactgcaagctccgcctcctgggttcacgccattctcctgcctcagcctcccgagtagctgggactacaggcgcccgccaccacgcctggttaattttttgtatttttagtagagacggggtttcaccgtgttagccaggatggtctcgatgtcctagcctcgtgatccgcccgcctcagcctcccaaagtgctgggattacaggcatgagccaccgcgcccggccctttttttttttttagacagagtcttgctctgttgcggaggctggagtgcagtgatctcagctcactggaagctccgcctcctgggttcaagcgattctcctatctcaacctcccaagtgtgccaccacacctgccgaatgtttgtgtttttagtagggatggggttcgccatgttgggcaggctggtctcaaactcctgacc

SEQ ID NO: 15800 - DNA, 2300 bp, Homo sapien
gaggaaggagaattgcttgaaaccaggaggcagaggttgcagtgagctgagatcgcgccactacactccagcctgagcgacagagtaagactctgtctcaaaaaaaaaataaataaataaataaaaagaaaatttctgggccatcggctcagtgcaggactttgttctacagcagtgataagtgctgccctctgatagtgcagtgtggcagttggggtgggagaggctaatgagatcaagaaaacacgtagcatgccagacaatagtaagtgttaagggaaagggggtgcagaaaagtgcacacaagaatgagctgcagttcattacattgttttagagacagggtcatgtccaggcatggtggctcacgcctataatcccagcactctgggaggccgaggcgggcagatcacttgaggtcaggagtttgagaccagcctgcccaacatggcgaaccccatccctactaaaaacacaaacattcggcaggtgtggtggcacacttgggaggttgagataggagaatcgcttgaacccaggaggcggagcttccagtgagctgagatcactgcactccagcctccgcaacagagcaagactctgtctaaaaaaaaaaaaagggccgggcgcggtggctcatgcctgtaatcccagcactttgggaggctgaggcgggcggatcacgaggctaggacatcgagaccatcctggctaacacggtgaaaccccgtctctactaaaaatacaaaaaattaaccaggcgtggtggcgggcgcctgtagtcccagctactcgggaggctgaggcaggagaatggcgtgaacccaggaggcggagcttgcagtgagcagagatcgcgccactgcactctagcctgggcgacagagctagactccatctcaaaaaaaaaaaaaaaaaaaagagggtcatgctctgtcgaccacactggagtgcagcggagtactgatggcctagggaagaaccttttctttgaaggggaaatggtgaaggccctgagcagggcctgctttgctcaggaatggccgtaagtcctatagcatcagcatcttagagatggggatagggtggccaaagcgtgtcagtgggtttccctcaagaaagagctggatccgaagtcgtctggactctagagccatccattcctcggggggacctcacctggatggtctgggcgcacagggagcagcaggcccctggatccccctggtctggctcaggctccgcgtcatcaaagggacctgcgcggcgccttggggccggggcctggggcggtggaggcccgaaggccagaggcacgtgcggcggcggcgggaggcagaggtcctggcggaggtctgggcgcacccagcgcagcgtgagcgggaggcgagcccagggcggtgcgcgcagcatgtgcgccagcacgcgcaggtggaaagcgaaggctgtctctcctcgcaggcgaggccccacgtgcgccaggcggcgcgaggcgtgcgggtgctgccaagcccactcaaactgcgggcggcgtacaggggcatcagggcggctcggagcgaggggcggaacccaagccctcacccggccgccgctgcccggtctccttccttacccgaagggcggccacggaggacgggaagccgtgcacgacgagcaccatctccctgaggaggagaacggtgatgtccctgtcgcagcccagcgcctcagccgcgggtcccctccaatcccacccgagagcggggtcctcattcccggcttcagccgagaagtgcagccctctgcacctgcccacctcaggccctgcctccagcccaggtacccacctgtcccacctcctctctctcctgcattccacccgaccccagcgtgcccaccaagagccctatgctggaacccagcctggatcatcacccccgccccagctagctccttccctgagttccgccgcggagatgccccgggcaccgcctccccgtcacgctcctcccctgcgacaggccccgtccccaccacagacgccccgcctctgtcacagtcctggccggtccttctcaacaggcctgtgccccgcggggtccgcctcctctgggacgccttcctcccggcacagaaggcctccccctctcaccagggccctcgcccgctggtccgccaggccccgccttttttgcggcccccattgtgctgctggacccgacgagcagtgttgacagtgaaccccacgtagacgcggccccggtaccgggggttcaggcagtagagcaggtagacgccgaaaaagcgccctggcctcg

SEQ ID NO: 15801 - DNA, 2300 bp, Homo sapien
cgcacgcctcgcgccgcctggcgcacgtggggcctcgcctgcgaggagagacagccttcgctttccacctgcgcgtgctggcgcacatgctgcgcgcaccgccctgggctcgcctcccgctcacgctgcgctgggtgcgcccagacctccgccaggacctctgcctcccgccgccgccgcacgtgcctctggccttcgggcctccaccgccccaggccccggccccaaggcgccgcgcaggtccctttgatgacgcggagcctgagccagaccagggggatccaggggcctgctgctccctgtgcgcccagaccatccaggtgaggtccccccgaggaatggatggctctagagtccagacgacttcggatccagctctttcttgagggaaacccactgacacgctttggccaccctatccccatctctaagatgctgatgctataggacttacggccattcctgagcaaagcaggccctgctcagggccttcaccatttccccttcaaagaaaaggttcttccctaggccatcagtactccgctgcactccagtgtggtcgacagagcatgaccctcttttttttttttttttttttgagatggagtctagctctgtcgcccaggctagagtgcagtggcgcgatctctgctcactgcaagctccgcctcctgggttcacgccattctcctgcctcagcctcccgagtagctgggactacaggcgcccgccaccacgcctggttaattttttgtatttttagtagagacggggtttcaccgtgttagccaggatggtctcgatgtcctagcctcgtgatccgcccgcctcagcctcccaaagtgctgggattacaggcatgagccaccgcgcccggccctttttttttttttagacagagtcttgctctgttgcggaggctggagtgcagtgatctcagctcactggaagctccgcctcctgggttcaagcgattctcctatctcaacctcccaagtgtgccaccacacctgccgaatgtttgtgtttttagtagggatggggttcgccatgttgggcaggctggtctcaaactcctgacctcaagtgatctgcccgcctcggcctcccagagtgctgggattataggcgtgagccaccatgcctggacatgaccctgtctctaaaacaatgtaatgaactgcagctcattcttgtgtgcacttttctgcaccccctttcccttaacacttactattgtctggcatgctacgtgttttcttgatctcattagcctctcccaccccaactgccacactgcactatcagagggcagcacttatcactgctgtagaacaaagtcctgcactgagccgatggcccagaaattttctttttatttatttatttattttttttttgagacagagtcttactctgtcgctcaggctggagtgtagtggcgcgatctcagctcactgcaacctctgcctcctggtttcaagcaattctccttcctcagcctccagagtagctgggattacacgcgcctgccaccgcgcctggctaatttttgtatttttagtagagatggggtttcaaccatgttggccaggctggtctcaaactcctgacctcaggtgatcctgcccacctaagcctcccaaaatgctggtattacaggcatgagccaccgtgcccggcctaaatatttaataaaataatggacgatgggtgccttctactgagctcccggtaattgtgagtgagtagaggacttgccctggggacattcagtgacctgctgggtgttgctgagctgtgaggaagttcaggtctggctgcagtggtgaggctgtgactcaatcaatcactgctgatgctcccaggacctgcaccagcttagtcctaggggcaaggattttaactgtccacctcagtttcttcatttgtaagatgcaaataacagtcacccctgcctcatgggatggagctgtgtaatgcccgcaacagtgcctgctgcatagaggggttgctgccagctgcctctccctccttgtctcttacctgcctgctgcctgggtcaggatgaagaggggcccttgtgttgcccccaccctggctgcctgctaagggcccatgtgatctgcctggcagaggagtttcttcaggaagaaccagggcagcttctgcccctagagggccaatgcccttggtgagtgcagtcccctggccccagcctggtccacctctgggaagagggtgcccagttgtgcaatccaggcccaggcagctgagccctcatctcagcatgcagggcg

SEQ ID NO: 15802 - DNA, 2300 bp, Homo sapien
cctggccccagcctggtccacctctgggaagagggtgcccagttgtgcaatccaggcccaggcagctgagccctcatctcagcatgcagggcggatactggagggggcttgtggcatctgactctgtatctcctacctgcccctctccttggtagctgtgagaagtcactgctttggggagacctgatctggctgtgccagatggacactgagaaagaagtagaagactcagaattagaagaggtgagtgggctttggtggcgggctccctaccccactccctgccctgggctgcctgtgaccacactgcttgcctctgcaggcacactggacagacctgctggagacctgatcctcagtgtccttaccccctcctacctcttttctgtgccacctgctgtgggtccagcaggtttttacttgagtacaataaaaagtctgagtcaagggtgccttatggtggatgctgaggggaggggcggagctagtagcccaaggtcctgccagtcacggggcttcctcaggggcacagaggaggcaggaggggcccctggccctagcacgtgaacagcttctactctgcctggaaaccccatgcctcagctttcccctacttgcctctgagctcatgcaattcttggaagcctgggagacttaccttgaaattgaatgcaaataggacaaagaccaaggaggatggggggatgccctccttccacggggccctgtggcttccaagtcttaatctcctctagtctcttgtctacggagcctccttcaaacccagggaaagaaaatcacctgccagggttgtttttcttctaggatcttctattgatgctctgtgaggtcccccaggagccatgaagctagggctggctcctagggcaatgggactacagtgtccttgtcctttcttattctttctgttctttctttctttctttttttttttttttttttttttttgagacagagtctcactctgttgcccaggctggagtgcagtggtgtgatcttggctcactgaaacctccgcctcctgggttcaagtgattctcttgcctcagcctcctgagtagctaggattacagatgcccgccatcatgcccagctaatttttgtatttttagtagagacagggtttcaccatgttggccagcttggtctcgaactcctgacctcaggtgatcctgctgcatcgacctcccaaagtactgggattacaggcgtgagccaccacgctcagcctctttcttgttctatatgtccatgctctgctccacttctgccccttcactctgcccccacacatcactccagactggccttgtggtcagagcctggaatgcctgggctgctgggggcctgtggactgcactgggccagaacccctgccgccttcaagactggcctgtagccagcaggtaggtgacttttcccaggccggcctatcccacctttcccctccactcactcacctcccttgcctgggtcaattagagaaagcttgtcggccaggcatggtggctcatgcctgtaatctcagcactttgggaggccgaggcgggcggatcatctgagctcaggagtttgagaccagcctggccaacatggcaaaaccccgtctctactaaaaatacaaaaattaaccggatgtggtggtgtgcacctgtaatcccagctactcgggaggctgaggcagaagaatcgcttgaacccaggagggggaggttacagtgagcggagatcgtgctactgcattgcagcctgggcgagagagcgagtctccatctcatataaaaaaaagaaaaagaaagaaagaaagcttgtctgttggcctgccctgcagggtggagttcagagggaaggtcaggagcctagtgacagctcaaaaaaaaaaaaacccaaataccaatgttggccccttttgcctttcattcatgtgttttctatacactaaactcacatattgggtttgcagatcactccaagcttggctggagctgtggtggtaaggagggtaatagagaagcttccccaccctcaaccccaccccttccttcctggagttcccagccctgactttagatccctcccacactggaccttcaaaaccctcagggcagagagcagccctacactccctacaccacacccatactcagcccctgcaggcaaggagagaacaggtcaggttcccgagagctcaggtgagtgacacgttggaatggcccagggcaccttcaccctgctcagcttgtggctccaacattctagaagccgaggcctctgccatc

SEQ ID NO: 15803 - DNA, 2300 bp, Homo sapien
ctgggagacttaccttgaaattgaatgcaaataggacaaagaccaaggaggatggggggatgccctccttccacggggccctgtggcttccaagtcttaatctcctctagtctcttgtctacggagcctccttcaaacccagggaaagaaaatcacctgccagggttgtttttcttctaggatcttctattgatgctctgtgaggtcccccaggagccatgaagctagggctggctcctagggcaatgggactacagtgtccttgtcctttcttattctttctgttctttctttctttctttttttttttttttttttttttttgagacagagtctcactctgttgcccaggctggagtgcagtggtgtgatcttggctcactgaaacctccgcctcctgggttcaagtgattctcttgcctcagcctcctgagtagctaggattacagatgcccgccatcatgcccagctaatttttgtatttttagtagagacagggtttcaccatgttggccagcttggtctcgaactcctgacctcaggtgatcctgctgcatcgacctcccaaagtactgggattacaggcgtgagccaccacgctcagcctctttcttgttctatatgtccatgctctgctccacttctgccccttcactctgcccccacacatcactccagactggccttgtggtcagagcctggaatgcctgggctgctgggggcctgtggactgcactgggccagaacccctgccgccttcaagactggcctgtagccagcaggtaggtgacttttcccaggccggcctatcccacctttcccctccactcactcacctcccttgcctgggtcaattagagaaagcttgtcggccaggcatggtggctcatgcctgtaatctcagcactttgggaggccgaggcgggcggatcatctgagctcaggagtttgagaccagcctggccaacatggcaaaaccccgtctctactaaaaatacaaaaattaaccggatgtggtggtgtgcacctgtaatcccagctactcgggaggctgaggcagaagaatcgcttgaacccaggagggggaggttacagtgagcggagatcgtgctactgcattgcagcctgggcgagagagcgagtctccatctcatataaaaaaaagaaaaagaaagaaagaaagcttgtctgttggcctgccctgcagggtggagttcagagggaaggtcaggagcctagtgacagctcaaaaaaaaaaaaacccaaataccaatgttggccccttttgcctttcattcatgtgttttctatacactaaactcacatattgggtttgcagatcactccaagcttggctggagctgtggtggtaaggagggtaatagagaagcttccccaccctcaaccccaccccttccttcctggagttcccagccctgactttagatccctcccacactggaccttcaaaaccctcagggcagagagcagccctacactccctacaccacacccatactcagcccctgcaggcaaggagagaacaggtcaggttcccgagagctcaggtgagtgacacgttggaatggcccagggcaccttcaccctgctcagcttgtggctccaacattctagaagccgaggcctctgccatccctgccctttcccatggatattccatttcaattagacaacccagcctggccggaatccccctgcgttccttcttttcctttgtgtatttttgagacagggtgttgctccgtcacccaggctggagtgtagtgggatcctggcccactgcagcctcaaattcctaggctgaggcaatcctgccgcctcagcctcctgagtagctggggttacaagagcaagccaccacacccagctaattttgaaaaatattttttgtagaggagaggtcttgctttgttgtccaggttggtctcaaactccagggctcaagggatcctttcccgttggcctcccaaggctctgggattacaggcgggagtcaccctgcctgggcccctccttttgatgagtcatcagttttcattcccgcacgaggctctagcccctggtaccagcttagttgctcaatgggctgtgtttgttctggagcccagatggactgtggccaggcaagtggatcacagacctggccggcctgggaggtttccacatgtgaggggcatgaggggggctcaaggaggggagcatcggggagaggagcgcactgggtggaggctgggggtcccagcaggaaatggtgagacaaagggcgctggctggcaggg

SEQ ID NO: 15804 - DNA, 2300 bp, Homo sapien
gattgttctgtcagaaaaccctctcccagttcccctgcagctcttcaggaatccacatctctccagagctctttgttctcatgggtggcacctccagagtgaagaagatcctttgtcaagaagggaaacagaggggaaatgagagggtcctgcaggcagagctggaatcaacttccactctgcctcttgcaagctgtgtgaccctgggcacaatttctccttcctctggaaacctctgttttcttagatttggagcagggtggtcacactgaccttgcagagttctgagagtcagagacagaacataaaaggcctggaaaacattctccaaaaagaagctgcaacatgtgtggacagtgggcttttcatgcctctcttactgtctcttactgtctgttgacctggtgcaagaaacatgctctggtgatggctgtgagggaggaatgaggatagacatagacactcctgtgtctcaaacatgcttctttattactctgttatgactctgtcttccctggggcaggaccccagcctgcctacatttgcagacagacacagtggcatgtggagacaacagtgtgtcccaatgactttcctttaccctccagctgtcggcagtactcagtggaagggtgatattatgacactgatactgctattttgaaacctggaggatggaaaggtgcaaaaatctatcaccagcaacagaaggtgcagactgtgttggtggcggtaattttgtccatcaaatgaatatgtgtgaaaacattccctcctttggccctacaggtcagaatggcggcagcggagcatcgtcattcttcaggattgccctactggccctacctcacagctgaaactttaaaaaacaggatgggccaccagccacctcctccaactcaacaacattctataactgataactccctgagcctcaagacacctcccgagtgtgtgctcactccccttccaccctcagcggatgataatctcaagacacctcccgagtgtgtgctcactccccttccaccctcagcggatgataatctcaagacacctcctgagtgtctgctcactccccttccaccctcagcggatgataatctcaagacacctcctgagtgtctgctcactccccttccaccctcagcggatgataatctcaagacacctcccgagtgtctgctcactccccttccaccctcagctccaccctcagctccaccctcagcggatgataatctcaagacacgtgccgagtgtctgctccatccccttccaccctcagcggatgataatctcaagacaccttccgagcgtcagctcactccccttccaccctcagctccaccctcagcagatgataatatcaagacacctgccgagcgtctgcgggggccgcttccaccctcagcggatgataatctcaagacaccttccgagcgtcagctcactccccttccaccctcagctccaccctcagcagatgataatatcaagacacctgccgagcgtctgcgggggccgcttccaccctcagcggatgataatctcaagacaccttccgagcgtcagctcactccccttccaccctcagctccaccctcagcagatgataatatcaagacacctgccgagcgtctgcgggggccgcttccaccctcagcggatgataatctcaagacaccttccgagcgtcagctcactccccttccaccctcagctccaccctcagcagatgataatatcaagacacctgccgagcgtctgcgggggccgcttccaccctcagcggatgataatctcaagacaccttccgagcgtcagctcactccccttccaccctcagctccaccctcagcagatgataatatcaagacacctgccttccaccctcagcggatgataatctcaagacaccttccgagcgtcagctcactccccttccaccctcagctccactctcagcagatgataatatcaagatacctgctgagcgtctgcggattccgcttccaccatcagccgatgataatctcaagacaccttccgagcgtcagctcactccccttccaccctcagctccaccctcagcagatgataatatcaagacacctgccgagcgtctgcgggggccgcttccaccctcagcggatgataatctcaagacaccttccgagcgtcagctcactccccttccaccctcagctccaccctcagcagatgataatatcaagacacctgccgagcgtctgcgggggccgcttccaccctcagcggatgataatctcaagacacct

SEQ ID NO: 15805 - DNA, 2300 bp, Homo sapien
tagggatgtactgagaatggggaaggaaactatcatctcagaagtcagcaggcagtaagcaagaggaggaatcaatacagcaacagtttggatcagactgtacagtttttttgtttttgtttttctgagatggagtctcgctgtgtcacccaggctggagtgcaatgacgtgatcttggctcactgcaacctccgcctcccaggttcaagtgattcccctgcctcagcctcccgagtagctgggattacaggtgcctgccaccacgcctggctaattttttgtatttttagtagagaaggggtttcaccatattagccacaatggtctcaatctcctgacctcgtgatccatctgccccgccctcccagagtgctgggattacaggcgtcagccaccgtgaccggctcagactgtactcttatagccatctgaaatacgttttctaggtagagatagattgtgtaagggtacagttgtgaggataacagaaacatggcagattatttaaaatcatcctgaaagtggtgctttatctgatgaaagtgattgtaatccataggaaaatgtttcaacgtgcgcaagagttgcggcggcgggcagaggactaccacaaatgcaaagtaaggagcttcctccctgcagttgcaggatagttcagtgctgatgcagatgatgccacggcccttagactctctcaacattcaatttctcatgtgttggctttttcagatccccccttctgcaagaaaggctctttgcaactgggtaagtttgcttgttttccttgcttttggacatagtctgccaggtcaggacatggatacatttttctccctacagctctgtgctcaagccctgcagagggagatggcagagagaaaggctgcctacaagcatcacagtcccatccctgttggtaaccgtgttgcgcaaaaacaccttcatccccacccagtggggcccctgatctaatattctaagtgtcagaggttccgtatttgtaatagcagatgggccctgactgtaaactagtgaagagtgaatgtaacttattacccacagggacaattccaaatgaaggccttaaatgatgctcagctaagctggttcttgtgtggcctctgtaccttcaaaagctgccgagtcctatgattacacgtgatgggacttgtacacttgaagtgaaacacagttttaaaacttgctttgtttagaattcccacctcatttttccatggacaaaagtattctttatgtcctagtgcacttacaatttggtattacctgggagtgaaaagaaatattacagccgtgcctaagtgacttcttgaggtgagattgttctgtcagaaaaccctctcccagttcccctgcagctcttcaggaatccacatctctccagagctctttgttctcatgggtggcacctccagagtgaagaagatcctttgtcaagaagggaaacagaggggaaatgagagggtcctgcaggcagagctggaatcaacttccactctgcctcttgcaagctgtgtgaccctgggcacaatttctccttcctctggaaacctctgttttcttagatttggagcagggtggtcacactgaccttgcagagttctgagagtcagagacagaacataaaaggcctggaaaacattctccaaaaagaagctgcaacatgtgtggacagtgggcttttcatgcctctcttactgtctcttactgtctgttgacctggtgcaagaaacatgctctggtgatggctgtgagggaggaatgaggatagacatagacactcctgtgtctcaaacatgcttctttattactctgttatgactctgtcttccctggggcaggaccccagcctgcctacatttgcagacagacacagtggcatgtggagacaacagtgtgtcccaatgactttcctttaccctccagctgtcggcagtactcagtggaagggtgatattatgacactgatactgctattttgaaacctggaggatggaaaggtgcaaaaatctatcaccagcaacagaaggtgcagactgtgttggtggcggtaattttgtccatcaaatgaatatgtgtgaaaacattccctcctttggccctacaggtcagaatggcggcagcggagcatcgtcattcttcaggattgccctactggccctacctcacagctgaaactttaaaaaacaggatgggccaccagccacctcctccaactcaacaacattctataactgataactccctgagcctcaagacacctcccgagtgtgtgctcact

SEQ ID NO: 15806 - DNA, 2300 bp, Homo sapien
ctgacacttagaatattagatcaggggccccactgggtggggatgaaggtgtttttgcgcaacacggttaccaacagggatgggactgtgatgcttgtaggcagcctttctctctgccatctccctctgcagggcttgagcacagagctgtagggagaaaaatgtatccatgtcctgacctggcagactatgtccaaaagcaaggaaaacaagcaaacttacccagttgcaaagagcctttcttgcagaaggggggatctgaaaaagccaacacatgagaaattgaatgttgagagagtctaagggccgtggcatcatctgcatcagcactgaactatcctgcaactgcagggaggaagctccttactttgcatttgtggtagtcctctgcccgccgccgcaactcttgcgcacgttgaaacattttcctatggattacaatcactttcatcagataaagcaccactttcaggatgattttaaataatctgccatgtttctgttatcctcacaactgtacccttacacaatctatctctacctagaaaacgtatttcagatggctataagagtacagtctgagccggtcacggtggctgacgcctgtaatcccagcactctgggagggcggggcagatggatcacgaggtcaggagattgagaccattgtggctaatatggtgaaaccccttctctactaaaaatacaaaaaattagccaggcgtggtggcaggcacctgtaatcccagctactcgggaggctgaggcaggggaatcacttgaacctgggaggcggaggttgcagtgagccaagatcacgtcattgcactccagcctgggtgacacagcgagactccatctcagaaaaacaaaaacaaaaaaactgtacagtctgatccaaactgttgctgtattgattcctcctcttgcttactgcctgctgacttctgagatgatagtttccttccccattctcagtacatccctaattcatccttcattgagcatcttttatcataaagctgtattctctttgtattaatatccttaccgtgtttcacagggcagaaacagctgggcttataaacaggcatagtccttttgaaggatgtggttgatcctacaacaacacactttcctaaggatgacaacaactcaccccacccctagaatggctggtatgaaccgagtttccacacagtctagctggcaatggggtcaggagacgttttgctacttcacatcttttggtcactggtaaatattaaggtactttgttttctgttttgtgaactctctctcgctctctctcacgatatgtcttctgaccgtttgtttctatttctgcatttactgggtctaaatactgtacaaaggttaaaaacaacactccaatgggcgtttcccaggagggtggggttcagtttctgaactcacttgtaggtgtgtatttctttcatatccaatttcccattttcctctgcctctgatacctgcctctccttttctgcatgctcacattctttcacgcttagtttcctcagattagaagggagagaaatgcacacacatgatccaccagcccgtgtgggattccctctgcccttctggcatctgaaggctgtgattcaaagatcccccctgcaaccttcccacaaatgaaccaactgattctcacaaccgaagggagaattgacacctcccattgagggacaaaaaaaagtcacactctggcctgctggcaagtcacctgtcatttccagctcatcttcatagttccatagttagtcctattctttagtaaatataaagactattaaaagcttctatgaggtgcactatgtgtgtctctggggtcagtcttgtgcttgacacagcgaaagctcattttagttcagtgtgaaaaaccagacctcaccaattcatcacaactaactccatcggaagcagaggattgctcctcatctgactcctcctgtgtgagaccttattctcagtcagaggctgatgccggaactgagaccatcagccatagagagatccttccagaataaccccgcagttcactactgcactttgccatgattcaggactggaactcttgtcatcgactttaaagatcctggttgagagaaaaggcaatctgaatgctgggcgcatctattgaattagaaatgatcggaatggctcctaagtcagggtgttatgtcctgaaaataggtgacaacggcaaaccatccaccctggtgttgactgactttaacaaggttcagttcacagagattgagggcagaaaaagg

SEQ ID NO: 15807 - DNA, 2300 bp, Homo sapien
tccaaggcgccagctctggaacgaaggatgcccttgggaggtgatgacactcaggtacacgggtgctcaacagattgcttcctcctatcctcagacggtctttgcatgcatgcagccattggcactcccattgtgtggaaggaaaccagcccagggtcacacagctggtcagcagcaacatagctgttctcaaatctaaggtgcctgaccatgcctccatgagggaccgcctccaagggaggttgatcctggctttggggagcctttcctgggctgcacgaataacctccattgttcgagaccccaaactctgctcacatcttcctttccctatctctgcttgggctatgatcacggtgactctagcagcccttcatggacattatagtactctctgccattcacttttgctctaatctgacttcaacccccacttacttggtctctccttttacaaccaccacaaccgaaatctagggctgcttttttttttttttttttttgagacagagtctcattccattctgtcacccaggctggagtgcaatggtacaatctcggctcactgcaacctccgcctcccgggtccaagggattgtcctgcctcagcctcctgagtagctgggattacaggcgtgtgccaccatgcctggctaatttttgtatttttagtagagatggggtttcaccatgttggtcaggctggtctccaactcctaacctcgtgatccgcctgcctcagcctcccaaagtgctgggattacaggcgtgagccaccatgcccagccaaatctagggcaggaacatggctgcagcatataaaaagaattgaattccatacttttgttaaccctgttttttgtttgtttgtagttgttgctgtttttgagacagagtctcgctctgtcgcctaggctggagtgcagtggtgcaatctcggctcactgcagactctgcctcccgggttcaaactattctcctgcctcagcctcccaagtaggtgggactacaggcgcccaccaccacacccggctaatttttgtattttattagagacagggtttcaccatattggccaggctggtctggaactcctgaccttgtgatccgcccacctcggcctcccaaagtgctgggattacaggcgtgagccaccacacccagcccctgttttgtttttgttttgcttgcttcttagggttgtttttctatttatggtaaaggcattggctttccatttgtagcatcaatagaatatttcctgtttacaataaccttatgtcatagtaaatggtaaagggatttaaagcagtggttttcagctgccagaggcctgagagagtttgggcatactctgtgtgatcgggcagaaggcctgtgggaagtttagcagaggacagggccaggaaagttgatggacagtgggggtctgtcctggtcaccaggcccctgggtcctgcccacctgcttggagctccccacccatcacacatgatgctgccaagccctctgggtattgtgggcaaataccttaggagagaagctgatgaactttgtttcttgaaatgcacagattccttggacgtccctgagagctcagtcatgaaagtcaacttggttttctccccctcatttgggttcagaatttaaagtccacacacacaggcagtaagatgatatagataaggacgtcatcactcggtttcggatgttaaaatgtctaggtgggttagcggtgatttgagatcacacaaccttgtgccacaaagaggaattcccaggccagagggagacattttattgccatgttatgatctcatcattgagttgaaaggcaatcttgtttcattttggattctttcttatgtttatgtcttataagggcactttgaatttccaagcaaataataattttgaattagcttttaatcattgacttctagcacagttatatgatcagaaacatgctgtgtgatttgattgctctcaaatatattgagatttgctggaacaaaataagtcaggttaatttttgtaaatgtaccaggcatgcttaaaatgaatgtatctacatttgttcctgagatacaggttgatggacggatggctacatggatgtgatggagatggtttactatcgggaccttccgcaccctgctgatgttttgttgcttaggatatgaatggctgagcggaggctgtaaaacctggcactctgcttgggtatgaggttcttcctgccatcctgccatcatttgttttttatgttttgtcgccataagtgaccttgaggaaccctg

SEQ ID NO: 15808 - DNA, 2300 bp, Homo sapien
ttgtttatttatttatttatttatttatttatttgagacagagtttcgctcttgttgcccaggctggagtgcagtggcacgatctcagctcaccacaacctccgcctcccaggttcaagcgattctcctgcctcagcctcccgagtagctgggattacaggcatgtaccaccacgcccgggtaattttgtatttttagtagagacggggggtttctccatgttggtcaggctggtctagaactccagacctcaggtgatacccctgcctcagcctcccaatgtgctgggattacagctgtgaagccaccgcgcccggctgctgtgatagttgagatgtaaaccaaaaataaaattctaagccacccaatccgactgaatggacccttcctgttgagcaaggacattccaaagtaaactgaaaagaccagcttaggccatgatgggaaggggaggtgtcaacatgcctcattctaccttcctccctctggaatccagacacaactgaccagcattaacattaaaacagagatcttaagctgggcacagtggctcatgcctgtaatcccagcactttgggaggccaaggtgggatcacctgaggtcagaagttcaagaccagcctggccagtatggtgaagccatgtctctactaaaaatacaaaattagccggacattgtggtgcacgtctgtcatcccagcaaggcaggcgaatcacttgaacccaggaagcagaggttgcagtgagccaggatcatgccattgcactccagcctggtcaacggagcgagactccgcctcattaaaaaaaaaaaaaaaaaaattagccgggcgtggtggcgggcacatgtagtcccagctactagggaggctgaggcaggagaatggtgtgaaccagggaggcggagcttgcagtgagccgagattgtgccactgcactccagcctggacagaaatgcatttcataatgcattttaattgcattagcagtgatttaatttttttagatgttaaaacttatgggtgaaagtggattaaatgtagccaaatgcaacatcaaaatcttcaggcacaaaaacccattaactttttcatactctcagaaggtgaacctaatttcaaatgaaagctgcctccagaatatattgttaagcgtattctagatataattcattttggcaaacatactgtagaaattcacataacattttactgtactaaaagtaaattgcccatgtaacaaaaaatatcttttcagagcttgaaatgaattttaaaggatgactgatggtccttggaagagaaatagtaaacaaataaggtttgtagcaatgatgtatgagttagaaattgcagttccagatgatctctttattaaagagacgatctacacttaatttggtcaagtgttatgaacatagttcatgttaagtctccatttaaatacaacctgaaataccaaagttaattttcttttctttctttctttttttttttttttttttagaaggagtcttgctctgttgcccttcctggagtgcagtgacgtgatcttggctcactgcaacctccacctcctgggcttgagcgatcctactgcctcagccccccaagtagctgggaggacaggcgcaagccacggcactcagctaatttttgtatttttcgtagagatagggtttcaccatgttgcccaatttggtctcgaactcctgagctcaagtgatccgcccgccttggcctcccaaagtgctgggattacaggcatgagccaccgtgcctggccagaaaattgtaaacacacacaaactctcaagtggcctaattccctctcaccaaaccaatcacaatacagataaaagagaataacttgtgttcatttttgtacaaacaaaaaagatataaattgtgaatgatgcatgatttttaattacaagtaaactgggcaaatgcttctgcattatttaaagctaaaaggtgatcagtggaaactttcctctgttagtactctaatactttttatatttatcggctcactacaacctgtgcctaccaggttcaagcgattctcctgtctcagccacctgagtagccgagaccacaggcacgcactaccatgtccggctaattttgtatttttaatagagacagggtttcaccgtgttggccatgctggtcttgaactcctgacctcaaccgatccgcctgccttggcctcccaaagttctgggattacaagcgtgagccaccgcgcccagccttattataattgttactatttaaatctcttttgctctctcc

SEQ ID NO: 15809 - DNA, 2300 bp, Homo sapien
ggtgggttttggccagctccttcactgcaacctgttttatcagcaaggtctttatgactggtattttgtgctgaccttctatgtcatcctgtgacttagaatgccttaaccatcagggaatgcagcccagtagtttcagcctcatttttcctggctcctatttaagatggagttgctctggttcacacacctctgacatgatcattgcccactgcggcttccacctcccgggttcaagagatcctcctgcctcaccctcccaaggtgctgggactacaggtgtgtgccaccacgctcagctaatttttgtattttttgtagagatggtgtttttccatgttgcccaggctggtctcaaactcctgggctcaagcaatccttctgtctcagcctcccaaagtactgggattacaggcatgtcccaccatgcccagactaatatttacttttaatcagactaagatagggttactacttgagttgctatggctccagctgaaagaaagcccgtgcagtcatatcacgcgtaaacatttgctttatgctaaaaatatggtggacctggcattacagctattacaaatctcctaagatgtctcgggtagtgtattagttacttttcatactgctatgaagaaatactggaaactgggtaatttataaagaaaaagaggtttaatgtactcacagttccacaaggctggagaggcctcagaatcatggtggaaggcaaggagcaaaaaggtatgtcttccatggcagcaggcaagagagcacgtgcagggaaactgccctttataaaaccatcagatttagtgagatgtattcactatcacgagaacagtatgggaaaaacctgcccccatgattcgattacctcctaccgggtccctcccacgacacatggggattatgggaactacaattcaagatgaaatttgggtggggacgcagccaaaccatatcgggtagcaacaacctagggtcagttttgcaggtggtaaagccatttaccaagatagttgtaggtaaagaagggcagatttattagagaaattgtgaaaatatgttgcagtgggcagctcagcagagaaggggctacctgcaaagaggcaagggctggaggaaagttttatagggtcctgctgaagggtgctacgtgtggaatgaggtcattgtgcccgcaggttgtttgtgattagctgtttctaacaattgttcatacaataattgttcattattgttctcaacttggggctctccccaacctggggacccttccttattgttgcttacttatcaggtctccacataaaggtgtggaaacttcattcattcatatcttcaacacaaattgtaggtagcctgttttttaaaacatttattcaacaaatatttagtccaagccactattacttattaccttctctactattgtatggacttttaactatctctgacactattcactattcttccacattctctattatttatacctatggtaaaatttgccagtttgaccatacaactaatactcacagggaatatatagagtctagaagaaaatatacaggtccttaaaggctgccctgccaacaaaaccataacgcaggaacaaacatcacaactatgccaaataatcaatcctacaatgtccaaaattttactttaaaactggaatttccagacttcctttctgcattaaccagtttaactagacagtaacgaaatattcctactttatgctgtgatagtttgtttatttatttatttatttatttatttatttgagacagagtttcgctcttgttgcccaggctggagtgcagtggcacgatctcagctcaccacaacctccgcctcccaggttcaagcgattctcctgcctcagcctcccgagtagctgggattacaggcatgtaccaccacgcccgggtaattttgtatttttagtagagacggggggtttctccatgttggtcaggctggtctagaactccagacctcaggtgatacccctgcctcagcctcccaatgtgctgggattacagctgtgaagccaccgcgcccggctgctgtgatagttgagatgtaaaccaaaaataaaattctaagccacccaatccgactgaatggacccttcctgttgagcaaggacattccaaagtaaactgaaaagaccagcttaggccatgatgggaaggggaggtgtcaacatgcctcattctaccttcctccctctggaatccagacacaactgaccagcattaacattaaaacagagatcttaagctggg

SEQ ID NO: 15810 - DNA, 2300 bp, Homo sapien
gttgctgggattacaggcacactccactacacccagctaatttttttgtattatttgtagacatggggtttcgccatgttgcccaggctagtctggaattcctgaggtcaagctgtctgcccatctcagcctcccaaagtgctgggattgcaggagtgcaccaccacacctggcctgaaacccagattttatttatttatttattcattttttgagatggagtcttgctctattgcctaagcttgagtgcagtggcgcgatcttggctcactgcaacctccacctccctggttcaagcgattctcctgcctcagcctcccaaagtgctgggattacaggcatgcaacaccacacccagcctgaaacccagatttttaatatgaaatcaaagtcttcagaccttgtaggtgtcataaaaagcacgctgaggaccactagtttgcaactgccaatctaaaatatcatagacattatatcactttaaccacgaaaaaaaaagtatgtgaggcagaaaatggaagcaaccatgcctaatttattgttgaatactttttccgtataccaagagcttcctttgcactagcatctgaaactatatccagaatgacactggttttcataaaagtgttgatcctcacacctctttatagtcttgcacctagcccagtggagtgaaacactttaaatagcacttgttccttgagtatatatggaaaaaagtgaagtattgataagtgctcagctaatatgagcagcatctcaggagtctccaattcttgaattaccagggagtatttttaccattttcccccagtgaaaggcctattttgagagacttatcctccaaaatgaatgtattaagtcatgttcctttttttttttttttttgagacagggccttgctctgttgcccaggctggagtgcagtagcatgatagttacaggaaaggggtcccaatctagaccccaagagagggttcttggatcttgtgcaagaaagaattcagggtgatgccacagtgtgaagtgaaagcaagtttattaagaaagtaaaggaggaggggcaccgtggctcactcctgtaatcgcagcactttgggaggccgagacaggtggatcacgaggtcaggagatcaagaccatcctggttaacacggtgaaacctcatctctactaaaaatacaaaaaaattagccaagtgtggtggccggtgcctgtagtcccacctactctggaggctgaggcaggagaatgggatgaacccgggaggcgaagcttgcagtaagccgagatcgcgccactgcactccagcctgggtgacagagggagactccatctcaaaaaaaaagagagaaagtaaaggaataaaagaatggctaccccatagacggagcagccgtgagggctgctggttgcccatttttatggttatttcttgatgatatgctaaacaaggagtggatttttcatgcctcctctttttagaccatatagggtaacttcttgatgttgccgtggcatttgtaaactgtcatggtgctggtaggagtgtagcagggaggatgatgggaggtcagtcttgtctctattttggttttggtgggttttggccagctccttcactgcaacctgttttatcagcaaggtctttatgactggtattttgtgctgaccttctatgtcatcctgtgacttagaatgccttaaccatcagggaatgcagcccagtagtttcagcctcatttttcctggctcctatttaagatggagttgctctggttcacacacctctgacatgatcattgcccactgcggcttccacctcccgggttcaagagatcctcctgcctcaccctcccaaggtgctgggactacaggtgtgtgccaccacgctcagctaatttttgtattttttgtagagatggtgtttttccatgttgcccaggctggtctcaaactcctgggctcaagcaatccttctgtctcagcctcccaaagtactgggattacaggcatgtcccaccatgcccagactaatatttacttttaatcagactaagatagggttactacttgagttgctatggctccagctgaaagaaagcccgtgcagtcatatcacgcgtaaacatttgctttatgctaaaaatatggtggacctggcattacagctattacaaatctcctaagatgtctcgggtagtgtattagttacttttcatactgctatgaagaaatactggaaactgggtaatttataaagaaaaagaggtttaatgtactcacagttccacaaggct

SEQ ID NO: 15811 - DNA, 2300 bp, Homo sapien
accgagacaggcagatcacccgagctcaggagttcaagaccagcctggccaacatggtgaaaccctatctctactaaaaaaatacaaaagttagcagggcgtggtgatgggcacctgtagtcccagctacttgggagactgaggcagggagaattgcttgaaccccggaggtagaggttgcagtgagctgagatcgccccattgcactccagcctgggcaacagagcgagagactccgactcaagaaagttttcttggaacacaggtactctcattcctgtgtttcgtatgtggctggtgttttgttttgagagagagagtcttaactttgtcatctaggctggagtgcattggtatgatctcgggtcactgcaacctctgcctcccaggttcaagcgattctcctgcctcagcctcccgagtagctgggattacaagtgtgcgccaccatgcccagctaatttttgtaattttagtagagatggggtcccgctgtgttgcccaggctggtttcaaactcctgggctcaagtgatctgcccaccttagcctcccaaagtgctaggattacaggtgtgagccacaacacctgacctgtggctgttttcttactgtagtgatagacaaggagttgctgcattgcatagagatgctatattgcacgcaaaggctttactgacttcacaaaaaagtatttgtccaaggtgtagtgtactagatcccttccaatctgtaattttaatttaaaaatgtccaaataaaaaaaaaaaagtccaaatacccctgttttgaaggataaactctgtatgcttgtgcttattttggagaagccataaacttactttgttttgtacatgatcagatgtgggcgctatctccaactgtctttgcacttctgagtaagaatctgatgattgtgcacagtgacctggctgttcacttccctgccattcagtatgctgtgctctacacattgtattctcattgtaccaggtactgtattcacaaatttttcttaagaaccccacaaaacattttatttttttaatggatagattttaaagatgtatgttgatttaactttggacttgcttgctttctttgattaaagatgaaaagataatctatgctttgtctttcaggcatgatcactttatctctagtagcctcagttcttcctctcctttgtttgatggagctgtgattagcactgtaactacggccacaaagaaacatttctcaattatattaaatcttctgtgaatattacttaagaaagataaccttaaccaggacacgaggtaacagattttatatagtattaactattcctaactttgttaatttgcctttataatttgagaataagaaatgtgaattacaaaaaatttttaaaaatgtggattatagaggtgaggtagagcagcttctttactgtcaaacaccttataatttggttttattatttaatctaggctttcttattctttctgaaaagaaatacatgaaaaacctcaatcccccatccccagtgtttcatagaagaatatatatagatttttaatattctatgctttttttgtttttgagacggagttttgctcactgcaacctctgcctcccaggttcaagcaattcttctgcctcagcctcccaagtagccgtgattacaggtgcccgccaccacacccagctaatttttgtatttttagtagagatggtgtttcaccatgttgttggccaggctggtcttgaactcctgacctcaggtaagccaccacgcccggcctctttgctattatcatgctgcgttgggaggttttcttaaaaggcacacaacaattttgacagtaatttctatagtttcattttttatttttattttttattgtttgagatgtttgaaaaaccaagagaaaaccaatgtaagaagactaggcttttaacgtttttttgtttttgttattgtttttaatgtacagtcaactgtatattttgtgtttcaggaaactgttaatgacttgggctttggaagtagctgttttaatgaagaagtccgaaacatatgcacctttattctgtcttccgtctttccataaattttgcaaaggccttttagccaacagtaagactctgtttttttttttctattttgtttatcaatccttaaaagggtctttggtaatgggagatggtcatcaatcgagctcttttcctgacctgcagatgtgtaatcctcattttaatgacagatacacagtcttgattttttttcattcttagtattagaaaaatgttttg

SEQ ID NO: 15812 - DNA, 2300 bp, Homo sapien
ttataattcattatcttatttaagcctcacaacaaccttacatgttagataggtatcatcctcattttatgcaagagacaaccaaggcttggagatcaagtaatttgtgcaaaggcacacatacttttcagtgctggagctgggatttgagcccagatctttttttaacttgtattctctgctgccttatggtactactgtgtcaccagaaaatgatacaaacatttaactcttaatagtaaaggtagtataggagataagtaaacatgatgaaaacaggaagtgaagatatgtttaaatattggcagacttcagttatctttgtgtttctgaattagtcaagtgcttattttatttgctcatctaataagagcttactgtggcgtacatataaagttcacaccctgtcagaaaagattataagctctcttacatttcagtctcctttcagaaagtaatggtatgctatgatttatatagacgcatgttaaatgtgctatttttaggtacataaggaatgtcttttcattagtttaaaaaagttatggtccattgagttaatattttaatgcttatagacttagtatactcagaaaatattctcatacatttttcttgaaattccatagatttaattttcccttatgttcgaagtacttagctttatgaataagcgaactctgaatattagaagatactccttatggagccgtagtcattttagtatgctaggttttgaatttcatgaagtttcagattgagatcctttataagtaatgacttgtaccagttagatatccaagtttaattggacctattgtctgcattctgtattaacagtgattgcagtaagtgcagatcaaggtgtccaactgagtgagctcatgcaaagttttatgtttagtatttttgggagcaaggaaagactaataaactctaaatgaaatatatacagtatacaaacactgctgtcacttttacaccatagaggggcaaagcgtagaggaataggttagtttctggccttgccagtgtcctaaacttttctaaaagattcaggttctaaaaggtggagaaagcatttttagtaaatatcatagaagtgattttctttttttttttcctcaaagttgttcctctcaggagaaaatcagtaggggaagaacttacttggatttttcatatgctataacagattattttgttgtcttctttcttaatagtttatgattgatggctgaaagagtaacactcgtgagaagtcttgtaactcagctctgttttacttatgaggcagttgaagcgtagagcagatacttagatgaggacacacttttacccttggctgtaccctacttgtttactaataagcatcaggtattattctaaacagtacctaaattttaaatagattatgaactacaactttccgatataacgttattgcatttctgataccttttattttcttaaaatgtcttcttttttactttttaaaattttgattgctacctttacaattaaggcatcttcaatggggtcttcaatactacagtacctaatcagtacttagaaaataacttggtaagacattgcctgtccctgacatgctgccagtgttttttatttttatgataggaaaggctgaaatgttttgactgattaaccctctccatgggggagaatttagaaagaattattcttattatcaagtcatgtgaggagaacactggaccagagtaaccaattgtcctgttttgcctgggacaggaggctttcaatgctaaaaccagcaaagtcaccctaatcccagtagttattcgtatttctgaatgggtctttagaacagtagaagagactgaaaagttggcatttcatccattgagaatctcttcccagtgaaagacttcttattagacggctgagtgcttacatataatatatagtacatattacattaaatacaatagtaatggttaaatgtaaaatttgggagaagagaggcttgtttaaagaaagatttatttatgttatttaaagttctaatcttaaacttttctctttttatagaactgatagtgcatcagctgacccaggtaatttaaaatattcttcatccagagatagaggtggttcttcctcttacggactgcaaccttcaaattcagctgtggtgtctcggcaaaggcacgatgataccagagtccacgctgacatacagaatgacgaaaagggtatatatattttcttattgctacaagcatgttttttgaacctacctatcccaccttcttgccttc

SEQ ID NO: 15813 - DNA, 2300 bp, Homo sapien
gtttgcttggaagcgttctttgccgaagagtttaggagcgatcgtgactggttagtgcaagccattccgccgggtctggatggtgagtcatgccagtgtgtcctgtgcgaacacggactacccgcctgctcccggcatcttgccctccccaggacccctgaaacggaggctaaacgattcacccaaggtcaccaaatacaagagaaaaggagtgtggccaggcacggtggctcatgcctgtaatcctagcactttgggaggctgaggtgtgtggatcacctgaggtcaggagttcgagaccagcctggccaacatggtgaaaccccatctctaccaaaatacaaaaaattagccgggtgcggtggtgggtgcctgtagtcccagttactttggaggctgaggcaggagattcacttgaacctggggggcagatgttgcagtgagccgagatcatgccattgcactatagcctgggcaaaagagcaaaacttcatcaaaaaaagaaaaaaagagggccgggcgtggtggctgacgcctgtaatcccagcactttgggaggctgagacgggcggatcgcgaggtcaggagttcgagaccagcctggctaacgtggtgaaaccctgtctctactaaaaatacaaaaaattagccaggagtggtggcatgcgtctgtagtcccagctagtcaggaagctgaggcaggagaatcgcttgaacccgggaggtggaggttgtggtgagccgctgagatcgcgccactgtactccagcctgggccatagagcgagactccatcttaaaaaaaaaaaaaaaatagaaacagagtggaaatctgaacccgtgtggctcgggatggtctctactctctcatcttgaaagaccccatcagctaagacaaggatccagttgcatttgggaaatttgaggctctacttacaagtgttactgctggttcgccgcgcacaggaacgctgagaacaccatcaccctggcctcatcgaacgactccagagaggggcccacatctgctcaacccaggagaaagctgaggtcttccaagtgttcttccccaacatcttaggtctgttcccactgactccaatctgaagagggtgatgttccctgctgtctgttctcactttgatcaggaccactgtggactggcgtgtacccacctctttttgtagaaactcatcccaatccctgagcctaatggttaaagttcaacccatgcctttcccaatggggtgggtccacagggactagtggcctctgctggggacaggccgctcaggtcactgggctttgatctggcaaacaggagcacaagtctgccagggagctacaaaaactttacggtggggctgtgtgagcaccaggggattacgcggggggtgggggcgagtggatgagagcagagtcccggtttctttcatggggttgaccctgtggtttggggctccgggacactcagtaccaggcacaaagccacggtgtgcgtgtgaggagggactgacaggcaggctcagaagtacaggaatgggactggccaaagcgctgctgggtagacaggctgggggagcagggagcttctgtccacccaccagggctcctgaagtcacagagtccttgcttgcctcaaaataggtgcgatttgattcattcatcctccccggaaacaagatgccctgtggcttgggacacttccaggtcatgccggctgtcttggcataaacattaacggggccacctttctttctttcttttcttttcttttttttttaggcagagtttcacttctgttgcctgggctagagtgcaatggcgtgatctcagctcactgcaacctctgcctcccaggttcaagcaattctcctgcctcagcctcctgagtagctgggattacagttgcccaccaccatgcccagcttcgccgtccaagagcctggggccgtggggggcggggctgcctgctatcggccccgccccgccgacaggacccgcctctctccccaggcccggcggggccgaccccgcctctcgctcccagcttgccgtacgacagcggcggcgcggcgggcggagccgggaggcggggaagcagtggccgtgtgagcgtgaggagctgccgccaccgcctgctcctcgtcctcctcgtcctccggggccccagcgtcgtgggccgcgcacggccctggaagagacgtcgcctcgccttcatccgcctctctcaccgcgccgctccctcgtcctgccctgcgggctcaggcggaacccggaacggccgtcctcttcccccgc

SEQ ID NO: 15814 - DNA, 2300 bp, Homo sapien
gtacccagtttatttaaggggacatgcactggaataggaaatgtcccccatctcccttcctgcaccctgctgtgctccctccaaacccaccttgctctgtgttctcaggcccccctgcttttgtctcaccaggacccatacctttcaccttgttcccttccacccctccagttagtccctatctgggtaagggtcttcccttgagctccagggggtggaacccaatgtttacattctcttctgtctctgcccccaccccatgcagcgctttgaggaattggaaaagaacctgctgttgtacctgggcctgttttctgccttgttatttgatgagggggggatggggtaaggacgagggagggagggacagagccaggacctgggtctctgttgaagcagtctgctgtcttggcaagtaggtacctcttagctttgggtccatctctcagtcactcatcagacactggttgagctcctgctccatctttgcctgggatctgctgtctccattgtcactggctgcctggagctctctatgtaccacgtgcagcacccggatctccttcccaaagtgctcatgcaactcctggaagctggagggggtactcacagtggctagaaagccactgtcctctggggatgagatgggttcttggccagttgcctggcacagctcccagtattgggttttggtggggggggaggggggacagcagcccagccagccgcctccagctcgcgccagccagtgcccacagccaagtctccagctcttcctgggtttctgcagccagcttgtaggcccgcccacctgtgccctccaccccaggggtcaggatggtaaaggcatagggttctgcagccttaaggtgtggttccacctggcagttctctaacaggatgaggctcaggggtgcatggtcggtctagtgttctaggtagaagaggaggtttcctcggaggatgaaccatcggcgctggtagctgaggtttcgggtccccttctttagcagaatgccttcctggtctggggcctgtgttctgtaaccatggaagaaactgagcacggactttctgtgcagttttcatcgtgatccaatatgggaggaaacccctagggagagagaagtggcccatctagttgcctgggggaagagtaggggaactctcatgctgtcctcgtctggcttcagcacgtgctgcctgcgcacagtcttggcttagggggatgcaggctccgagtgtcaagagctaggggtcccagcacaggggctgatccccgctacctccccaattcccccttctgcttgggccacattccgctacctgggcaggagttgctaggccctgtttgctcaggggggcttcatgctgcagagaggcactgttgcccttttccaggcctacctgagagcagggcacaaggggcttctggcctgagtactggcgccaatgccacctctccagtgatggctctcccacctcagaaaccaggaactcgcccagggtatgggcgtgggacaaattatttcccctgggtcctaaagggaggtgtgttcagaaagtgcccggagagccgtccaggggccccaggctggccatcgggagagtcaggcttcccctcggagaggcaaggctgcacctctcaggctaggagggctgaccactggaccataggaatgggaaggcaggatttctaacgagacggtaggggcgctgagcccttagccctgggggaagggtgacttgaacccaggacaggaaaacggagcagcaacccactgaccctgctcggactttgcccctccatcctgaccctgggcggccctttaagcagatgcgctccagtttttctccagagcctctactgcttgaatgacggactcgaagctacttccggccatttctcacgcccagtcagagtccaggaattcttaggttccctcttctcaccattgtcctcccacgtgactgacgtcacttctggcgggagagagggtggaggcgtcttcgctcgcttatcgcatacttccgcccgctcttccagttagttccctaacccgagtgaagccacttccgggcttcccgggcgccttccgcagtcctcttccgggtgatggcggccgggtgccccggatgtagccctggcgcaagcatctcttcttttttccacctcgccttccgcggattcccaggtgagtgcgcgagggtgggaccgcccgaatccccgtggccctctaagttgtacacagcccgggacagttggggctcaccacacggaattgggagttcggagcagg

SEQ ID NO: 15815 - DNA, 2300 bp, Homo sapien
cagttttgtgtggagcagtgggtgaaaccctaactggagaatgggagaaaagaaattgaagacagtgagtctataggtaaggaaagaaacagtgtggtatttggagggaagagaggggtaaagagacttttttttgtttgttttgagacagagcttgactgtcgcccaggctggagtgcagtggtgtgatcttggctcactgcaacctctgcctcccagattcccagattcaagtgattctcccacctcagcctcccaagtacctgggatcacaggtgcccgccaccacacctggctaatttttgtatttttggtagagacggggttttgccatgttggccaggctggtctcgaactcctgacctcaggtgatccacccaccttggcctcccaaagtgctaggattacaggcgcgagctactgcgcctggtgaagagactttttttttttttaaactcaaataacagcatgtgggtatgcttgtgggaacggtggagagagaaattgatagtgcaggagcaaggggagggttgttggagtggtggcctgtacacgcgagaggggatgggatcctgggcccaagtggaaaggaagtgcttgccaggatcacagactcttcacccatagcaacagggagaaggcagggacacggaagcaggcaggtgggtgatgggtgtgggtgcttgtggaagttacatatttattttaatatgcattaggtaaaataaccatatcaaacctgtcatttcgtggatgcttttgcaaagtggagaaaaaatgtcaactaaatagtagggtggtatgcagataaaatacaaatgaagatcacacttgaatgcctggagttttgggaaaagctattctgggaagtggtcaggaggaggatgtgtgagactggaggcagggagaggatctgggaggtcattttttatgggcaagaaatggaggtctgagctgcgaatggctgtggaggtggagaggagcaggcaggaatggaattcagggtgcagcgctgcttaggcttggagtaaggggctcttttctgatgtggggctgagtgaatagaagtcctggacacggcagtggggcaccctcaagaagagcagatctagggtacagattttattcttttggatgcagagacaggagaaagggctgaggcacagctggcttccaagccttccccaagaaccatgaaatccagtgagaccgataaggcaggccctgccctggggagctactgctttggggtgacaaagacatttagtgctagaggagggctgatgctgcagctgtggaaagcttcctggagaaaatgacctggaaggtttctgggatgtggctgaggaaggagggcgagggtgcagcctgtgctgggatggccaggagcatgtggagtatgtagccaaaggcggagccccggggcctggagtgctctgctgtgggctgagcctttagctgaagctcgctcagcaggactgggcaggtggatggaggagcctggtgataaactctgggacgaatctggaactgggtttggggacagagctctcagcccgtgactgccctcacagtcttccccaacccccacaggcaacaggacctgtaccgaatcctgaaggcctacaccatctaccggcctgacgagggttactgccaggcccaggcccccgtggctgcggtcctgctcatgcacatgcctgcggaggtcagcgccctggtcctgggccgggaggggcaggggggatctcaccctacagtggtgatgggggagctccctgctccctgcttctcaggccccacccctcctccttgttcttgctcttctcagcaagccttttggtgcctggtgcagatctgcgacaagtacctcccaggttactacagtgcagggctggtgagtgtctggaggctgggtgcatccggggctgtggcgtttcctccaggctgcaggcaggtccttgccttgccccaccctggccttcccggcttctgcccacagggccggccagttctcccctgatgggggcacagctgacttggccctcttctcatggcttgtcccacctgcaggaggccattcagctggacggggagatcttttttgcactcctgcgccgggcctccccgctggcgcatcgccacctgcggcggcagcgcattgaccctgtgctctacatgacggagtggttcatgtgcatcttcgcccgcaccctgccctgggcgtcggtgctgcgtgtctgggacatgtttttctgtgaaggtacttctgtggccctccaggccatgaggggctgggg

SEQ ID NO: 15816 - DNA, 2300 bp, Homo sapien
cccgggaggcagagcttgcagtgagccgagatcgcgccactgcactccagcctgggcgacagaggagattctgtctcaaaaaaaaaaaaattagcttggtgtggtggcaggtgcctgtaatcccagttactcgggaggctgaggcagaggtttcagtgagccgagatcacgccattgcactccagcctgggcaacaagagcgaaactctgtctcaaaggaaaaaaaaaacagttttgtggctgggcgcggtggctcacgcctgtaatcccagcactttgggaggctgaggcaggcggatcacctgaggtcaggagtttgagaccagcctgaccaatatggagaaaccccgtctctactaaaaatacaaaattagccgggcattttatagggaggctgaggcaggagaattgcgtgaacctgggagacagagtttgccgtgagctgggatcgcaccattgcactgcagcctgggcaacgagagtgaaactgtctcgaaacaaacaaaaacagttttgtgtggagcagtgggtgaaaccctaactggagaatgggagaaaagaaattgaagacagtgagtctataggtaaggaaagaaacagtgtggtatttggagggaagagaggggtaaagagacttttttttgtttgttttgagacagagcttgactgtcgcccaggctggagtgcagtggtgtgatcttggctcactgcaacctctgcctcccagattcccagattcaagtgattctcccacctcagcctcccaagtacctgggatcacaggtgcccgccaccacacctggctaatttttgtatttttggtagagacggggttttgccatgttggccaggctggtctcgaactcctgacctcaggtgatccacccaccttggcctcccaaagtgctaggattacaggcgcgagctactgcgcctggtgaagagactttttttttttttaaactcaaataacagcatgtgggtatgcttgtgggaacggtggagagagaaattgatagtgcaggagcaaggggagggttgttggagtggtggcctgtacacgcgagaggggatgggatcctgggcccaagtggaaaggaagtgcttgccaggatcacagactcttcacccatagcaacagggagaaggcagggacacggaagcaggcaggtgggtgatgggtgtgggtgcttgtggaagttacatatttattttaatatgcattaggtaaaataaccatatcaaacctgtcatttcgtggatgcttttgcaaagtggagaaaaaatgtcaactaaatagtagggtggtatgcagataaaatacaaatgaagatcacacttgaatgcctggagttttgggaaaagctattctgggaagtggtcaggaggaggatgtgtgagactggaggcagggagaggatctgggaggtcattttttatgggcaagaaatggaggtctgagctgcgaatggctgtggaggtggagaggagcaggcaggaatggaattcagggtgcagcgctgcttaggcttggagtaaggggctcttttctgatgtggggctgagtgaatagaagtcctggacacggcagtggggcaccctcaagaagagcagatctagggtacagattttattcttttggatgcagagacaggagaaagggctgaggcacagctggcttccaagccttccccaagaaccatgaaatccagtgagaccgataaggcaggccctgccctggggagctactgctttggggtgacaaagacatttagtgctagaggagggctgatgctgcagctgtggaaagcttcctggagaaaatgacctggaaggtttctgggatgtggctgaggaaggagggcgagggtgcagcctgtgctgggatggccaggagcatgtggagtatgtagccaaaggcggagccccggggcctggagtgctctgctgtgggctgagcctttagctgaagctcgctcagcaggactgggcaggtggatggaggagcctggtgataaactctgggacgaatctggaactgggtttggggacagagctctcagcccgtgactgccctcacagtcttccccaacccccacaggcaacaggacctgtaccgaatcctgaaggcctacaccatctaccggcctgacgagggttactgccaggcccaggcccccgtggctgcggtcctgctcatgcacatgcctgcggaggtcagcgccctggtcctgggccgggaggggcaggggggatctcaccctacagtggtgatgggggagctccctgctccctgcttc

SEQ ID NO: 15817 - DNA, 2300 bp, Homo sapien
ggggttcccgggccgggcccgtcgtggtggtggctccgggacctccagtgactacggccacttcggcccccgtcaccctggtggcccccggggaggcgcggcccgcctgggtcccggggtcggccgagacctctgctccggccccggccccagccccggccccagccccggctgtcacgggcagcacggtggtggtgctgaccctggaggcctcgcccgaagccccaaagccgcagctcccctccggcccggaatccccagagcccgcggcagtggctggagttgagacatcgagggctctggccgcaggggcagactcgccgaagacagaggaggctcgaccctcacccgccccaggaccagggacccccaccgggacccctaccaggaccccttccagaacggctcctggtgccctgaccgccaaacccccgcttgcccccaagccgggaaccacagtggcctcaggagtgactgcacggagtgcatcaggacaagtgacaggtgggcatggagctgccgcagcaacatcagcatcagcaggacaggctcctgaggacccctcaggccctggcacaggcccctctgggacttgtgaggctccggtagctgtcgtgaccgtgaccccagctccggagcctgctgaaaactctcaagacctgggctccacgtccagcctgggacctggcatctctgggcctcgagggcaggccccggacacgctgagttacttggactccgtgagcctcatgtctgggaccttggagtccttggcggatgatgtgagctccatgggctcagattcagagataaacgggctggccctgcgcaagacggacaagtatggcttccttgggggcagccagtactcgggcagcctgtgagtaccagtgggcacccagcgggaccgcctcggggaagcaaaggttgggggagggcgaaacgaaaacgatacactttgcccagactctggcagcccagcctcctctgaggatccacggggtgatcagcgcgagctgccgtgtcttgagcatcctgaggtgcctgtgacattggcatgttagtggagtttcagaccaggggtcaagaggtctgggtttaagccttgcctttgatgggttgtgtgcccttgagctagtggcttccccatttccgtgcctcagttttttcctctataaagtggattgaatgagatgatacctgaggtcatccctgctctttgatggggaactccagctacaggccggatattctggagggttggttgggcgagggttctggtagagacccttggtcccttagggtggatagcctgggaggggtgcaggcatctcccttcccccatagccctaggtcccagggatggagtagagaggtggggaagtctggctgatggaagggagactgtgcagtcaggatcccgctgtgaaacagggcagtcttgtatctgcactgaagtaaagggtgggagaggcctcttccccatttcctcatctccccagccgggctgactctttcctagttctctccggggcctgagtcactcccgaggtagggggtgattgcctctgacttcttccttccccctctctggatcctgcccgttgttcctgtgcccctttgacctgctgggccagtcagcctacagcatctcctgggcccccaggtgtcaggccccaggtgctaaggataaaatagtcctttcaaggagccaatcatctggagagaaagaaaagtacttaaacagttggtttcaatagaagacctcgggtttagcctagagatctccagagggtttcctgaggcacctagagcagggagtcagctgaacctgctctgaatcgtggagagtaagtaggattgatttagtcttggctatgtgtgcagggatcgggggaagccctgtgggagagttttccaggcagggttcatgagccaaccaaaatcagaaagcctttgattgggtaccaacattcagggtcttacatgggaaagcaactgaggtttgaccctggtgctttctaggcacaaggactcggtttatagatgaagaaacaattagtgcagttgagtgaattgtccccctcaaataatctggatctgtgtgaccagtggctctctcctcaatagcaggctgtcctgaggaactcgggctgaacttagtttgggggagtccctcttgtgtgccaggcactatgccgggtgctgtttctttgctttgtagctttgtccctgtaagatcagcttcaatgccagagaactctacctcttgggcaagactgactgtaatccatgttact

SEQ ID NO: 15818 - DNA, 2300 bp, Homo sapien
aaagaatagtaacacacatatggggagttcatggtattagggattcatggatttggggtttgagatccccactagaagaaatggagggggtactcagagggataaggtctgaggaactggagcctgggttctggggaggagctcagatagatgggaactgaggagagggacttggaggttgggattcccgcaggaaatgggtgaagcagagatatgggttgcttataggatctgggggctctggctattgccacctgggcctggagtgttggggttagttgggggccgagatcggagaattatagagtaaaggatgagagtactgggtcagggcactggatctgtggtggggctcagggtcccacagaccaccagagtgtggggctcaggagctgaacgaagaataggggaccggaaaggactcgagagggggcagcgcggcactcattggttgagggctgcactaatgcccccgccccttctccgtgctgtccccagctgtcaccctcccataaggcttgtctccggttgtcaccgactatccctgggctggcaccgcctgctggcagcatctttgccctttggatgctcccattggctgagacagctatctattttcctgtcctgtggccaaagtgggagaacacgatcattggctgacggggcgaattaatctctagcttgccccgcctcctcccagctgtcattccttactgaccattttgggagacctaaagaattcttcagctcttcctattgactgcggatgctgtctgtcaccgcctaaatagacatcactgcctgtcaatttgacctccacctgctccccttttcattggctccctttttaccattcctattggttaagaagcctccaggccccacctcttactcgcacagccctgcctcctcctccgcccttccgcggtcattcacccttcagtcatattcattggccaggaggttcagacccctgcgtttctattggttatttctttcgtcccatcgccccctgcctttcctcgtcctctgattggtcttacagccctagctttctccgtttcctctttccagatgacccacccctttttcgcctccagccccgcccacgattccaacgattggcagaagcccagttctctctctcccactattcgtccaaatcctctgactaggcgggagaaaaaaggagcgcgatgagccagtccgcgcgcaggcgtggaacgccgagacgctggcgcggagccggctctgcggcgtgtgcgcaggcgcgaggtcggcggctcgcccccaagcaggagggagggggcggtggcgagagcgcgcgagggggtgagagggctcgagagagaccccggcgcgcggcgccccccgacccctgccccgcctctgcgcgcccagcggccgctccgcccccggcgcgcgccgagccgcgcccttcgccctctcccctttctcggctggcctcgccgggaggcccgaggggcggcgccttctgcggcctccccggcggggggatgtgaggggcggcccgcggccatggagacgggcacggcgcccctggtggccccgccgcgccgtcatggcgcccccgcggccccctcgccgccgccccggggttcccgggccgggcccgtcgtggtggtggctccgggacctccagtgactacggccacttcggcccccgtcaccctggtggcccccggggaggcgcggcccgcctgggtcccggggtcggccgagacctctgctccggccccggccccagccccggccccagccccggctgtcacgggcagcacggtggtggtgctgaccctggaggcctcgcccgaagccccaaagccgcagctcccctccggcccggaatccccagagcccgcggcagtggctggagttgagacatcgagggctctggccgcaggggcagactcgccgaagacagaggaggctcgaccctcacccgccccaggaccagggacccccaccgggacccctaccaggaccccttccagaacggctcctggtgccctgaccgccaaacccccgcttgcccccaagccgggaaccacagtggcctcaggagtgactgcacggagtgcatcaggacaagtgacaggtgggcatggagctgccgcagcaacatcagcatcagcaggacaggctcctgaggacccctcaggccctggcacaggcccctctgggacttgtgaggctccggtagctgtcgtgaccgtgaccccagctccggagcctgctgaaaactctcaagacctgggctccacgtccagcctgggacc

SEQ ID NO: 15819 - DNA, 2300 bp, Homo sapien
accagtacccagagaaaatattctagactcatactagatcacatccttcttctgcatgaaacctttccaaggttccccagggtctccgtcctgtgcctggcaaaggcccctcaggggctggtcaccagccccatcacaattctggccacctgaacacttctgatcttccgctctccaggcctttgctcaggccatgccctccgcccagcacatctgctcctccacctgcacctgactccctggccctcgtgaagccactcccatactcctagacagggctgctgcgccctccacttctgggctcctgaccagctctggtatgtcagtttctgcattcattcctgtctctattagttataaggcaagttctgtgggatgggaactacatctcccttttacagaggggaaaccaaggcccagcacaaaacctgagaccacaaagcatcttgcctcaaaaaatccctcttggctcggcgcggtggctcatgcctgtaatcccagcactttgagcactttgggaggtcgagacgggtggatcatctgaagtcggaattcaagaccagcctggccaacatggtgaaacgccatctctactaaaaatacaaaaaattagatgccgggcacggtggctcacgcctgtaatcccagcactttgggaggccgaggcaggcagatcacaaggtcaggagatcgagatcatcctggctaacgcggggaaaccccgtctctactaaaaatacaaaaaaattaggcgggcgtggtgacacgcgcctgtagtcccagctactcgggaggctgaagcaggagaatcacttgaacccgggaggcggaggttacagtgagccaagatcacgccactgcactccagcccggataacaaaacgagacttcatctcaaaaaaaaaaaaaaaaagtagctgggcatggtggcgggtgcctggaatcccagctactcaggaggctgaggcagaagtatcgcttgaacccagaaggcggaggttgcagtaagccgagatcgcaccattgcactcccacctgggtgacaagagcaagactccatctcaaaaaaaaaaaaaaagaaagaaaagaaaaaaaaattcccctctccttgaagggaggtaggagacccacctgatccctcagcttccacagatggctctttctcaccaccctcacacttacacacacttgactatgaactccaccatgtgggggtggagggattgtgtctgccaaagtacatccacaaagcccagcctagcacgtggcacactgtgtgtgttcaatacatgtttactgggtttattttattaatttaaaatagagacgggggccaggcgcagtggctcacacctgtaatcccagcactttgggaggcctaggtggatggatcaccaggtcagaagattgagaccactctggccgacacggtgaaaccctgtctctactaaaaatacagaaaaaaaaaattagcctggcttcgtggcacacctataatcccagctactcgggaggccaagataggagaatcacttgaacaggggaggtggaggttgcagtgaaccgagatcacactactggcactctagcctgggagacagagcgagactgtctaaaaaaaaaaaaaagggagacaggggtctcactatgttgcccaggctggtcctgaactcctggcctcaagcaatcctcctgcctcagcttcccaaagtgctgggattacaggtgtgaaccactgcacccagacgtttactgggtttaaatctgagcccaccccactcaggggtacaggatctggttcatttatctcccagaatgatgccttgggttgcgtcccctctaaactctggcacattccagcccctctttgggagaaagaacatctcttcttgcccaggccctagtgagacatgcatcgcaagacatgctccccccttcctccccgctgggctccagctgctgccagccctccaagaaaggagaggccctgagttgggctattttggtatctggggtgggcacccgcagggctaaggttaccttggtatgttaagggctccctggggcaggactatataaccccagagggactgccccatgctgactccttgcttctttccagccggagccgctgccttgccccccggagactgaagacatggtgagtgagaatcctccaacccctgcccagatcccttagacctcagggcagcctcaccctttgaaagaaagtagctggttcccagtccaacaaaaagttaaaaggatgctcatctctttctcggcatcactgatggaaa

SEQ ID NO: 15820 - DNA, 2300 bp, Homo sapien
cctgactcagcctcccaaagtgctgggattacaggcatgagccaccgcgcctggcctacttatttatttttttgagacggagtcttgccctgtcgcccaggctggagtgcagtggcaggatcttggctcactgcaacctacgcctctcaggttctagcaattctcctgcctcagcctccctagtagctgtgattacaggcgtgcaccaccatgcctggctaatttttgtattcttagtagagacgggggtttcaccatgttggccaggctggtctcgaactcctggcctcaagtgatccgactgccctgtcctcccaaaatgctggaattacaggcatgagccaccgcacccagcccccctttccagattcttaacagtccctagatggtattaagtagcatttttgtttgtttgttttttgttttttgagacggagtcttgctctgtcaccaggctggagtgcagtggcacgatcttggctcgctgcaacctccacctcctgggttcaagcaattctgctttagcctcctgagtagctgggactacaggcaatgccaccatgcccagctaattttttgtatttttagtagagatggggtttcaccatgttggccaggatggtctcaatctcttgacctcgtgatctgcccgactcagcctcccaaagtgctgggattacaggtgtgagccaccgcagcggtcctgaggtagatttgtttgtttgtttgtttgtttgagatagggtcttgctctgttgcccaggatggagtgtagcggtgcaatctcggctcactgcaacctccacctcctgggctcaagcaattctcttgcctcagattcccaagtagctggaattataggtacgcaccaccatgcctggctaatttttgtatttttgctagacagggtctcgccatgttggccaggctggtcttgaactcctggcctcaagtgatccacccgcctcggcctcccaaagtgctgggattacaggtgtgagccaccacgccagccaggtgctgggaatctgaaggagggacaatgaccctgcctagggtaggtggagagattgcatagaggcagagcccttggaaagaaacacttgaaggatgaggaagagtttaactgattcagaaaaaggaaaagctcaatgtgggtagagagccaaggacgtttggaagagtgagagatggggtgatgaggccagctgagggaggctttggcagtcaggccagaattcagacttgactctgagttactggggagttcctgaaggattttgagcagtggagttctttggccaggattctgaaggaaaatctctcgggcagtggtgtccaaagacctggagtccttttatgaatccattgtctgagctggaaaatgtatggcttcacccactcccaatcccatcatggcttctggtccacttttttctttttctttttttgaaacagcgttggcctggcatggtggctcacgcccgtaatcccagcagtttgggaggccgaggcgggcagatcacgaggtcaggagatcgaaaccatcctggctaacacggtgaaatctcgtctctactaaaaacacaaaaaaattagccaggcgcggtagcaggtgcctgtagtcccagctactcgggaggctgaggcaggagaatggcgggaacccgggaggtggagcttgcagtgagccgagatggcgccactacactccagcctgggcaacagagcgagactccgtctcaaaaaaagaaagaaagaaagaaaaagaaacagggttttgctgtgttgctcaggctggagtgtagtggtgtgatcacagctcactgcagtcttgatcttctgggctcatgcaatcctcccacctcagcctccccagtagctgggactacaggattgtaccaacatgcctggctaattttttaatgttttgtagagatggtagaggggcacgtccctctgttgcccaggctggtctggaactccttggctcaagctgtcctccctcctccgcctcccaaagtgctgagattacaggcgagagccaccttgcccgtcctgggaactgttttctaatcagctcatcaaaaccttcatctcccctgctaacaaagggagccacttccttcctctctgcacataccccatgtctcaccacgatgatggagctacagtgggacttggaatccagatgtgtgaaggatggagggttgaaggtacgtagacaggtgatgggcaaaggggtccaggaggtggcaaccccaagtgttcttggccttggccttccccacctctctggg

SEQ ID NO: 15821 - DNA, 2300 bp, Homo sapien
gtgaggcaccacacccggccttttaaattttatttatttatttttttgagacgcagtctgactctgtcacccaggctggaatgcagtggcgtgatctcggctctttccaacctccgcctctcaggttcaagtgatactcctgcctcagcctcctgagtagctgggattacaggcccgtgccaccacgccctgctaagttttgtatttttagtagagacagggtttcaccatgttggccagattggtctcaaactcctgacctcatgtaattcacctgcctcggcctcccaaagtgttgggattacaggtgtgagccactgcacctggccgggtccatataactaccttaacagtctctctttctttctcttttttttttagatggggtctcgctctattacccaggctgaagggcagtgtcacaaatatggtttactgcagcctcaacctcctgggctcaggtgatcctcctgcctcagtctccagtgtagccaggaccacagatatgtgctaccatgcgctgctaaatttttgttttttttttgtagagacaaggtccacttttttgcctaggctggtttcgaactagtggcctcaagtgatcctcccaccttggcctcccaaagtgctgggattacaggcatgagccactgggcccagcccattctctctctctttttttttttttttaaagagacagggtctcgctctgttgcccagcatggagtacagtggcacgatccacgatcatggctcactgcatccttgaatgcccaggttcagggaatcctctcagctgggattacaggggcaggccaccaggcccagctaaattctctaatttcagtgatttgtgtacttgctcctttagactggtagctctccaaggacaaatcttgcaggtgtttcaactttttatccccaactcttggcttagcactaagatgctaataaatgtgaattaatgcataaaccacagttacccccaccatcattggcagaggggctgaagacacctccagacactctctccaccccaaaaccaagcccgcccagagagcggatactgggatcttgctcctagggcctgggaacctggaaacacagctccagccaggggcccaccaggatgggaaacagggcttgttcttcagcctctccctgagcctggcctctatagggctgccgacctgtccggagtctttctggccgcctctttctttgtgtctctttctctttgtctctgcccgtttcgctcactatcgtcttttgttcctctgcttctgggcctgttactctccaggctcccagcctcttactgctcctcggactctgcgtcaatgactttatctcttatccgtttctacgtctctgtctctagcggctaatctttggctccccttatttttggtcagccgctgtccctcggtctctctctgcctttgcgtcctctgtgactcagggctctgatgtgagtctctggctcagggtctctgttccgggccccaggtctgattccatctctccagcagcatttacccggtgtctgcctctagcctctgctcctgcctcggtctccccagcccagcccccattccatacccacccccaccccgggccctcggcctctcggaccagccccgctttgtttcccacgtctcggcgccccgccccgccccgtctggggtctccgccgccctttgtctgccttggtctctcccccacccctttccccgggtccgtctttggatccctctttctttgtctctcccaggtcggagtggctggcgctgtcggccggccggggaggtcggcgcgggtggctggagacacacagccacaattacgaagagcctcgggcctcaccacccagctgcagcccaggaggcacacggttaataccaccgagttcgggccgccggcctcggcttagagtagcccctgggccgcacgctgccgcccgccggccacagagctaccgccgacgcgggcgacccccacaggcccgcagctcctccaaggtcctagagcggctccgtgcggccccgcgcttccgcttcccgtccccgcccccggtggccgcccccgggacgcctgggtccgagcccgctcccggcttggcgcggagcctgcatcccggagccgctggcggctcgggcgcctgcaccccgctgaggagctccggagggcgccggggtggcggagccggaggcggccggcaaggtgagagcggcggctgcgcgctgggaggagcagcaggtgcaggggcggccggcggcgcgggcagggggcaccgggag

SEQ ID NO: 15822 - DNA, 2300 bp, Homo sapien
ctcggcctcccaaagtgttgggattacaggtgtgagccactgcacctggccgggtccatataactaccttaacagtctctctttctttctcttttttttttagatggggtctcgctctattacccaggctgaagggcagtgtcacaaatatggtttactgcagcctcaacctcctgggctcaggtgatcctcctgcctcagtctccagtgtagccaggaccacagatatgtgctaccatgcgctgctaaatttttgttttttttttgtagagacaaggtccacttttttgcctaggctggtttcgaactagtggcctcaagtgatcctcccaccttggcctcccaaagtgctgggattacaggcatgagccactgggcccagcccattctctctctctttttttttttttttaaagagacagggtctcgctctgttgcccagcatggagtacagtggcacgatccacgatcatggctcactgcatccttgaatgcccaggttcagggaatcctctcagctgggattacaggggcaggccaccaggcccagctaaattctctaatttcagtgatttgtgtacttgctcctttagactggtagctctccaaggacaaatcttgcaggtgtttcaactttttatccccaactcttggcttagcactaagatgctaataaatgtgaattaatgcataaaccacagttacccccaccatcattggcagaggggctgaagacacctccagacactctctccaccccaaaaccaagcccgcccagagagcggatactgggatcttgctcctagggcctgggaacctggaaacacagctccagccaggggcccaccaggatgggaaacagggcttgttcttcagcctctccctgagcctggcctctatagggctgccgacctgtccggagtctttctggccgcctctttctttgtgtctctttctctttgtctctgcccgtttcgctcactatcgtcttttgttcctctgcttctgggcctgttactctccaggctcccagcctcttactgctcctcggactctgcgtcaatgactttatctcttatccgtttctacgtctctgtctctagcggctaatctttggctccccttatttttggtcagccgctgtccctcggtctctctctgcctttgcgtcctctgtgactcagggctctgatgtgagtctctggctcagggtctctgttccgggccccaggtctgattccatctctccagcagcatttacccggtgtctgcctctagcctctgctcctgcctcggtctccccagcccagcccccattccatacccacccccaccccgggccctcggcctctcggaccagccccgctttgtttcccacgtctcggcgccccgccccgccccgtctggggtctccgccgccctttgtctgccttggtctctcccccacccctttccccgggtccgtctttggatccctctttctttgtctctcccaggtcggagtggctggcgctgtcggccggccggggaggtcggcgcgggtggctggagacacacagccacaattacgaagagcctcgggcctcaccacccagctgcagcccaggaggcacacggttaataccaccgagttcgggccgccggcctcggcttagagtagcccctgggccgcacgctgccgcccgccggccacagagctaccgccgacgcgggcgacccccacaggcccgcagctcctccaaggtcctagagcggctccgtgcggccccgcgcttccgcttcccgtccccgcccccggtggccgcccccgggacgcctgggtccgagcccgctcccggcttggcgcggagcctgcatcccggagccgctggcggctcgggcgcctgcaccccgctgaggagctccggagggcgccggggtggcggagccggaggcggccggcaaggtgagagcggcggctgcgcgctgggaggagcagcaggtgcaggggcggccggcggcgcgggcagggggcaccgggagccgcgcccgtacctgggacccgacgccgcccggtgcccgcgctggccggcagagggcagcggcagggcgccgcgggccacacatggctgcgtgaccgcgggatgctgtctgtccccttgctcagggcggcgtgccggcgatggagcgcgcggtagagccttggggcccagatctccaccgcccggaggagagggagccacagagaggcgcccgcacaggtgagggcctcggccgtgcgccgccacggacaggtaacggccggtggggactgcgatgct

SEQ ID NO: 15823 - DNA, 2300 bp, Homo sapien
ggccaagatggtgaaaccccgtctctacaaaaaatacaaaaatagcccggtgtggtggtgtgtgcctgtaatcctagctacttgggaggctgaggcaggagaatcacttgaacctgggaagcggaggttgcagtgagcctagactgtgctattgcactccaacctgggcgacagagcaagactccatctcaaaaaaaaaaaaaaaaaaaaaaaaaaactcagagaatgaatgcaaagtggcttttggggatcctgtgtgtgagtatccaggcatttgaccccttctcccagctctgggaaagagccagttttataacttcattcctgagaggtaatttggtgcaatagaagagcacaagctttgaatctgctgcttgccagctgtgtgactttgagcaaattacttaacttgtctaagcttccgtttcttcttttgtccaatggagatattattgatcccaacagggctgttgtaaagagacaacatagaacttgtaagcacttactgaatgttatttctgttttccttcatgatttctgaatcttagttgccccattcataaaatgggaaaattagatatctgctttttcaagggaagtggctgtttttcaaaggaagtggcatttgtttattccactaaaaaaaaatctatttttatatgaaatatcccaatttaattttttttttcttgagacggagtttcgctcttgttgcctaggctggagaccaatggcatgatctcggctcactgcaaccactgcctccccagttcaagcaattctcgtgcctcagcctctcgagtagctgggattacaggcatgcaccaccaagcttggctaatttttgtatttttagtagagacggggtttcaccatgttggttaggctggtctcgaaatcctgacctcaagtgatccaccggcctccgcctcccaaagtgctgggattacaggcatgagccaccgcgcccggctttgaaacgattttttttttttttttttttttttttttttgagacggagtctcgctctgtcgcccaggctggagcgcagtggcgcgatctcggctaactgcaagctcgcctcccgggttcacgccattctcctgtctcagcctcccgagtagctggcactacaggtgcccgccaccacgcccagctaattttttgtattttgtttagtagagtcggggtttcaccgtgttagccaggatggtctctatctcctgacctcgtgatccgcccgcctcggcctcctaaagtgctgggattacaggcgtgagccgccgtgcccgtccgaaaagattttttaaaagtaaaaataccctaagggccaaacaaggtacccctgtggactggatttagctttgggctgttgttcacctaggctactgattgtcagggatgctatgacatccttatcgtgtaacttaggcaaatcagtttacctccctgaacttcagtgagctcatctgtaaaatggatcaggacccatcgttatgcggatcaaatgagaccaggtatgtaagacgctgaacagcgctggcgcatggtaagcaccccacgcatgacgcgacagcggtagcttgggtggatgttgaattggttaggatgtattcaaggatatcccagaggccagcggaataggcgaagccgagaaagatggagaaaagacggcagaggagataaagagggaatggaagaagtgaggaggcaacagggtccgccctccaggcggggcgccagggagaggcccaggccggggcgggagcgcacgtggcctatttcgggcggagcagaggcactgggcgcagcggagacctccaagccggccccaggagacgggccgcgaggttaggttggaactcggcggcaaggaccttgaacgccgggctggggcggctccaggtgcttgggagtcgggggactgcggaggacgccaagtctgagctcgccgccctctccgagccgtttgggccggacgcctgggtccttcgggctccgccccagggggtggggctatatgttcggaccaatgaccggccgtccctgcggtcccgccccctccccgcccccggagccgcggcctcgctgagtgcccagccgcccggcgcccaggcctggggcaccgcgagtgccgaaccttcggctggtgagtgcgcaccccctccccggggtttccgccccgatcccgcctccagcccgtgccccagagctccaggtcgccgacccgggccctggggagtgactcagcgcaaggatggtggcgacttgcgggggctggagattcgaactgttcaag

SEQ ID NO: 15824 - DNA, 2300 bp, Homo sapien
atcttagttgccccattcataaaatgggaaaattagatatctgctttttcaagggaagtggctgtttttcaaaggaagtggcatttgtttattccactaaaaaaaaatctatttttatatgaaatatcccaatttaattttttttttcttgagacggagtttcgctcttgttgcctaggctggagaccaatggcatgatctcggctcactgcaaccactgcctccccagttcaagcaattctcgtgcctcagcctctcgagtagctgggattacaggcatgcaccaccaagcttggctaatttttgtatttttagtagagacggggtttcaccatgttggttaggctggtctcgaaatcctgacctcaagtgatccaccggcctccgcctcccaaagtgctgggattacaggcatgagccaccgcgcccggctttgaaacgattttttttttttttttttttttttttttttgagacggagtctcgctctgtcgcccaggctggagcgcagtggcgcgatctcggctaactgcaagctcgcctcccgggttcacgccattctcctgtctcagcctcccgagtagctggcactacaggtgcccgccaccacgcccagctaattttttgtattttgtttagtagagtcggggtttcaccgtgttagccaggatggtctctatctcctgacctcgtgatccgcccgcctcggcctcctaaagtgctgggattacaggcgtgagccgccgtgcccgtccgaaaagattttttaaaagtaaaaataccctaagggccaaacaaggtacccctgtggactggatttagctttgggctgttgttcacctaggctactgattgtcagggatgctatgacatccttatcgtgtaacttaggcaaatcagtttacctccctgaacttcagtgagctcatctgtaaaatggatcaggacccatcgttatgcggatcaaatgagaccaggtatgtaagacgctgaacagcgctggcgcatggtaagcaccccacgcatgacgcgacagcggtagcttgggtggatgttgaattggttaggatgtattcaaggatatcccagaggccagcggaataggcgaagccgagaaagatggagaaaagacggcagaggagataaagagggaatggaagaagtgaggaggcaacagggtccgccctccaggcggggcgccagggagaggcccaggccggggcgggagcgcacgtggcctatttcgggcggagcagaggcactgggcgcagcggagacctccaagccggccccaggagacgggccgcgaggttaggttggaactcggcggcaaggaccttgaacgccgggctggggcggctccaggtgcttgggagtcgggggactgcggaggacgccaagtctgagctcgccgccctctccgagccgtttgggccggacgcctgggtccttcgggctccgccccagggggtggggctatatgttcggaccaatgaccggccgtccctgcggtcccgccccctccccgcccccggagccgcggcctcgctgagtgcccagccgcccggcgcccaggcctggggcaccgcgagtgccgaaccttcggctggtgagtgcgcaccccctccccggggtttccgccccgatcccgcctccagcccgtgccccagagctccaggtcgccgacccgggccctggggagtgactcagcgcaaggatggtggcgacttgcgggggctggagattcgaactgttcaaggccttgaatgctgggatgagtggggtgaacgcgagccctcggagctggtcccggggctgtgccagagcgtggggccgggctggggtggacgggagaggaccagattcggagaccagggcagggcgggagaagccacggctgcactgccttgctgggccagggccacggtgggcgggggggggggtgggggggggcgggtcctgagcttctgatccagctccccgcctcaggacaccaagatgcctggcgaacagcaggcagaggaagaggaggaggaagagatgcaggaggagatggtgctgctggtgaagggtgaggaggatgagggtgaggagaagtatgaggtggtgaaactcaagatccccatggacaacaaggaggtatgtgtcacacacaccctggggcacactgtccccaaacctggtccaggcccagcctccctcagatagaagccagggatcttgcccctacttttcccagaatctcggatctaaaacctcaggattggcccatccttctgccctactgcctgggcttccat

SEQ ID NO: 15825 - DNA, 2300 bp, Homo sapien
gtttcaccatgttgcccaggctggtctcaaactcctgatctcaagtgatctgcccacctccgcctcccaaagtgctaggattacaagcatgagccactacgcccagcctttcatagtatttaaaatacagttacatttatttttttcatatttatcgccatttcaggcaatacatcatagggtctaataacagactgtgaagccaaactgcctggatttgacgccagctctaccactttactagctgttaagttatttaacctctcagtttccttatctttttttttttttttttttttttttttttgagacggagtctcgctctttcgcccaggctgaagcacagtggcgcgatctcggctcactgcaagctccacctcccaggttcacaccattctcctgcctcagcctcctgagtagctgggactacaggtgcccgccaccacacccagctaattttttgtatttttagtacagacggggtttcaccgtgttagccaggatggtctcgatctcctgacctcgtgatccgcccgcctcggcctcccaaagtgctggcattacaggcgtgagccaccgcgcccggcctcagtttccttatctttaaaatggggatgacaacaatattacctaccatatagggtttttgtgaggattaaattagttgctatgaggattaaatatgtaaaatgcttaaaacagccaccccagttccagttcattcctgaggtcccactgtattctggagacactcttgtatccttacaataaattccttgtggccggtgggggtggctcgtgcctgtaatcccagcacttcgggaggccaaggcaggaggattgctagagcccaatccagcaatcctggttcaagaccagcttaggcaacatggtgaaaccctgtctctataaaaaatttaaaaaataaaaataatagatttctttttcttgctaaaagcagtttaaacttgtttctgttgcatgtatccaatcttaactgctggataatatcatttgtataaatatacttccatgtagccattcttccgttgatagtcattttattttcaatttttttcactcttagaaacaaaactgtaatgaacttcttgcatgtgtctctctgcacatattcattaatttctctagggcatatacctagaattgcaattgtcacagccttgggattttaatttccaaaatctgactctgcctcttcctgcgctttcttacgctttcacttccagcaagctggaagcctctttaaacgtggaaatcagagatagtagccctaataagggtacaataataaatcattctttgcaagactacacctgttctagggtttcataaagatctctgctcctcccatggccaataactcagtggttctgatttgaaagcagcaaccctgtgactcgccacctcgcgtattccctggtgtgagtggagcctggagttctcgtgtgtggggtggaggagccgtgctggggacccatgaggctggagaggccggcacaggccagaccataaggggccacgtgtttcagggcaatgtacgttgcgctggggcctactgcctcccttaggacagggatggggcgacctccatcgtttcaaccacaggacacagcgatggcggggagctgaagtcctactgccgtctgatcttactccgctcttccccttcaatcccatccaaatagtgtgggggttggcctcgaggtttctcaacgtccttaagccctgatttaatacctatgcatagggcctttcatttatagggttttccacctgacgggccctcttccgctgccgtttcgctttggcgccctctggcgcccataaacgaagtgacgcgcctgcgcttcccccaccctctgcccttcgtctcttccccaggtcgaattggtacctctacctttagacacagggcctagcggaagaattccagggcctaagactagaaacgcgcgcttgaagctccctcagattggtccagtgagggaaggggagggctgtagcaaactccacaaaagtcattggtctctttcctcaggctccgccccgtgaggcaatagagaactcccgtaattggtcggagctctggaggcggggcttcgagcgtggctcgtgggttttccgtgaagtcgcggtgcagcggtgggcggcatgtctgtggccggtggggagattcgtggggacacggggggagaggacactgctgctcccggccggttcagcttcagcccggagcccacgctcgaggacatgtaagcaggcctggcccagctcggggt

SEQ ID NO: 15826 - DNA, 2300 bp, Homo sapien
cccagctacttgggaggctgaggaaggagaactgcttgaacccgggaggtggaggttgcagtgagccgagatcgcaccactgcattccagcccgggtgacagtgcgagactccatttcaaaaaacaaacaaacaaaaaaaagaattgcaaattgtactaagtgcagagagggagaagtccaaagaactaagagaatgtataaccagcaccacctgacctagtcactttttaactcaggtgaggtgattacagacataatacaatgttttcctctttcccttagagatatgaggatcctttccctgtacaataggcttaacattttgcaaaacacttttcagctgaggtttcctatggcccttccactagatcctaagcagagattgtgaccctggtttaacagaagagaagactaaggtgcagagaggctagatcacttcctcaaggtcagccagctcactgacagcaatgcagacatcatacaaggtcttttgctttcactgtattttcccactccatcatgctttctttttgcatgttttttaaattctgaaatatagcatacctacaaaaatagtgtgggaaaatatctatgtgcagttttttttttttttttttttgagacagagtctcgctctttcacccaggctggagtgcagtggtgcagtcttggctcactgcaacctctgcctcccaagttcaagcaattctcctgcctcagcctcccgagtagctgggattataggcgctcaccaccatgcccggctaatttttgtatttttagtagaaacggggtttcaccatatagatcaagctggcctcgatctcccaacctcgtgatccacccgcctcggcctcccaaagtactgggattacaggtgtgagccactgtgcccggccccgaaaatatctatgtacagtttaaagaacaaccatgtaccacgtacccaccaccagcccaatgaacagaattaaacatagcccagaagctccctatgtagccctccctagacatagcccctatgctgagtcttctattcattttcttgtcttttaaaaaagtttttattggctgggtgtggtggcttatgcctgtaatcccagcactttgggaggccgaggccagcagatcacttgaggtcaggagtttgagaccagcctggccaacgtggtgaaatcccgtctgtactaaaaacgcaaaaataagccgggtgtggtggcgcacacctgtaatcccagctattcaggaggctgaagcaggagaatcacttgaacctgggaggtggagtttttaatagatattggcaaactgcccttcatggctatataagatatatatatatatttatttacagagatataggaattttagaatagaccagtcctatgtaacccactctgttccacagatggatgagtcaaccgacgcggagagtgactccacacaaagctggtgggaaacaccattagaatccatgcaggtgtctggacttccagtcctaaatctctctttttgtgtgtgtctgtgtgtgtggggggggtgtttgtttgtttgttattgttgtttgttttagagacaggttcttgctctgtcgcccagactagagtgcagtggcgcggacgcagctcactgcagcctcgacctcctgagtcctagagttcttgaagttcctgttaacatttcattatattgatgctgcctgcagtttgctaacttaatggtagtagtttaatttctaatttctcatgctttctgttttttcccttgggctattttgccatcctggatcgatcatgtgcgctgtcaagtgacctttgggacaatcctgccgatcatgaggtttgccgagtgaccaatcttccctcgtctacaatttgctggacttggaaaagtgactggaagggagcagagttccgtcagccactgccaagaaaccatttaaattactaagagagcgaaggaaagcacgtgacgttctgcaatcccgttgcaagcggttttgcaagccggaggttgttgcaccttttagagtctaggaagcccgcctctcggtggcggagtcgtcattggatgttgcggctgtcaatcgccagggctataaataagggagtccggcggctcctctatcaggaagattgtgcatgccgtgggtctgacggcttgagtagcgctagggagaatccctgcaggtaatatttgacttttgcttcatattaatctgagtggaaaataaaagggccctcttctcctctcgcttccctgccgggcaggcgccatggcggaagcctcggcgacgggc

SEQ ID NO: 15827 - DNA, 2300 bp, Homo sapien
tgttgcccaggctggtctcaaactcctgacctcaggagttctcatgtcagcctcccaaagtgctgggattacagggatgagccaccatgcctggcctatgtttaactgttttaaagaactgttgggctaggtgcggtggctcacgtttgcaatcccagcactttgagaggctgaggcgggcaaataatttgagctcagaaattcaagaccagcctgggcaaggtagagagacccccatgtctacaaaaaataaaaaagtagtcaggtgtggtggcccgcacctgtagttccagctactcaggacgctgaggtgggagaatgactcgagcccgtgaggttgaggctgcagtgagccgagatcacaccactccagcctaggcaagagtgagaccctctctcaaaaaaaaaaaaaaaaaaaaaaaaaaaaagaaccatcaaaatgttttgcacagcagtcacgccattttacatttctgccagcaatgtgcaccaggcttccagtttcttcacatcttcactaactcttatttcctttgctttaaactctaaccatcaaagtaggtgtaaagggtatctcactgtggttttgatttgcatttctctaatgactaatagtgttaagtatcatttcatgtgcatgttggccatttatatgtcattggagaaatgtctactcaaaccgtttgctcatttagaaacttaggtaggttggtctgagtgcagtggtgtttaaaactaatttttttttgagacaaagtctcactctgtcgcccaggctggaatgcaatggtgagatcttggctcactacaacctccatctcctgggttcaagcaattcttctgcctcagcctctcaagtagctgggattacaggcatgcgccaccacgcctggctaatttttgtatttttggtagagacgggggtttctccatgttggccaggctggtctcgaactcttgacctcaggtgatccacctgcctcggcctcccacagggctaggattagaggtgtgagccaccgcaccaggccgtttaaaactaatggagcacaaccagttaccaatatctttgttccttctccactccctctgcttcacttgactagcctaaaataaataaatttaaaaaactgggcacagtggctcacacctgtaatcccagcactttgggaggccgaggcaggaggattacttgagcataggagttcaagatcagcctgggcaacatagtgaaaaaccatctcaaaaaagaaaaattagccaggcatggtggcatgcacctgtggtttcagctacttaggagcagaggtgggaggatcgcttgattctgggagttcaaggttgcattgagctgtgatcgcgccagtgcactctcgcttgggtgacagagcaagaccttgtctcaaaaaatttaaaacaaaacaaaaaaaactggttatttgtctttttattgttgaattataagagttttaaaaaatatattctggaaacaaatcccttattagagatatgatttgcaaatattttctccaattttttttttttttaaagacaaagtttcactttgtcgcccaggctggtcttgattcctggcttcaagagatgctcttacctccacctcctgaagccccaaagggctggaattacagccagtgagccactgcacccagcctccaattctttagattttacattttagaaccaaaatgggttaaatacactgttctgtaatctgctcttttctttaatagtagttcatgtacatctttcaaggtccagagaaagctctcactttctccccgttttatttttccttccctcattctttttcactgctgcatagcattccattgtaattttgccactgtttattagaccagtcctctgctgagctttacagagcccttagttgggatgttagtgagaaaccatgacagcagtggagactgtcatctccctgacatgctgtcagcttttggatgatgtgaaaatgcaagcaggcacaggaaatgtctctaacttgcttacacttcctccctgaacccctgcggtttcacaactcctgcaggcacacctccctccccgcctgccagtgtcaccagcctgttgcctctgtgagaaagtaccactgtaagaggccaaagggcatgatcattttcctctttcaccctgtctaggttgccagcaaatcccacgggcctcctgacgctgcccctggggccacaggtccctcgagtgctggaaggatgaaggattcctgcatcactgtgatggccatggcgctgctgtctgggttcttt

SEQ ID NO: 15828 - DNA, 2300 bp, Homo sapien
cttcacactggcccctgccagcctgcccttctgaagtaatgtggagccttggataagtgacagcaagacagttgagcaagaagggggaggaattacattcactctgcggggctcagatcacaccagcaagacataggtcagtcctagatcaacctgagctccaagagaagatggaatttcagaaagaaatatcagagagggccgggtgcagtggctcacgcctgtaatcctagcactttaggaggccgaggtgggcagattgcttggggccaggaattcgagaccagcccaggcaacatagcgagatccctgcctctacaaaaaatacaaaaaatacaaaaaaaaaaaaaaaaattagccaggtgtggtatcacacacctgtagtcccagctacgtgggaggatcacctgagcctggaaggtcaaggctgcagtgagctgtgatcatgccactgtaccccagcctgggtgacagagtgagaccctgtgaaagaaaagcaaaaaagaaaagaggctgggcgcagtggctcacgcctgtaatcccagcactttgggaggccaaggcgggcaggtcacgaggtcagatcgagatcatcctggctaacacgatgaaaccctgtctctactaaaaatacaaaaattagccaggcgtggtggctggcgcctgtagtcccagctgctcgggaggctgaggcaggagaatggcgtgagcctgggaagtggagcttgcagtgagcagagactgcgccactgcactccagcctgggcaacagagcaagactctgtctcaaaaaaaaaaagaaaagagagaagagaaaagaagagaagaggaggggagaggaaggggggaggagaggggaggagaggggaggggaggagagggaaagggaaggaagggaggaaggaaggaaggagagaaagaaggaagagaaagaaagatcacagaggctgctctcaaatggccctctcctaaattccttctaaaggtctgttttatttaggcaagcccttggcacaagatcagatattcagtaagtgcttattattctttgtgtttctaataggatgtcccaggggaggtttttttttgtttttttgttttgttttgttttgtttgagactgagtcttgctgtgttgcccaggctggagtgcaatggcacatctcagctcactacaacctccgcctcctgggttcaagcgattctcctgcctcagccccctgagtagctgggattacaggcatgcaccaccaagcccagctaatttttgtatttttagtagagacggggtttcgccatgttggccaggctggtctcgaactcctgacctcaggtgatctgcccacctcagcctcccaaagtgctgggattacaggtgtgagccaccgcgtccggccatttttgttttttgttttttattttttgaaatggagtcttcctctgccacccaggctggagtgcagtgtggtgcgatcttggctcactgcaacctctgcctcctgagttcaagcgattcttgcgcctcagcctcctgagtagtgggattacaggcacccaccaccacacctggctattttttgtatttttagtatagatggggttttgccatgttgcccaggctggtctcaaactcctgagctcaattgatccacctgcctcggcctcccaaagtgctgggattacaggtgtgagccaccaagcccggcctgatgtcccaggggaatttctttatgcagactcccgagccctctcccagggcctgccactcaccctcaatgacatagatcttcttctgcagctcagtgaatagatctttcagcttctcaaatgtgtccagaattttcacaaactcgctcgcgggttttgatgcaaatttgtggagggtctcctgactctccttggtctgaaaatgctttccaatctgtgagggagtggagagtgaagagctgaaatcccccaaacctcagtccagtttgctattattttcacaagagtctggccccagggagaaaggggcttggggttcagaaagaggagagggaagatatgatgcaggaagcagcaggggccctaccccgatgatgtagcggatgatgtctttggccgcatcgatgttgccactgtcagtggcctccccatccgtgatgatgataagcactttggtggcatctggccgggcccccagctcctcccggaacacctctgtcctgtgtccaggaaaggaggagatgagagactcccccaaactagggcctgaggtctctttccccacctgctcatcaagtcacctccatgctggtt

SEQ ID NO: 15829 - DNA, 2300 bp, Homo sapien
acctggcaaataacaacataccatgatgattgaatattctgtaaaaattaaatattttaatttttttttttttttttgagatggagtttcactcttgttgctcaggctggagtgcaatggcacgatctcggctcactgcaacctccatctcctgggttcaagtgattttcctgccgcagcctcccaagtagctggaattacaggcatgggccaccacgcccagctaattttgtacatttttagtagagatggggtttctccatgttggccaggctggtcttggactgccaatctcaggtgatctgcccacctcggcatcccaaagtgctgggattacaggtatgaaccaccgtgcccagccaaacattttaatatttcataattaaaaattatgaaagctgtgtagcagcattaatatataatgtatgaaaagagtagggaaaaatagtaactacattgccattgtaatcatgttaaaaatgcccataaatatattaaaaagtagaagctgctgggcacggtggctcatgcccgtaatcccagcacttttggaggccaaggtaagaggattacttgatgccaagggttttagaccagcctgggcaacacagcaagaccttgtctctacaaaaactattttttttttttttgagatggagtttcactcttgttgcccaggctggagtgcaatggcacgatcttggctcactgcaacctctgcctcctgggttcaagcaattctcctgcctcagcctcccaagtagctgggatcacaggcatgtgccaacacacgcagctaattttgtatttttagtagagatggggtttcaccatgttggccaggctggtctcgaactcctgacctcaggtgatccacccaccttggcctcccaaagtgctgagccaccgcgcttggcctacaaaaacatttttaaaaattatccagatgtggtggtgcatgcctgtagtcctagctactcgggaggctgaggtgggaggatcatttgagcccagaagttggaggctacagtgagccatgattgcatcactccactccagcctggacgatagagcaaggccctgtctctaaaaaaatttttttaataaaaaattaaaaaaattaaaaacctagaagcagccaggcacagtggtgtgcacttgtagtccctgctactcaggaagctgaggcaagagaacctcttgaggccagaagttagagtccagcctgggcaacaaagtaagacccccatctctaaaaatataaaatatggccgggggcagtggctcatgcctgcaatcccagcactttgggaggccgaggtaggaggatcacctgaggtcaggagttcgagaccagcctggccaacatggtgaaaccccaactctactaaaaatataaaaattagttgggcatggtggcatgcacctgtaatcccagctactcgggaggctgaggcaggagaatcgcttgaacccgggaggcagaggctgtagtgagccgagatcatgccactgcactccagcctgggtgatagagcgagactctgtctcaaataaataaataaataaataaataaataaataaataaataaataatataaaataggccaggagcgatggctcatgcctgtaatcccagcactttgggaggccaatgcaggcagatcaccagaggtcaggagttcgagaccagcctgactaacatggtgaaaccctatctctcccaaaaatacaaaaattagctaggcatagtggcaggtgcctgtaatcccaggtactcgggagactgaggcaggagaattgcttgaacccaggaggtggaggtggccatgagccgagatcgtgctgtagtaagtgagaccgtgccactgcactacagcctgggtgacagagcgagactctgtgtcaaaaaaaaaaaaatatatatatatatatatatacatatatatatatacacatatatatacatatatatacacatatatatataatttaaaaaaaacactagaagaaaatatgctaagggtgttattactaccattgcacaggagaggaagtgacagcacagagggatggaagtgacgtgtcacccactggacagtgacggagctgagcctgcccctgcaggtagctcatcccagagcattggcgctggctcccttaccgggaaatgaaatgagaagtcagtgcatgacatgctggtggtgacagctatattccttctgagttcatgtctccctcctgggaacaacccccgtcttctggtccggtggccatccagctgcagagtgtaagtgag

SEQ ID NO: 15830 - DNA, 2300 bp, Homo sapien
ggctggagtgcgatggcacgatcacagctcgctgcaaccttcaccttccaggttcaagcgattctcctgcctcagcctccccagtagctgggactacaggcacacaccaccacacctagctaatttttgtatttttagtagagatggggtttcatcatgttggccaggctggtcttgaactcctgacctcaggtgatctgcccacctgggcctcccaaagtgctggggttacaggtgtgagccaccgcgcctgaccagatggacaggattttaacagatgaaggtgggagagggcatccaagaagagacatgtggggagccaggatggcaccaggtgagagggatgtggctggaaggagggtgcctgggaaggagaacaggagctgaggctggaaaggaagcccaagatcacactatggggcctggaaggcttgagagtgaggagttggagcagcatcaaggaggcagtgggaagtcacagaaggtggcagaggaagagagtggctccagggaggtccatcccctgcaggcatgagctggaaagaggctgggagaggcgggtcatggcccatgttgggagcctctctcaatagtccagttgcaagaaggtgaggaattgggtctgggcggtagcagaaaaaggacacagacaaccagactccagcaggcagtgggacaaagcaggaggaaggagaaattcacccagacacgttaagttttccttgagaaagagatggtgctttcaaaagattccacgcaagccagaggagatgctggcttaggggaagacagcaaatttggtttagaatatgttgagaccaggccaggcacagtggctcacgcctgtaatctcagcactttgggaggccgaggtgggcggatcacctgaggtcaggagtttgagaccagcctggccaacatgatgaaaccctctctctactaaaaatacaaacattagcctggcgtggtggtgggcgcctgtaatctcagctactcagaaggctgaagcaggagaattgcttgaatccaggaggcggaggttgcagtgagctgagattacgccactgcactccaacctgggtgacagagcaagactctacctcaaaaaaaaaaaaaaaaagaaaagaaaaaagaaaaggtaaaaataaagcaccaggcacagaacctgggtttggagactgggcaggatgccagcacctagctaaatacctaacttagaataggccaggtgtggtggctcatgcctgtagtcctagtactttgggaggctgaggtgggtagatcacttgaagtcaggagttccagaccagcctggcctacagggcaaaactccgcctctacaaaaaatacaaaagttagctgggcatagggccgggtgcggtggctcatgcctgtaatcccagcactttgagaggccacgaggggggaagatcacgaggtcaggagttcaagaccagcctggccaacatggtaaaaccccatctctactaaaaatacaaaaattagccgggcatggtggcacatgcctgtaatcccagctacttgggaggctgaggtaggagaatggcttgaactcaggaggcggaggttgcagtgagctgagaccgtgccactgcactccagcctgggtgacagagtgagactccgtctcaaaaaaaaaaaaaaaaattagctgggcatggtggtggatgcctgtaatctcagctacttgggaggctgagacaggagaattgcttgaacttgggaggcagagtttgcagtgagccgagattgcaccactgcactcaagcctgggtaacaaacagagcaaagaatagtagctcattcagtgttgttatgaaaaagcaggttctctctcagcatcctccttgctctcaagtcctgtgattcttgaaataatgcatccagtggcagaaaggagttagcatatgctgctgctggaagcctgtaagtggaggctgtgacactctagagaaaggattattgaacagttggatggctaggatgagtactgtgtctacttggtgcctgcatcctcagtccccgggataaagaatgaatgtgtgacctataaggaccttccacattgggattcatacctggtacatgtgcttgacttggtggatcttggggcctttgggggtgaaactgacatagagtgtggagtcttcttggctgcggagagagaagggcagcgatggaagaacgaagtgacagcaacccgggctccaggaagcttctgagcgcccagccactgtgctaggaacggcacagataccatctcattcaatccctaccac

SEQ ID NO: 15831 - DNA, 2300 bp, Homo sapien
ctctggccaaagcgcttgccgcactcagggcacttgaagggcttctcccgggcgtggctgcgggcatgggggataagggccgaccgctgggagaagctcttgccgcagatgccacagctgaagggcctctgaccggtgtgcaccctctgatggctgcgcagggacgagttctggctatagcacttgccgcactcggtgcagctgtagggccgctcgtggctgtgggtgcgctggtgtcgcaggaggtaggagctgtcgccgaaggccttgccacaatgtgggcacttgtagggcttctggccagagtgagtgcgctggtggcgaagcaggtaagagctgtcggcgaaggccttgccgcaacggggacatttgtagggccgctcgccagtgtgggtgcgctggtgtttgatgaggtcagagctctgggagaaggccttgctgcagacctcacatttgtagggcttctcaccggtgtggatgcgctggtgctggatcagggtggagccccgcccgaagctcttcccgcagatgccacagatgttaggccgagggccctgcccacccctggcccggccaccccgccgacctggacctcgaagggctcctgtgagacccaggggattctgaagcatctcaaactgcggtgtagacagcagggcccctgtgggcatctcaaaaggtggccctatgggcaggtcccctgtgggctgctccccaaacccctgagtgaaggagtccagggggtgaactcctacggagatattcaaaggactcttttcctcggggttcagaagcatctccgcaccttcctggaatttggaactttgagcttcaaattctgggctttgggttttgagctcagtgttctgggattcatatctagagctctcagattcatagccagggctccggggttcatacccggggctccgaggttcatagccagggctttggggttcatacctagggctctgggattcaaactcagggctctgagaatctgattcagggcttctgggtgcaaactcagggcttgggggcacaagcccagggcttcgggactcaaaccccgggctttcaggctcaaatctggggctttggggttcaaactctgggctttgtggctcaaacccagggctctggggttcaagcccaaatggtatctcttcgacttcatagtccccactgccttcttgctgagaaatttcctcttcctcattctcactcatgttgcctgcaggatgagagaatccagatcgtgtgagacctggaaggtcatttggtccattagcaaccacacacctcccacctcacatgcagggtcgctggcccctagacaagtgctgaaattcccacgcccccctcagctgacccaagacaccccagtccccgccggcccctccttcgagtcccaggtgtcccagccccgggccctcgctccctccctggagccacagccccttctcctgcgcgcaagtccactcctcggacgggcgctccctcctcacctctgaggtacccttcggggctcctcatttcgtcagaactctgcacatcctggggctcgaggccccacggcaacgcctcccgctccatccccgcgggctcccagtgcagcggcggcggcgatggcggccgatcccgcgacccggcctcggttgccccgagccgcgggcccccgcctcccgcccgctcagcgccgcccaggggactcggcggcccagcccgggcccccgaggccggacgtcttgaccccgcgcctctccagcgcgccgggcccctcccctgcccgcggccccgccccctcccaaggtctcggcctccccgtggccctcactggcccccgcgcgtcgcggcctcggggatgaggggcttcgcgactaccccggcggcccccggcccccgctcccgcccgagcccccaccttctggaccccggccccgggctgggctgcactgtccaacggccgcccagcacccccccaccctcccccgcacaggaagtgtccgtccgcggccaggtccccccgccggctcgcgccgcggcctctctaggagccgctggaggtggaaactcgttggcattaaccctgggctggaggggcccggccacggggtgggtgaggaccggacgccccggagcccgcggggctaccggggcagtgtgtgtgcctatgttctaggtctccgtccctccagaggcccgtctgtccatctcccgggccccgcgtcgtcggtgcgtgtggccaagggcgaggcgacaagcgagaccaaggtcagcgagaaggagcgacgcttccc

SEQ ID NO: 15832 - DNA, 2300 bp, Homo sapien
caagacaaacatacattgggatgggagagagctatggggctggaagctgtttctctggagggcagaaagttttccccgcttcattcgtggcataagctcttgtgattttatttgtaagcctttattattattatttgagacggagtcttgctctgtcacccagactagagtgcagtggcgagatctcggcttactgcaacctccgcctcccgggttcaagtgattctcctgcctcagcctcccaagtagctgggattacaggtgcccaccaccgtgcctggctaatttttgtatttttttagtagagacggggtttcaccatcttggccaggctggtcttgaactcctgacctcgtgatccacctgccttggcctcccaaaagtgctgggattacagacatgagccagtgcgccccacctgtaagcctttatttagatagtttctctccactttttaccacttggcattcttcaagttcttgttctcacctcttttcaggaaggagaggccatccttcctcccaaacattctcttcccttcatttgtctgggtaggcgacaagaaaacacgatccatggctcctgctcacacaggggcatcgggctcgttaactgtcaagaacgctgccaaacttgtttcagcacgaagcgtagaaaaaaaagacaagaactggatgatattaagttgtctgtccaggctcacttcctcaattcaaagctgcgcccgaggcagtgtttctcaggttcccttcctctgcaagactccattcgagtcagacaagactggagagttgttagatgcctcgaaggccagatggttctctcagtccaattctcctttgtatcaccctcacctggaaggaatcctgcctccctgtgaggaaatctaacaacagggactaaggctgccagggattgagttaaactcaggcgctggggaaggtggaggggagaggcaaggggtgtgaggctgacgaggaggaagggtgtctgtcctcagatcttctggctttcataaaacataatggaggctaagtgggggcgggaaaagttttgatggcacaggccgggctggaggggagatgcctggcacctccctcccactacctcctgaaggcgcttctggccgacaggggaggcggacccgaccacagcactcccggccaatcaggaaggcgcctggcgttccctggcgaccattaacgcccagccgtccgcggggttggaggaggcggggcggctagagcacgagccccatcggccaaccgccgggcttcctggggcggagaagctgtgcctctgggagccggggcggggctgtctccttggcaactatcctagccctcgaggagggaggagggaggaggaggatcaggggagccgagctgggtgggggccggaggaacgggagcgggcgcgcgcaggtgccggggagcggagttcctggagggggtcccaggctcaaggacctcggcgaggccaaggggagtccgtcccggttcccgaggcgctgccggagctgacccggaggcccgggaggggagggagcgagacaccgcccccgctggcgccgggaagcgtcgctccttctcgctgaccttggtctcgcttgtcgcctcgcccttggccacacgcaccgacgacgcggggcccgggagatggacagacgggcctctggagggacggagacctagaacataggcacacacactgccccggtagccccgcgggctccggggcgtccggtcctcacccaccccgtggccgggcccctccagcccagggttaatgccaacgagtttccacctccagcggctcctagagaggccgcggcgcgagccggcggggggacctggccgcggacggacacttcctgtgcgggggagggtgggggggtgctgggcggccgttggacagtgcagcccagcccggggccggggtccagaaggtgggggctcgggcgggagcgggggccgggggccgccggggtagtcgcgaagcccctcatccccgaggccgcgacgcgcgggggccagtgagggccacggggaggccgagaccttgggagggggcggggccgcgggcaggggaggggcccggcgcgctggagaggcgcggggtcaagacgtccggcctcgggggcccgggctgggccgccgagtcccctgggcggcgctgagcgggcgggaggcgggggcccgcggctcggggcaaccgaggccgggtcgcgggatcggccgccatcgccgccgccgctgcactgggagcccgcggggatggagcgggaggcgttgccgtgg

SEQ ID NO: 15833 - DNA, 2300 bp, Homo sapien
aggggggtgggcaaaaaagcgggggcgactccggcgccgggccttggacagctgctccaacccggcaaagggggcttggggagccttcagcccaggagacccggcggccacagggtcgggcttctccagggctcccgtcccttccctttgtctttcctcttccttgtttctggaatctgctgaaagataaggaggcgagagttcaggcttggctcatcctggtcattgaatcccacagcccgcgtggacagggacaggcctgctggacccccgactgctcctaggagatggaggagtgacacctgttcctcggctgcagagccagacagagcctggagggagggaacagtccattccgcctccgggctggggaaatgtcaccgcgggggaagggcagagatgacgtgaacatctgggcctgatctggaataagaagcggacacctggggatattccaggcagaaggaacagcaccaagaaaggcagaaccaggagggcatggccaagttcagtggggctggatactctgcaaaagctgaggcaagaactaaaggaaggaaatgggagggcgggatgtgggggcataggaaccatagtgcaggaaaacgactggagcgggtcatgatgtggaggtagagtcaacagaacctagaggccgggtgcagtggctcatgcctgtaatcccagtgctttgggaggccgagatagaggatcgctagagttcgagaccagctcgggcaacacaccaagacctctacctctttaaaatttttttaattaaaaaaaaaaaaaaaaaaccagccaggcgtggtggcgagtgcctttacagtgttaggtactctggaggcccacgcgggaggattggttgagccgattgcttgagcccgggagttcaagactgcagtgagctatgatggcgccactgcacctcagcctgggcaacagagaccctgtctctaaaacaaaacaaaacaaaaaagtccccggagtgtagtgaccacgcagaggtgaggactcaggggcgggtatggcagggccagagcccccatcacagcccctttctaggctgcatcccggagccaggcaggggctcagcctcctggccgcagttgaggaggcagttcagagaggaaactgctaagcaggtagctggaggtggcagagggtaccgggatgggacaggaacagagaagtccccatgggactgagcacccgatactccacctgggtccgcttctgtcggacacttcgccacctccggatcctgggcagccggatcccacagttcggccttctcctccacccaggagatgagcgccggcttgctgcctccgactcctgggggagaagaacgcaaaccccacgctgcgaggaggccgcctgcccggccccggggcccccaactccacacgcagctcccagaggcgcggcagggcctgtggaggcgcagggcccaggcaagcaggtggggctctcaccgagcgcgcccaggtggccgtaggtctcccgcatcacgtcccggtacagggccctctgcgcgggccgcaggcagccccactcctcccgggagaagtacacggccacgtcggcgaagctcacggccccgggctttctccactcggatcccgccccgtttgggtcccggggagggagcggggccagaggcggcgccatggggactgtcagccccagcgacggatcggtcatctcccctggccaggcctgggcatgcggaacctcccgcgcccgagaacacttccccggcccggtaccaagggaaggagggacgtcagtagagcccccgaaggcccactagaggggatggaaactaagggccgatggctgcgagtccatggtcagaactggacgatgtcttcaaataaaacggcggcagcgcgacctctcgacctttgcccctgcgcaattgtacccacgacgacgcccccctccccgcgcccccgctccaggcccagttctctccttgccctaatccaaaatggccgttgcggctacaggcgccggccttgaaaaccagccgcgcatgctccggccccgccaggtgaggcggcgcagctcagagcttccgcccgggtttgcgggaacaaagcagcgccctgcggaaggcagccctcgtgaactcagaagttagttttcgtctctggacctttttataatcggacttcagcccatcactgtctcgttttgtcctcagaaacggcgacagcagcctcttcccaatgttgagagcaaaaagtgtgaacccagaaattccgagacagatctcaattacttgccaaggt

SEQ ID NO: 15834 - DNA, 2300 bp, Homo sapien
tttgagaccagcctgaccaacatggagaaacactgtgtctactaaaaatacaaaaattagctgggaatggtggcgcacgcctgtaatcccagctactcaggaggctaaggtaggagaatcactcaaacctgggaggcggaggttgcggtgagccaagatcgcgccattacactccagcctgggcaaaaaaagtgaaagtccgtctcaaaaaaagaaaaaaaagacagtagcttatgttcatggcaagcacctctcatcacagtccagttccaaggaaaaattccagcgttttctacattgggtgccacgtcgcctgaaatcagcacattccatggaggaagtagtacttctctgttgcatctatcctagggtttaatgttggtaaatgagtcactctagcatttgcacaaggctccttaagactcctgcagcagtcgaccaagcccaaggacataattgaatctggagagtcctggggccttgttttgaaaaagacttgaaatacacataggaagaaagacataaaaataaatgttcacttgtctctgcaaaaaaaaaaaaaagaaaagaaatataaaagcacctggcttcagccactttttctgactgctctctcttgtgaagatgcctgagtacatgtaaaacaggtacaatttgtattctttcctcctgttagtctgtctgctgtcgattcattttttcttatttatttttgagatagggtctcctaagttgagcaggctgatctcattctcttggactcaaggaatcctcttgccccgacctcccaggcgccaggattacaggcgattctcaatctgggcctagattcaactaaagaacccactaagagctaaaaggcgcgttggaggtgactctgactccagtacacaggacatgtatgaagtcacgtggagcacagagtaggccatcaggaagtgtgagaaggaggtctcaggggagagctggcgacttttactgagataaagaccccaggggaagcaggttggggtaagaaagggatgagctgggtttgagcctaggagccttgggccatccgcgcaggggcaggacgtcagggaagccaagagcctggctgcagctagagggagacaggcggtcgggaggcgtcctgcacagcacatgggagaagctcctagaagagagggccctctgactttctcagccttaccctattctccccgctgcttccgccatctagaagctcccagaatttcaagctccaaaaagcctacaatagaggaggttctcctgtatccactccatggcttttgtgaaaggaaaataaatcttgggacccccccaaatcactacgctaaaggaaaaagtcaagctgggaattgcttagggccaacctgcctcccagtctattcaaagtcacccctttgctggctgacacagatgcatatctgattgcctcctttggaaacgctaatcagaatctcaaaagaatgcaaccgtttgtgcctcaccttctgtttcttggaagcccccttcctgcttcacgtcttcctgcctttgcttcaagttgccccgcctttccaaacagaaccaatgtacttcttacatacatttattgatgtctcatgtctccataaaatgtataaaactaagctatgcccagaccaccttgggcacatgtcgtgaggacttcctgaggctgtcacgcgcgcgtcctcaaccttggcaagtaattgagatctgtctcggaatttctgggttcacactttttgctctcaacattgggaagaggctgctgtcgccgtttctgaggacaaaacgagacagtgatgggctgaagtccgattataaaaaggtccagagacgaaaactaacttctgagttcacgagggctgccttccgcagggcgctgctttgttcccgcaaacccgggcggaagctctgagctgcgccgcctcacctggcggggccggagcatgcgcggctggttttcaaggccggcgcctgtagccgcaacggccattttggattagggcaaggagagaactgggcctggagcgggggcgcggggaggggggcgtcgtcgtgggtacaattgcgcaggggcaaaggtcgagaggtcgcgctgccgccgttttatttgaagacatcgtccagttctgaccatggactcgcagccatcggcccttagtttccatcccctctagtgggccttcgggggctctactgacgtccctccttcccttggtaccgggccggggaagtgttctcgggcgcgggaggttccgcatgcccaggcctggccaggggagatgacc

SEQ ID NO: 15835 - DNA, 2300 bp, Homo sapien
attacaggcatgagccaccgcgtctgcccactgaaattttattgttctttgtctaaaaaatataaaagcacctggctttgggcactttttctgacttccctctcttgtgaagatccccatgtacatgtaaaactaatacaattggtataattttctcgtttgtccactgtcaattcatttgttcttattttactttagtttatttttatttttattttttgaagatagggtttcactaacttgcccaggctgatctcatactcttgggctcaagggatcctcctgcctttgcctcccagtagttagcattacaggcgattctcaatctgggcctacattcaactaaagagcccaccaagagctaaaaggcagttggaggcaactctgactcccatacacagtaagggaggagaccatccctcatattgtcttacgcccaatttctgcctccaaagaaagaagaagtaaaaactcaaaggcagaaatggaatccacaggcagacagcctggcgccacaccctgggcctggtaaagatcgacctctgacctaatcagttttgttatttatagattacagacattgtatagaaaagcactgtgaaaatccctgtcctgtcctgtcctgttctaattaccagtgcctgcagcacccagtcacatatcccctgcttgttcaatggatcacgaccctctcacggggacccccttagagttgtgagcccttaaaagggacagggattgctcactcggggagtcggtttttgagatgtgagtcttgccgatgctcccagccgaataaaacccttccttcaactcggtgtctgaggggttttgtctgtggcttgtcctgctacaacaggacatgtatgaagtcacgtggagcacagaatagaccatcagaaagtgagagagaggtctgggggagagttggtgacatttactagataaagaccctaggggaagcagattggggcaagaaagggatgagttggatttgagtagaggagccttgggccatctgtccaggggcaggatgtgaggggaggtgagagcccggctgcagctacagggagactggcaattgggaggcgtcctgagcagcacatgggagaagctcctagaagagaggaccctctgactttctcaaccttaccctactctccccactgcctccgccatctagaaacttccagaatttcaggccccaacaagcctacgatggaggaggttctcctgtatccactcctttttctttctttctttcttttttatttttgagacagagtttcgctctgtcgcccaggctggagtgcggtgaggcaatctcggctcactgcaaactccgcctcgcgcgttcaagcgatactcctgcctcagcctccccagtagctgggattacaggtgcacgccaccacacctggctgtttttttgtgtgtttttagtggagacggggtttcaccatgttggtgaggctggtctcgaacttctgacctcagttgttccgctggcctcggcctcccaaactgctgattacaagcgtgagccactgcgccacgcccactccattggtttttttacactcaacattgggaagagactgctgttgccctgtttctgagataacaaggacaaaacgagagagtgatgagctggagcccgattataaaacggtccacaaacgaaaactaatgcctgagttcagtaaggccgggaggccagctcactcccgcgaggcgctcttttgttcgtgcaaaccggggcggagctctctgctgcaccgcctcgccgggccggggcggagctctctgctgcaccgcctcgccgggccggggactaaacatgcgcggctagttttcaaggccggcctctgtattagtcaccgcggccattttggatgagggtacggagagaacgcggactggagataccgggggcgttgtcttgggcacgactgcgtaggggcaaaggtcgagtacccgcgccgccgccattttttatgagggcatattccatttctgattatacacccgctgccatcggcaccgttagtttccacgccctctagtgcgccctcgggggccctagtaacctccctccttcccttgggcccgggccggggaggctttctcgggcgcaggaggttccgcaggcccaggccaggccaggggaggcagccgatccgtcgtcggggttgacagttaccatggcgccgcctctggccccgctccctccccgggacccaaacggggccggacccgagtggagggagccgggggctgtgagcttcgcggacgtggcc

SEQ ID NO: 15836 - DNA, 2300 bp, Homo sapien
gcagtgaggggtaggtgaagcggcggccgcagtccgtgcacacgtggcgccgctggccggcctgagcatccatgctgggtatgggtgccgggggctgtgctcctgtggtcgggtcccaggcagcatttttgggtggctgtgcccgtgccggggccacgctaatagctgggtcagggttgcgttccaccagcacttcaggactctccttcacaggagcctttctaggccctttggctcttgggacttcctccggttcctcttccttcctgtttgggacatctcctgggaaaccggaattaagttacacttacaaacacttttgcacagactgtctcaggttatagaatgcttttcacttaaggcagtgagggaagttctgtccagtgattaacacacaggctttagaacaaggtaaacaggattcagatctcctaaaagtgccttatctgagccttggttccttatgcatcaaatgggaataataatggcttttgacttcacagcgttactggtttagctgagtagatgcatgttaagcacttaggaagtgctcaggaagcaggggctattatttatttatttatttatttatttatttatttatttatttatttttgagacggagtctcactctgtcacccaggctggagtgcctggttggactgggctcccagtcctcacaggaccgctgtcccatgttctgaaaactttgtaccaggtctgccttctttactcctctagtacccaacacagttgaatttctttagggatgctggaagtgggggcctgaaaagaaactctgctagacaggaagccctggaaaaccaagtggggggacccgggactatccctcacctctccgagctcctcccagtctttcccccttctcaggatcctgggcggcggggctccaagcctcactctcctgttccatccaagagatgagggctggtttggggcctgggaatcctgggagagaacagggatcacagcgcgggcctgagaggccatcgtgggaagatggcattcccctccaggctgagggcaccccctcggagcttatactcaacctggaaggggctgcagtgctgctgcctgaatgaaatggatgcgggtgaaaacactcccgagggggtacctgaagccctgggaacgggaggtggctgctggtgttggtgcaagagtgcgggattagggctcacagtcctctcggcccttctacatcatctcccctgtgaacccggtgaaggaggagggggctcggacccggggctctcaccgagcgcgcccaggtggccgtaggtctcctgcatcacgtcccggtacagagccctctgcgcgggccgcagacagccccactcctccggggagaagtacacggccacgtccgcgaagctcacagtcccgggcttcctgcaaccaggccgggtctccccgggcctcggcgccaggagcggggctgggggcggcgccatggggcctcgcagccccgatcggcggccgccaggtccctggagccgccgcctccccgctcccggcctcagctgtcgttgtccacaggaagggcggccccgcccagccgtggcgtccgaacgcagccgaggcaaccgaagtagcagggactggctgctagggattcgaggattctgatagggacaaatataattcctcagtgtttattcacttcatggccgcttggacatagacacccgggttaagggacccggaaggtgccttctgaaaatatggcgaccacccttcaattgtcacaggctgctcttaagggcgccattatttgaccatatcaaatatggagcctttctgacttctctggcctcatcgtcccacttgcccttaaataaagccgcttcggctgctttttctagtgggggaggcggggtgtctgggaagtagaggagaggcttcttgccttcaagaaagatgtaagggcccgaagcttcacttacccctctgtacccgcaatacgcaacggccgatgattggcgacgatcccggaagaagctgcgcggtgattggcctgggactggcggggcatttgaagggaccccgcggtcctgaagcctctgttgacagactggagcgcagcggagacctcggcatctgcggtgctcgggattgtgtcccctacggtctcttaccgtgcctcccgatggcgggagctggaatttggtccccagaccccttgggaagacgcgcacaccctggcaaaccatgtgtacacccgcggtagaagcaggtgcgtgttttacagtagcttagctgcggagtccacccagccc

SEQ ID NO: 15837 - DNA, 2300 bp, Homo sapien
acatatgcatatgagatcagcaggagtcacactaaaagccaaaaagcatttcaggtgaaaaacagcaagggtaggccagaaaacacaaagaaatcttgactgaaaagtcagcaataaaaaacactattgaataaaaaggaaggctcgatatactagggctggcaggggagccaagcaagtagatccagagccagaatgacagcagggacctggtaggccttgcttgttatctccagcaaccagccccacgcttagcaaacagtattctgcatcctgtatgattgcaggtatattccaaatgtggggatgaaggcaactagtatttacagtccaatgccaccagccatgaggatgacccatcttggctgaaaaataaagaccttaaatctaggaagcggaagatacaacccaggacagcaggaaggggagacccggtatgagaagaactgaggcccaacccagtttagagaggagactgaaggctaaaggaggaaggtttcccaggaaaaaaaaaattaggatttgaaagttgatgctatctttgataatttggaacaacgtaaataagtagaaatggcagggccgggcgccgtggctcacgcctgtaatcccagcactttgggaggctgaggcgggaggatcacctgaggtcgggagttcgagaccagcctgacttaatatggagaaaccccgtctctactaaaaatacaaaattagacgggcatggtggctcatgcctgtaatcccagctacttgggaggctgaggcaggagaatcgcttgaacctgggaggcgaaggttgcggtgagcctagatagcgccattgcactccagcctgggcaagccgagatagcgccattgcactccagcctgggcaacaagagtaaaactccttctcaaagaaaaagtagaaatggctgggaaccgtggcgcatgcctgtaatcacagcactttgggaggccgaggcaggagaattgcttgaggccaggagttccagaccagcctgggcaacatagcaagaccctgtctctgttttaaaatttaaaaattagccaagcattgggtgtgcgcctgtggtcccagctactcgggaggctgaggtgagaagatcgcttcagcccgggaggtcgagtctgcagtgagctaggatcgcactgctgggccacagagcaagaccctgtctcaaaacaaacaaaaaataaattcatgtatgttagcaacaattactatttaatttaaaacttccccattccgattccatcctcaccaagcacgttccttcgcctgcagcttcggtctagagcctgagcgagccgagctgcggatgccaggggctgggtggactccgcagctaagctactgtaaaacacgcacctgcttctaccgcgggtgtacacatggtttgccagggtgtgcgcgtcttcccaaggggtctggggaccaaattccagctcccgccatcgggaggcacggtaagagaccgtaggggacacaatcccgagcaccgcagatgccgaggtctccgctgcgctccagtctgtcaacagaggcttcaggaccgcggggtcccttcaaatgccccgccagtcccaggccaatcaccgcgcagcttcttccgggatcgtcgccaatcatcggccgttgcgtattgcgggtacagaggggtaagtgaagcttcgggcccttacatctttcttgaaggcaagaagcctctcctctacttcccagacaccccgcctcccccactagaaaaagcagccgaagcggctttatttaagggcaagtgggacgatgaggccagagaagtcagaaaggctccatatttgatatggtcaaataatggcgcccttaagagcagcctgtgacaattgaagggtggtcgccatattttcagaaggcaccttccgggtcccttaacccgggtgtctatgtccaagcggccatgaagtgaataaacactgaggaattatatttgtccctatcagaatcctcgaatccctagcagccagtccctgctacttcggttgcctcggctgcgttcggacgccacggctgggcggggccgcccttcctgtggacaacgacagctgaggccgggagcggggaggcggcggctccagggacctggcggccgccgatcggggctgcgaggccccatggcgccgcccccagccccgctcctggcgccgaggcccggggagacccggcctggttgcaggaagcccgggactgtgagcttcgcggacgtggccgtgtacttctccccggaggagtggggctgtctgcggcccgcgcagag

SEQ ID NO: 15838 - DNA, 2300 bp, Homo sapien
ggtacaaacatacacttaggaagaagggataacttgtaatgttcaatagcagagtagggtgactgtagttaacaaagtactgtaaatttccatagctagaagagaggacttgaaattttcccaacacatagaaatgttaaatactcaaagtgattgataccttaaatatcctgacttgattattgtacattctatgtatgaagaaaagcaaaatatcacatgaactccataaatatgtaaaaattttgtgtatcaatatattttttgttttgtttgttttttttttttttagatggagtcttgctctgtcacacaggctggagtgcaatggtgtgatcttggctcactgcaacctctgcctcctgagttcaagccattcttgtgcctcagcctcctgagtagctgggactacaggcgtccgactccacacccagctaatttttgtatttttagtacagacggggttttgccatgttggccaggctggtctcgaactcctgacctcaggtgatcctcccgccttggcctcccaaagtgttgggattacaggcacaagccactgtgcccagcccaatttttttttctttttgagacggggtctcactctgtcacgcaggttgaagtgcagtggcatgatcttgctcactgcaacctctgcttcctgggttcaaggaattcttgtgcctcagcctcctgagtagctgggactacaggtgtgcaccaccagacctggccaatttttgtatttttagtagagatggagtttcagcatgttgcccatgctggtttctaacttctggcctaaagcaatctgcccacctcagcctcccaaagtgctgagattacaggtgtgagcaactgggctgggcctaaattaaatattttcaaaatttaaaaaatactcatttctaaggatatatttttccttatataatttctacagtattcaccacatggagtgcagtgaggcagttccagaactcaaggtaataatgtaagcatattaataatatttaattattaacaattaataattaatcaattaataacatatgcatatgagatcagcaggagtcacactaaaagccaaaaagcatttcaggtgaaaaacagcaagggtaggccagaaaacacaaagaaatcttgactgaaaagtcagcaataaaaaacactattgaataaaaaggaaggctcgatatactagggctggcaggggagccaagcaagtagatccagagccagaatgacagcagggacctggtaggccttgcttgttatctccagcaaccagccccacgcttagcaaacagtattctgcatcctgtatgattgcaggtatattccaaatgtggggatgaaggcaactagtatttacagtccaatgccaccagccatgaggatgacccatcttggctgaaaaataaagaccttaaatctaggaagcggaagatacaacccaggacagcaggaaggggagacccggtatgagaagaactgaggcccaacccagtttagagaggagactgaaggctaaaggaggaaggtttcccaggaaaaaaaaaattaggatttgaaagttgatgctatctttgataatttggaacaacgtaaataagtagaaatggcagggccgggcgccgtggctcacgcctgtaatcccagcactttgggaggctgaggcgggaggatcacctgaggtcgggagttcgagaccagcctgacttaatatggagaaaccccgtctctactaaaaatacaaaattagacgggcatggtggctcatgcctgtaatcccagctacttgggaggctgaggcaggagaatcgcttgaacctgggaggcgaaggttgcggtgagcctagatagcgccattgcactccagcctgggcaagccgagatagcgccattgcactccagcctgggcaacaagagtaaaactccttctcaaagaaaaagtagaaatggctgggaaccgtggcgcatgcctgtaatcacagcactttgggaggccgaggcaggagaattgcttgaggccaggagttccagaccagcctgggcaacatagcaagaccctgtctctgttttaaaatttaaaaattagccaagcattgggtgtgcgcctgtggtcccagctactcgggaggctgaggtgagaagatcgcttcagcccgggaggtcgagtctgcagtgagctaggatcgcactgctgggccacagagcaagaccctgtctcaaaacaaacaaaaaataaattcatgtatgttagcaacaattactatttaatttaaaacttccccatt

SEQ ID NO: 15839 - DNA, 2300 bp, Homo sapien
tggagatgaagttctagatgcactgaaacaagctctagacagtagcatgcagcccaataactgtaccagcatccccagcctctggattccatgtttctgctcctgtagcctccatgggtgcataagcttgtggtttacttggacctctgcctcatctttcttcttttgcgcttcagcctgcgcattcgcttcctccactaggctctcatggtgcagaggtttccaagaagatggtgtgaaggccgagatcatttggttatattataaaatagaatgcaaattcacacaagtttttgttttttatttatttatttttttagagatgaggtcttgctatgttgtttagtctggtctcgaactcctggcctcgtgatcctcccaccttgacctcccaaagtgctgggattacaggcctgaggcctgagccactacacccaactgaattcacatttttttttttcttttctgagacggagtctcactctgtcacccagtatggagtgcagtggcgcgactgcggctcactgcaagctccgtctctcgggttcaagtgattctcatgcctcagccccccaagtagctggaattacaggggtgcactaccacacctggctaatttttctgttttagtagagatggggtttcaccatgttgcctggtctcaaactcctgactttaagtgatccacacacctcagcctcccaaagtgctgggattacaggtgtgagcctccacacccggccgaattcacatgaattttaaagtgatgtcttcaaagtggtttcactgtggggatgggcagctttttgttatacatctagaacgttcctcttctgtttctatgaatactcggttggaaagggctgaaaaacggtcttaagagattatctgattcgtttcccagttttattactcacatatcagctgtaatttgagcacgttttctgattgagacaagactcagatggtattaaacattactacaacacatccgggcacggtggctcacgcctgtaatcccagcactttgggaggccgaggcgggcggatcacgaggtcaggagatcgagaccatcctggctaacacggtgaagccctgtctctactaaaaatacaaaaaattaggcgggcatggtggcgggcgcctgtagtcccagctactcgggaggctgaggcaggagaatggcgtgaacccgggaggcggagcttgcagtgagccgagatcgcgccactgcactccagcctgggcgacagagcaagactccatctcaaaaaaaaaaaaaaaaaaaaaaaactacaacactataaattcatatctattataatagtactttgtgcagggccctaccctaagtccttaaccgaacccggaagcgagaagatgacttttgtttgtttttagagatgggcgcctggctctgtcgccagcctggagtgtgggggcgcgatctcgactcacagcagcctccacctcccgagttcaggcgatcttcctgcctcagcccctcgaggagctgggaccaccggcgcgctccatcgcgcccggctaggagctgactttgaatccgggctctgcgcctggccttctgcatctctataagggaagacatctgtgacctcggggcaaaggtcaaattagatcctgggtaggatcctgttcccgctgcccctcgggctggcactgccaggagtactcagagctcaaagctgggatctgcagtcccttacccactcagtgcacgccgcctaaggctttgcgcttcacctttactcacctcgaagccctggacatccgcatctgccctaagacttctcacctcagtagcagaaggaagtcgcgtcagctggccacagcctctctcctaggagaccgtccgggaaaagcgagtcagggtagaccctgaggcccctcagctccggctattttcagatctgtcgctccttcaccctcagcctttcaaacaggccactccaaaaaaaagcccaatcacagccttccttcttctcctggccttccggcactgtccaatcaacgtacgccatctatcggttagtggtgttgcggggccacccttcccgctggtttccctcgtggtgtgtaaaggcagagaggaaaggcgaggggtgttgacgccaggaaggttccatcttggttaagggcaggagtcccttacggacttgtctgaggaaagacaggaaagcgccagcatctccaccttccccggaagcctccctttgccaggcagaaagggtttcccatggggccgcccctggcgccgcgcccggcccacgtacccggg

SEQ ID NO: 15840 - DNA, 2300 bp, Homo sapien
gaggctgagacgggtggatcacgaggtcaggagatcaagaccatcctggctaacatggtgaaaccccgtctctactaaaaatacaaaaaattagctgggcgtggtggcgggcgcctgtagtcccagctacccgggaggctgaggcaggagaatggcgtgagcccgggaggcggagcttgcagtgagccgagatggcgccactgccctccagcctgggtgacagagcgagactccgtctcaaaaaaaaaaaaaaaaaaaaaatgtggaggctaatggggtgggtgctggcttgttccatcagcaattttcagttcagtgcctttcacatacatgcttgtatcattctgttatgattcattgtgaatttatatgctttactagactgtaagctccattcaaagcatggcctatgacttatttatgtacgctctcccaattgcctagcactatgctttgtacgttgaacaaatgtcacgtgaaaataatgtagggagattatgcagaatattgaacttgagaagaaaacaagagctcaggtggattcctggtttagcaagcaaattaggatactgtgaaggaaggatgcctatcagtggtatgaataaaggctctgtctgccccaggtttaaatctttattccccactccttactagcagtatggccctggaaactcatggaatccctctgagatcgtttcttcattagtagaaccaggatgataaccattggttcacaaaatgctagtaaagaattaataacgggctgggtgtggtggctcactcctgtaatcccagcactttgggagaccgaggtgggcggattgcttgagctcaggagttcgagaccagcctgggaaacatggcgaaacaccgtctctaccaaaaatacaaaaaattagcagagcactgtgggtgcatgccttcactccagcctgggcaacggaatgagacccagtctcaaaaaaaaaaagcgaataactaatggctccggtgctgtggcttatgccagtaatcccagccctttgggaggacgaggcaggaggatcacttagcctaagggttcgagaccagcctgggcaacacagggaaaccctgactcaacaaataacataaaaaattagccaggcgtggtagtgcacaccagtagtcccagttactctgaaggctgaggcaggacgattgcttgagcccaggagttagaggctgcagtgagctgagattgcactactgcattccatcccgcccgggtaacagagtgagaccctgtctcaaaaaaataaaaataaggccgggcatagtggctcacgcctgtaatcctagcacttcgtggggccgaggtgggtgaatcacttgaggtcagaagttcgagaccagcctggctaacatggtgaaaccccatctctgctaataaatatgaatattagtcaggagtggtggcacgcgcctgtaatctcacttactcgggaggctgaggcaggagaatcgcttgaacgtgggaggtggaagctgcagtgagccgagatttcgccactgcactccagcctgggcgacagagcacgactctgtctcaaaaataaataaataaaataaaaataaaaaataataaagatgaaatatgtaatatgctgggcatggcgcctgcccccaggaaatgctaaccataattccctcccctaaagggcaaacaaagaagataaccattctccaaagtcaaggatgctctgagaacaccagtaaaaggaactcaggataatctcagctctaactcggccagagtggctccatcgctcaaatcgttccctccttcagtgattggctgagcctgccagagtcgaacagcggaaagcagccccggggcctcttgctgcccccaggtcggtgcaagtcgcttcacaactccttgtagtcgcctgatcctagcagtccagcttcctgcccttatgcagctcttggcttcgttcaaacggaccgcctttgctagcacccaatcagaacgctcgatcttcggctctcgtccaatgaacgcgcgtattggggaggggaaaaaagacggcgtgaagcccaatcgcagcgccattacacttgagggcaaagaggttaggaagccggcatggcgctccggtcaataaaatcgatagctggaagctgcctgtgttccaggcaaaggcggtgcggtagcagcgccgccattttccccgaaggcatcttccggtgcctttcacccaagttcgggcaggagtttcctgaataacagcaaaaggtttccgttagccccgcgggcgaccaattccgattccctc

SEQ ID NO: 15841 - DNA, 2300 bp, Homo sapien
aagcgattctcctgcctcagcctcctgagtagatgcgattaccaccacgcctggctaatttttctatatttttagtaaaggcagggttttaccatgttggtcaggctggtctcgaactcctgacctcgtgatccgcccacctcggcctcccaaagtgctaggattacaagcgtgagccaccacgcccggccttttttttttttttttttttttgagatggcgtctcactcccattgcacaggctggagtacagtggtgccatctcagctcactgcaacctccacctcccgggttcaagtaactctccttcctcagcctcccgagtagttgggattacaggtgtgtgccaccatgccctgctaatttttttgtatttttagtagacatggagtttcaccatgctggtctcgaactcctgacctcaggtgattcacccgcctcagcctcccaaagtgctaggtttacaggcgtgagccaccgcgcctggtctttttttttttttttcgagacagagtcttgctctgtcacccaggctggagtgcagtggcatgttctcagctcactgcaacttccatctcccgggttcaagggattctcctgcctcagcctcccaagtagctgggattataggcacccgccaccatgctgggctgatttcttttttttttttttgagatggagtctcgctctgtaccctaggctggagtgcagtggcgtgatctccactcactacaagctccgcctcctgggttcacaccattctcctgcctcagcctcccgagtagctgggactacaggcgcctgccaccatgcctggctatttttaaaaatatttttagtggagacggggtttcaccatgttagccaggatggtcttgatctcctgaattcgtgatccacccgcctcagcctcccaaagtgctgggattacaggcgtgagccaccgcgcctggctgccaggctgatttttgtatttttagtagagacggggtttcaccaggttggccgggatggtctccaattccagggttccagtaagttgagctgccatgcccagaccaccttataattcttagttccaattatcttgtctctgcaaaacaagaataagaaagaacagaaggaagaaatgatggccaaaagcgaaacaagaaaaaagaagagaattaaaaaataaacttaaaaaaatgcaaaggaaaaaatagaaacaacaaccaaacaaacaaataataaataaatgggggtcaatggccgggcgcggtggctcacgcctgtaatctcagcactttgggaggccgagacgggcagatcacgaggtcaggagatcgagtccatcctggctagcacggtgaaaccccgtctctactaaaaatacagaaaattagccggccttgtggcgggcacctgtagtcccagctactggggaggctgaggcaggagaatggcgtgaacctgggaggcggagcttgcagtgagccgagatcacgccactgcactccagcctgggcgacagagcaagactctgtcttaaaaaaaagaaatgggggtcaagaaactgaatgtggcctgtgtgaggaagtggtcagtatgtcacaagtagcaggacccctggagaagccaaaggccctatctgcagggcctgtggccagacatggcctgggggctcctcaaccatgaggtgacagtgcactcaggctccagtggctttggctccctcctcttcctgggcagcccctccaaatccacttgctggagcagcccttccctgtaactgcccaccccctcaaagcaagggtctgctccagcatccgctcattcatccacagagatgagacaccctgctgctgcccccagagtggccactgtgttcgaacaagtggggctctggccacccacaggcacacacatgagggagaagccgtaggcatgtcttgaccgtgggcagctctttgcctccatctcactgttggtccaataccaggaaatccactctggtgaccgtccccatgtttgtgtgttggaggccgaaagaatgagggttgtgaccaactcagtataccactggaggctatatgagcaaacagcaaactgttctcatggatgcaggatgtgggcaagctgacaactgcatctgccgccagaaggaatgctgaggatggtcatgccgtaggtgaagtgttctttgtggttatctataggaacatctggagcctgttgtataaagaaagcaattatgtgagcctgtgataaatcaagcagctgatcaaccgttgcctcgtcctccctgtcgattctaccta

SEQ ID NO: 15842 - DNA, 2300 bp, Homo sapien
gaacccaggaggcggaggttgtagtgagctgagatggcgccactgcactccagcctgggcgacagagcgtctcaaaaacaaaaaacaaacaaacaaaaaatacctaaaaactcaggttaggcctgctctgcttttgaaagtttttcctgccctggggcctgaaaagcacctgtggggtttaggtcttaatttggcaaggttgaaagaatctccaagcactcacagctggatgaaacatcactgtacctcctcaggcacccatactgccagccctgatccagagggagagaaacacctctacgtggaagaaccacggcggcctgctcccaccagaagtctgaatgggtttccagaggacccagcggacctcctgttacagagatgctgtagtcctgcaagaacgtctccctgcatgagtccttagggacggagctggggagcctccatttcccacataagcccttctcgattatgctttccatatcatcccttgtttgtttgtctgttttgagacagggtctctgtcgcccaggctagagtgcagtggcgcgatcatagcccactgcagctgcgacctcccaggctcaagagagcctcccacctcagcctcctgagtagctgggactacaggcgtgcgccaccatgctcggctcatttttttgtatttttttttttagagatggggtcttgccatgttggccgggctggtcttgaactcctggcctcaagtgatccgctatcttctgcctcccaaagtgctgggataacaggtgtgagccaccacacccggccctgttttatcactttcatcactcaatcccctgagaattatgacacctaaaccaggaagcacctctgcaccttatctcggacccaggattctaggcttcagggtctctcgttctgttaagaaaacaaaataaggactcgtgctgggcgctcacgcctgtaatcccagcactttgggacgctgaggcgggaggactacttgagcccaggtgttcaagatcagcctgggcaacatagcgagatcctgcctcaaattaaaaaaaaaaaattaaaaaagaaaagaagtactggtttggaccagggaatctggggaaggagaactagtgcagacatgggctttggttaagcggtcagggcaccttcatagcgctgcaagaagccactacatgcccacttcctccccaccaacagcccagcttccagtaaagggtccatgacgcagctcctccaagcagcagcgtcccaccctgatcccttactcctcaggactatttacacctcccccatcctgcgggccccacttgagacagtggttcctgagagccgggccccactagcaagccaaggtatattcttggcctcctgcaaagatgcccctgtcctatagacctctgcgcggaccgtgggcacccccacttctccaggaagaagtaggtgggcaacactcaggggaagtcaagcttagcgcccccagtctcctccccacttcggctcggtcccatctctccaggacaaggcgccagcaacggagccacaggccgcaccagcccgtctttgatcccgggtgttcggactcagggcctccaccaccccctcctaaactcggaccctgggccgtgggaacccagtttaggaacccaggaagatgccggaaccttcctcaaacgaggccactctaggaaattgggaatttcacatatcgttagcactcagtcgacgtttattggcctaagaacgaaagaaccggaagatgcccttaaaaagcgtggcggcactctagcttcaatcggttgcctcaacatatcaagaaacctggcattgtatatggccctcaaaagatgacgccacccggtccaccacggttcaacgaggactaagacatctgccctcaaccatcatggcggcgccactcagtttggcttcctgcccctagggatgatggccgccaggtggcttcacttagtttctcaccaccccggaagacggggaccggcgattgggcggtgtccagaggctccgagaagaaggccatcggcggttgggcagcgttgggtaagcttggtttttaaaggagccggaggtgggagctgcggaagacccgggatccacgggaggcggcggtgagcagcccttgggggagggcaaggagtggctggagagagggcgggagtgggggcggggaaggaaacttctgaaccatctggtcccgggccgggggagaccgctgggcggggacgcgaggagggaaggggcgtctgtgggcgggacctcccgggattggagtgaagagg

SEQ ID NO: 15843 - DNA, 2300 bp, Homo sapien
gcctcctgagtagctgggactacaggcgtgcgccaccatgctcggctcatttttttgtatttttttttttagagatggggtcttgccatgttggccgggctggtcttgaactcctggcctcaagtgatccgctatcttctgcctcccaaagtgctgggataacaggtgtgagccaccacacccggccctgttttatcactttcatcactcaatcccctgagaattatgacacctaaaccaggaagcacctctgcaccttatctcggacccaggattctaggcttcagggtctctcgttctgttaagaaaacaaaataaggactcgtgctgggcgctcacgcctgtaatcccagcactttgggacgctgaggcgggaggactacttgagcccaggtgttcaagatcagcctgggcaacatagcgagatcctgcctcaaattaaaaaaaaaaaattaaaaaagaaaagaagtactggtttggaccagggaatctggggaaggagaactagtgcagacatgggctttggttaagcggtcagggcaccttcatagcgctgcaagaagccactacatgcccacttcctccccaccaacagcccagcttccagtaaagggtccatgacgcagctcctccaagcagcagcgtcccaccctgatcccttactcctcaggactatttacacctcccccatcctgcgggccccacttgagacagtggttcctgagagccgggccccactagcaagccaaggtatattcttggcctcctgcaaagatgcccctgtcctatagacctctgcgcggaccgtgggcacccccacttctccaggaagaagtaggtgggcaacactcaggggaagtcaagcttagcgcccccagtctcctccccacttcggctcggtcccatctctccaggacaaggcgccagcaacggagccacaggccgcaccagcccgtctttgatcccgggtgttcggactcagggcctccaccaccccctcctaaactcggaccctgggccgtgggaacccagtttaggaacccaggaagatgccggaaccttcctcaaacgaggccactctaggaaattgggaatttcacatatcgttagcactcagtcgacgtttattggcctaagaacgaaagaaccggaagatgcccttaaaaagcgtggcggcactctagcttcaatcggttgcctcaacatatcaagaaacctggcattgtatatggccctcaaaagatgacgccacccggtccaccacggttcaacgaggactaagacatctgccctcaaccatcatggcggcgccactcagtttggcttcctgcccctagggatgatggccgccaggtggcttcacttagtttctcaccaccccggaagacggggaccggcgattgggcggtgtccagaggctccgagaagaaggccatcggcggttgggcagcgttgggtaagcttggtttttaaaggagccggaggtgggagctgcggaagacccgggatccacgggaggcggcggtgagcagcccttgggggagggcaaggagtggctggagagagggcgggagtgggggcggggaaggaaacttctgaaccatctggtcccgggccgggggagaccgctgggcggggacgcgaggagggaaggggcgtctgtgggcgggacctcccgggattggagtgaagagggtatctgcttgacagtggatccctggggatctacgctgagttcggagatgctccagctcgggccgcccctgtctgagcggagctttgcggcgctgaagcttacaggggaaggaaaagcctcgcccggcgtctgattggcggaaccgcgctgtaggattctttcctcagggatccagtctaggggatctggtgggatggagggtcgtcgatgtatggagtattgctttggagtcctcggccactcgctgggagaggaggaggatcgcagagggatccagcggaaatagcctcccaggaccgggatccccgtggatcccgggggatctcggggcataatctgcagggacaaaggcctcgggaggctcgggccgcgggagaactggggccgctgcattctgggttctggcggcaggtgccaggcagggcgcgagtgatccgctgatcgaggcggtggcagcgggaggacacccgctccgggcgaccggccgggggcgccctttcgcgccccagggctgcggccgctgggctacggggagccgcgggcggaccatgaagggcggagccccagggaaggggccggccctcaccccccgctcccccgctcc

SEQ ID NO: 15844 - DNA, 2300 bp, Homo sapien
ttagcgggtgtggtagcgcacgcctgtaatcccagatacttgggaggctgaggcaggagaatcgcttgaatgagggagacagaggttgcagtgagccaagatcgtgccattgtactccagcctgagtgacatgagcggaactccatctatatctatcatctatctatctatctatctatctatctatctatctatctatctcaagtgaccacttcaccccctccctgtactctgtacccaacccctgtcaccatctctagcaccagccccagttcccagacctttgggggtcaacgtagaaacatcagccaaatcaatcttaaactcagctagagatacaaaagaatcagaaacatatcgaaaactttactagaaatatagagaaaaaaaaataactgcctgggaggtttcctgtcccttcaggatggatgaccaacagatggggcacctaggtccagtggggctgctcccgatctactgtttcttcctccaggagcaaggcatctagctcctccagccgctgctggagcagggggcccacatcagggctgggggccacattgggaggaacagtcctgccccctgcagcccggaccccacgggacggtcttcgtgatcgaggaaggctgctgtcccgaaattccacagcccgccggagcttccttgagctggtgaaaatcagagtcccattgcgctcccggggttcctcaaagatggtctcaaaggtcctgaacaaggcagggagaggagctggttttatcagggtgctccacagctccagatttccctctgccaccctctagccttccaagtgtctcacctcctggttgtgggtgattggtaattcttgttggtgtaaatttcttccaagctgaactccttcttgttcaacctgtgagcaaagagcagaggccactgagaaaccttgggccagtggggcctgaagggacaggtaaggcctggtctgtatttcagtttctgggacatgtcagggccaggagtgctacataaggcagacaggcaattttgagcacaaaccatccccacaccgaattgaatctttcaggctggactgtgctccctgaggggagacaaagctatacttcaggggacataagcctgcatctgtttggccaagatggctcaatgcccagtgagcccctcacctgattggtcgaggcagtcccattggtgtaaggtttagctgaggacgggctggtgttctgcgtattctgaatcgagaaacctttcccatggtctgcaaaaatggggcagagggtgaaagagtgacatgggctcaggcccccactagtctcttctacccgatctgaatgcctaccttggtctcaggttctgaaagcacctggtcctttgaggctcttggctccttccctttggttgaacccaacctgccaagaaggtcaaggctcagggacaaacaggattcactgcattatcccccgtctcctgcccactggatactcagggaaggaggctgggaccaggctgcagccaggcttcaagggggttttttgagagcactacctgggttctgctggttcggagaaggaagtggatgccgtggacgagcaagatgtggtgagagaaggggaggctcccactcctccgagagggaagacctctttccggagacagggccgagggggtggcggggctcgggccatttccccaccacccacagtgtgccgccgcggccgtggtcggcttggttggggtggagcaggtggccaggtgcaggtacctgggccagggggccccagatcagggcaggagtagcttcggcccagagagggcttagggagaagtgctggggtattgtggtcctgagttcgccactggcggattgggggccgggggctgacagacgcagtgccctcagcagccccagactgctcggcctctgagatggcgatcttcaactccagcttcattgggggggacgggggtgggggctgtggggttttgttgggcgtgaggaagatgtcagcaaagctctccagcttggagcggacggaacggaagagcggggccaagccccagggactgaggcgggggcgtaaaaggctggacggtggtggggtggatgggagctccagagcaggatctggggctgaggaaaggagagggtcacaggtggatattccttggctgcagtgtctcagcccctccccacatgctcaactttgtgcacaggggaattagcccacccttaaaacactaagttctgcatttaagaattgaacttcaagcctctgacatcaacatcccatctttatata

SEQ ID NO: 15845 - DNA, 2300 bp, Homo sapien
gcaaggcgttttcgaattgctagcactcgggaccgctgccagcagccgcgcctggaagggacgcggctgcctgttagtgcggccggcgcaggcgcaggcacagcacgcggccgctcgggccaccccgggccgcggaacgactcgcaagcagccagcctgacggcggcgccgccacgcgcgtgcgcgagacgccaggctgtctgtgggccgcgccgagcggcggaaaggcggcgatgacttaactggctgtggaacggaacctcttgcagccgcgcgccccccggcggccaaccgcccccaacgcctcaggccccgcgtctccgcccctcgcctcgacgccatcaggagaccggccaataaacaaacagcaggaagaggcggggccctgtagtaaccgccccaaacacctacttctaaccagtcgagtcacaagactggggggaagggcggagccaatccgacgtaacccaatccaagatttgagggcggttacatgcacccactccctcgggtttggctccgcccctcaccttgacgtagccctcccagcctatcaacgactgcgcccgttgggggtgaggggaagggggcggagcgtgggaggaggccgagagaggaaggaggcgtaggctgaggaggaagagggaggaggggtagggaagtcctggcggagaagcgccctaagactccaaaggagacaacaggagtttgtgctggagctcccccgctgcccatcggccgttccggatcccctaaggcccaagtcggacagagacggaggaaaggaggaagagacttttatgtcggcggacaggggagctgtacccgtcaccgttgcctcacatccggggctttggagggctggcctcgctgccccgccccgcctcgcgcctttcatggcgaccggaggcggaggctggaggagctgggcccggaggaggcccctttaaatctccttaaaggggtggccactgaactcggcggactgcaacgccagccttaaaggggaagccgccgagcagacgctgacaaattgagaactgtgccgttgggagaactggggcgagtggggtttttctttacgtcctcctcccccacacacaagaagtcttttaaattcaacttaaaggggaagtggccgcttgtggaggactagaaactaactccgagcccttaaagggacggcctgctgttagaaggaccctggactccttaaaggggtggcctctttgagccggaggacttgagacacttttaaaggggaggtctgcgtttcggggcgagctttcggccccttttaaaggggtggcccttcctcttcctcggggagacttgcatcgacccctggcagggggtggccaccgcactaggccgccggacactgtcgggtcgtcttaaaggggccgggagctggacaacttggggcctcgccttaaagggacggccgccccgttttcgccgtcgcggccccgccgagcccgcagggggggccctcgggcttgtcgccccgggggcggcgccggctccccgggccgtggccttggggcaagctcggggccagcagatccggctttaaaggagaagccgtggccctctcgtcactgtgcagccgccagcgccgcgcctgcgaccccgggcctgcggacaggccgcttcgggccccgccgcctccggatgcggcgctgagggcggtcgccatggagacggcagcggccgcggccccgggtccgggctgggcagcagagggggagcgccgacggcggcgctgctcgcgccgagaccgagaccgggagcagcggcgccgccgaggtccaggcggcgacgcgccccgggccctgttggccgccccgcgcggctcctcgtcctcgtcgtcgccgccgccgcccgccaggccttggtcgtcagcttcgtctggagagcggcctgggggcccgagacgccggcggccccgtccgagacctcgacccccgcgaccccgagctcggaagcggcctgccggctcgggcagccgcggggaggaagaggaggaggaggaggaggaggggggcgcagacgacggcgaagccgaggaggagcctgaggaggaggaagaggaggaggaggacttgatcgatggcttcgccatcgccagcttcgccaccctcgaggccttgcaggtggggcctaatggggctaggagactttgggggtttccgaggggcagcaaggagggggcagtgcccctagtgggtggagttgaggggggaatgctggcaccccaaaccagagcaaccggctcctctggccaggcctctgccccg

SEQ ID NO: 15846 - DNA, 2300 bp, Homo sapien
ctctgacgcttcctggctgtgtgatttttgacaagtcacttaacccctctgagcctcgatttcctctttctgtcaaatggaatgatcatagtactttcatcttaaagctgttgtgaggattaactacgagtgaatgcagtgtttcccaaagtgtgtacattcagcgtcagtgatatatgggatgatttcaggtcttacgtgagtaaactttaaaaaatagtcctgagttagcttttgtgaactttagaaagctgagtgtcatgcctcagccccttgatttcacacgcgattgcttagggggaggctaagttaaaaaaaaaaaaaaggaaattgagttcttaaaagaagccattgatgcagttcagatggttactttgctgggcagcagtggggaaggtggcgtggaatgttggagacttggattagcttttaaagcaggtgccagcacttggcctacagcaggtgcttgccacagggtaagaactattgacacttactattgatgctctattttgtcaccgtcattgtcattgttattattgagaaaactaaggctcagagaggggcagtgacttgctcaaggtcaccccgggcattcatggcaagatgggcctagaattcaggtctcctgactcccaggccaggccagtgtggtgctgcttccactgttgtagggtgggaccccaggtggcttgttctaattaagcgtcaacatgaatgatctgttctgtgctgtggttgagtcagaaagggaaagtcatctggccagagatggcagaggcagctgcgtggatgcagagacctagacagggagaaataggggttgctgggtgtgggaggcgcctcagtctgagaacggattccctcggtggggggcggtcctggggctgggttctgccacctcccgtgttggagaaccagggtcacggtatcacccaggcttctgaccccctcccgtcagagctggcacctcccaacccctcactcatctccccacttctctccccagctcttcacggccgccccccaaggccccggcccctcccgtggctcagcctcccccctcatcatcctcttcgtcctcctcctcctcatctgcctcctcctcgtccgcgcagctcacccaccggcccccgacgccctcactgcccctgcctttgtccacccacagctttccccctcccgggctgcggccccccccaccaccccaccacccctccttgttctcccctggccccaccctgcccccacccccacccctgctgcaggtgccagggcaccctggggcctcagccgctaacgccctttctggtgagtttggggtcctggccggggggtggggggccatcaccccgggctcgggcccagttggctttggggcacctgagcctcagcagacagcagggcttgaggagggagtggctcgaggccagagggaaggcagtcacctgggcccaaggaggctgatgtggcgacagcattaaagccttctcccgtcccctcccacagagcaggacctgatcggccaggacctgaactctcgctacctgaatgcccagggtggccctgaggtggtgggggcagggggctcggcccggcccctggccttccagttccaccagcacaaccaccagcaccagcacacccaccagcacacccaccagcacttcaccccttatcccccgggcctgctgccaccccacggcccccacatggtgagctcctcattgggctggcgatgaggctcggaggcctctggggagggcatggcttctgggggaaggcccgggtccctggctggcagcttactcttcccttctcttccctagtttgagaaatatccaggaaagatggaaggccttttccgacataatgtgagtgtgtgtgtgcgtgtgcgtatggggtgtgtggtgtgggcgtggatgcatccatgcttgtgaccctgactgctggggtccagtcttcagcacaaaagcaagagccttgagcctgggacagctccctggggggctttagggtggaggcccgtggactgacgggcaggctggacttgggctgcgcctccacccccacctgtactagtcccccttctctccacagccgtacacggccttccctcccgcagtgcccgggctgcctccgggcctcccgccggccgtctcctttggctccctgcagggggccttccagcccaaggtgagctcccaatccagacaccaccaccgcctaccatcttgacaaacccagacacgccgggtccaagcacccttctcccattccccaaagtcgtgcccatcctc

SEQ ID NO: 15847 - DNA, 2300 bp, Homo sapien
cagcacaaccaccagcaccagcacacccaccagcacacccaccagcacttcaccccttatcccccgggcctgctgccaccccacggcccccacatggtgagctcctcattgggctggcgatgaggctcggaggcctctggggagggcatggcttctgggggaaggcccgggtccctggctggcagcttactcttcccttctcttccctagtttgagaaatatccaggaaagatggaaggccttttccgacataatgtgagtgtgtgtgtgcgtgtgcgtatggggtgtgtggtgtgggcgtggatgcatccatgcttgtgaccctgactgctggggtccagtcttcagcacaaaagcaagagccttgagcctgggacagctccctggggggctttagggtggaggcccgtggactgacgggcaggctggacttgggctgcgcctccacccccacctgtactagtcccccttctctccacagccgtacacggccttccctcccgcagtgcccgggctgcctccgggcctcccgccggccgtctcctttggctccctgcagggggccttccagcccaaggtgagctcccaatccagacaccaccaccgcctaccatcttgacaaacccagacacgccgggtccaagcacccttctcccattccccaaagtcgtgcccatcctcctgccctgccctgctgcacccagttttctccaaagccatgatccctccctgcccagtgtcccagcttggttctggatccctttgtgcttggtgccagctctcctgtctgatccctccactcccctttcccagagcacgaaccctgagctgccaccacgactggggccggtgccgagcgggctctcccagaaggggacacaggtgagggggccagggcaggtcctgggggagctggaaggtgtgttgcggggagaacagaactgacttgaggagagtgaactgctgattcctcccttgaattcacaatcgggtgttcctgggtgtctaatagagagggaatttctgtaaatagctggctttcccaggcatgaggaatgagagtttcatgagcttgtcccagaaataggatgattaggacaatggtttttgtagtggttttcaaactttttaataaagttacaaaacactttttttccaaatgacatcataccaggaagccctgttcggaaaacaaaagataagctgccccttggtgaagtgaggagagccagagcctccctccccttagcacttgcagcagtgtagaccccagggctgcgggaacgttgtgaaacgcacaggaccagtttcctacagggaagactaggccagaggttttccaacttccttcaaaggcattttccctaaataaatcttaaacagaccgctatactctaaagttggtaataggagagcttctctgagaaacctgtcctgcctgccccctcaccacccgcagccttccagcagggcagctccctggggcttggttcagaaaccttgtgctggaggagagatgcctagactgggagagatggggaaaggagtttgggcctgagcaggaagggtttgagggagtcccagtgtctcaggcatgttgggggtgagtggatgctgtggagatgcgaggcgcctggcccaggactcgggtctgagtcgcctcccatctctcctttgccatccccagatccccgaccatttccggccacctttgagggtgagttgtgtgaggacctcaggctgcatgaggctgggggctggtgttagcatgtttggctaaggggggttttgcttacaaataagtgagaagcccagaacatggaggcagccagatgtggaacagcagagagtgagggctttcaagttgcagacctgggctcggatggaactggccatgggaccttgggcaaggcagttgatctctctgagcctcagtttcctaggctgtaaaatgaacctagtcatcccttggttgtaggaatgatgagtagggatattttgtggcgaggctgggcccagagccaggcctggagtggatgatgagtgaacgttctttccttccctttccctttggtcatccttctggggcggcagaaaccagggaagtggtgtgccatgcacgtgcgtgtggcttacatgatcctgagacaccaggagaaaatgaaggtactggggccggagggctggggagagtgggtctcagagtcaggggaggactgagctctgggcattggccctcaacagagctcagcagaatcttggccagaaacattctctcctgtcccccatcactgctgaac

SEQ ID NO: 15848 - DNA, 2300 bp, Homo sapien
tcctttagagcttttttattttttcataattttaaaatttttaatttactgtagagacgacgtctcactatgttacccaggctggtcttgagctcctggcctcaagtgatcctcctgccttggcctcccaaagtgctggggttacaggtgtgagccaccgcacctggccctttagatctttcaaagcaattttacatcagcaattctatcctcactttacagaggaaactgaagctcagaaaggtgaagttaattgctcaaggtcacatagcaaggagttaatggcacaaggctaggtccaattcaggctctggcctgggatcccctcttctgggggtgatgggaggagggtctagaaaagatgggcatcatccacttttctttcaacccaaacttcatctgtaaaatgggaccaacaatcctcttcgcagggaagagctaaactgaatggaggaaggggagcttcatcagggcttcctaacctggcctcttagcgggggctttaggtggtaaaattttatgacagcgagtgcattcttgtggcttagactgcttggctaggaatcttgacttcaggatctgtcactgtgttttaacgcctgagcctcaattcgtttgtaaaatggagcagttaggattaaaagaaataatcaaggcaccaagtagtgtcagtagaaggtagctgttatttattgttctattctggggtaaaggtatcagattctcaaagggattcttaatctagaaagtttgcgaagagatggcaaaggtgtttgaaagctatcaggaaaccatcctcgcgtaaaacgaagcagcgctacagaagtgggctgccatgggaatcgggaggcccaggttccactgctaacttgctgcagcttactgggtgatctgtaaataaaaagggaggtggcggtggtccgagctggcagccgcaatgcagccccaggtagatctaggggcaaacggtaaaggcgctccgaggaagggcgagcgcgcagcctctgggagactacacctcccaggctgccttgcgcaccgtgctgcaccctacgctagcacgcgagcctccccgttcccccaccctccagttactgtctctcgcgagaagacgggccgcgccggcgatagcgattccgagcgagtggtggtggtagtggtggtggtggcggccgagacggcggcggccattttggtgaggcctcgggagcggcagcggcggttcgctgggagtagcgtctgccctttttcccacccaccgtccgcatctgtgtgctgcgcgaagaggcagtggaggcaaggcggtggcagtagccgcagtctccaggggagtttaaaggccgcgaaggcggtggccaagagggggccctcccccctcctaggcgggagggggggtggtgcgcacgcccccgaggacgcaggtaaggagagggagacaagatggcgaacgccccacagttccccctcccatgacggctgactgcgcgcgcatctttccgccaccgcctcccccccaccttcccggggtgctgcgcgcgcaccctcagccggggccccggggccggtgcgcgaggctgtcggcgcgcgcccatagagacagactgagggggtcaggccggccggcgctgggccccggcgtgtctcctctcccttcccgcccttctgcgcacgcgtgcctgagcgagcgagcgagcgagcgagccctgagaggacggacccaggtgcgctcctgcccgcccaccaacccagtcacccctcaggggcgcgcgggaagaggaaggggggcgtgggacgagtagtcggggcgcgcgcccaccacatctagccgggggaccaggacctggtggcacgaaccctcccttctctcagcctttcgcggtcgggtgatgggggggctccctgacgggcttggatgacgagcttcccagccccgcgacccttgtgtgcgtgggctcgggttctggcgggagcccctgggccgtgcgcgcagccggctcgctccgcctccagccgcgcacgcgcgggcccctcccccgcccggcgcgcacgttgggtggggtgggagtctggagggggcggggctatctcagggctagtggcaacttgggcagaggtcaggggtcacgcgaggtcagtccgtcgggagggctagggagatggtcacgaaacctgaagtcaagagttaaggcttgttggcttctggtgagctcgggtcttgggaacgtgtggcggagtagggagtgaatcaaagccggcactgtggtttaggaatttccttaaacactggggaagcatttccg

SEQ ID NO: 15849 - DNA, 2300 bp, Homo sapien
cctcccccccaccttcccggggtgctgcgcgcgcaccctcagccggggccccggggccggtgcgcgaggctgtcggcgcgcgcccatagagacagactgagggggtcaggccggccggcgctgggccccggcgtgtctcctctcccttcccgcccttctgcgcacgcgtgcctgagcgagcgagcgagcgagcgagccctgagaggacggacccaggtgcgctcctgcccgcccaccaacccagtcacccctcaggggcgcgcgggaagaggaaggggggcgtgggacgagtagtcggggcgcgcgcccaccacatctagccgggggaccaggacctggtggcacgaaccctcccttctctcagcctttcgcggtcgggtgatgggggggctccctgacgggcttggatgacgagcttcccagccccgcgacccttgtgtgcgtgggctcgggttctggcgggagcccctgggccgtgcgcgcagccggctcgctccgcctccagccgcgcacgcgcgggcccctcccccgcccggcgcgcacgttgggtggggtgggagtctggagggggcggggctatctcagggctagtggcaacttgggcagaggtcaggggtcacgcgaggtcagtccgtcgggagggctagggagatggtcacgaaacctgaagtcaagagttaaggcttgttggcttctggtgagctcgggtcttgggaacgtgtggcggagtagggagtgaatcaaagccggcactgtggtttaggaatttccttaaacactggggaagcatttccgggcctcctgcgggttcacactgcctgtttccggcgcgtggttcttggcagtgcggcctctcgcttttgactgctcctgagtctccttttgctgtggttcttgtatttggggaagtgtctcaaggcgcaggtatgggatatacagcgccctgccctgaatcctgggcggattttcctgtgaccagcctgtttgttgactcttcccgggagttccactctcacttctgcgttcagccctcactggaaaggcccgcaggcaggtagcacctttctgaggttctggatgtgacagcttttttttgctgtattttttttttgtcttccattctgtggttggagcctttacacttaaaatttttgaactttctttcttcactcctttcctgctcctgcccccaggcaggatcgtatgtccctccggaattcacaaaacatgatttgcatttccctgaaatgtgagattttcctactactgtagtttttctgtttctagtcttttaactgatttgggtatatttaaacgtctcaaaaaactggagtaaataatacgctttgatggatgtttcaggtgtgattcccttcagtacggcggcaccgtggaagtgcagactttcacagggggtgtggtctcagctcacacaggtgagggatctgctaccattttgtgtgctgatgctaatgggagaaatgtttgagataaagcaattataggtccgtattggggattttcactctagagaagcatgggaatgtttgcatgtgatttttctgtagagggtttgattatagtacaacaacagaactgaggctgtgggttgaggaaaacgtggtcaacctggctctaccaggaagagtagcaggttttccttggttttggcatcagactgtggattgaagccctcctatcacttttttactgtgtaaccttccgcaaatcataaggtcttaacttcgtaacttacaaaacagattatattagaatgtaagctacatttaggtcgggaatcctttctgcatggctatatccgttgtgtgtaggaggaagtcaatatttgttatgctgtgaaaagcacttggtttttaaggtaggtgtgaggattatagaacacatcaaacaggtactaaaagtatcttatacatagtaagtgctcaagaaatgtaacctgtaatttctgtgtttctctttattcagtgttatttctggttttttaaaaatactttttcatcccctttaactgcatttctgtctttttttttttttttaaccctactttaggtgctccagaggctggtggacctgagcggaggctgggacgccctggtgggccccgggccctggaaggcgggtcccggtggccggtggcccagaatgaggccagctcccagcatgccctgcagccggacgccagcccctcggccagcagtactggtgataacaacccagtcattcttcaggcatccaagggggagcctgggagtgggaccatgcagagcagcccctcccct

SEQ ID NO: 15850 - DNA, 2300 bp, Homo sapien
ttcaaacaattcttctgcctcagcctcctgagtagctgggactacaggtgcgcgccaccacgcctggctaatttttgtgtttttagtagagatggggtttcaccatgtttgccaggatggtcttcatctttgacctcgtgatccccgccttactcagcctctcaaaagtgctggaatgacaggtgtgaaccaccgcgcctggcccagagtttcgcttttgttgcccaggctggagtgcagtggtgtggtgttggctcactgcaacctccacctcctgggttcaagtgattctcctgcctcagcctcttgagtagctaggattacaggcgtccgccaccacgcccagctaattttctgtgtttttagtagagatggggtttcaccatgtaggttaggctggtctcaaactcctgacctctggtaatccacccgcctcagcctccaaaagtgctaggattacaggtgtgagccaccgtgcccagccctgttttccaccctccttccctccctccctcccttccctccctccctccctcccttccctgccttccctccctccctccctccctccttccttccttccttccttctctccctccttccttctgagtgcaatggcacaatcttggcttactacaacctctgcctcctggttcaagcaattctctgcctcagactcctgagtagctgggattacaggctcacgccaccacacgtggctaatttctgtatttttagtagagatggggtttcaccatgttggtcaggctggtctggaactcctgaccatgtgatccgcccgcctcggcctcccaaagtccaccgagcccagcttccatttcttaatgcttttgcagtaccttgtaaagtgacgtgttgggtgtttgagaacattggctatgcctgcagcccatgcctgtccagtgaagaggttaaggtggcctgggatttattggtggctgttgaatttagtggtagctcacatttattgcataagtgagtttgccacacttgttctgaaaatggagggtaaatagggagttgtttatgtgcatgaaatcactgaggctctgaaacgatcagaatttgaaatcatatgctatatatatatatatatatgtatgtatataaattttttttttccttttcctttccgagacagagtcaccctgtcatccaagctggaatgcagtggcgcgatctcggctcactgcaacctccgcctcccacgcctcccaggttcaagcgattctcgtgcctcaacctcctgagtagctgggattacaggctcccgccaccacgcccagctaatttttgtattttcagtagagacggggtttcaccatgttggccaggttggtctcaaactcctgacctcaggtgatccacccaccttagcctcccaaagtgctgggatcacaagcatgagccaccacccccggcctatatatatatatatttttaagtttgggaactgtgtaaatgtcaggacataattcttgcatgtcaagcatctataaacttggctctgccatcttgagtcccttattaaaactttatcccaaggccgggcgtggtggctcacgcctgtaatcccagcactttgggaggctgaggtgggcggatcatgaggtcaggagatcgagaccatcctggctaacgtggtgaaaccctgtctctactaaaaatacaaaaaaattagctgggcatagtggcgggcgcctgtagtcccagctgctcaggaggctgaggcaggagaatggcatgaacccgggaggcggagcttgcggtgagccgagatcgcgccactgcactccagcctgggcgacagagcgagactccatctcaaaaaaataaaataaaaactttatcccgaacgtttgtgtttatgaaaataaggtttataccttactctacacagttttttcttgtgaagatcggatgaaataatgtatctaaaacactcagcacagtgcgaagcatttattttctccatcattttcctcttttctagatggtgtcggacggcatgacaggcagcaatcctgtgtcccctgcctcatccagttccccagcctctagtggggcaggcggcatctccccgcagcacatagctcaagattcctcactggatggacctccaggccccccagatggtgccacagtgcccctggaggggttcagcttatcccaggctgctgacctggctaacaagggcccgaagtgggagaagagccatgccgaaattgcagaacaggccaagcatgtacgtattagaaaggcttatgaagattcttggg

SEQ ID NO: 15851 - DNA, 2300 bp, Homo sapien
tggcgtggtggcgcaggcctgtagtcctagctactcaggaagctgaggcagggaaattgcttgaactgggaaccggaggttgcagtgacctgagatgatgccactgcacaccagcctgggtaacagtgagactctgtctcaaaaaaaaatgcaaattcttggtacctctcacccaccgacccatttgaaactatgagggtagggcccagcaatgtttttattttttatttttatttttattttatttatttattttgttgagacggagtctcgctctgtcgcccaggctggagtgcagtggcagaattttggctcactgcaagctccgcctcccgggttcacagccattctctggcctcagcctcctgagtagctaggactacaggcgcccgccatcacacccggctaaattttttgtatttttagtagagatggggtttcaccatgttggcgggatggtcttgatctcttgaccttgtgatctgccagcctcggcctctgaaagtgctgggattacaggcatgagccactgcgcccggccacaattgggtttttttttttttccttgagacggagtctcagtctttcgctgaggctggagtgcagtggcatgatctcggctcactgcaagctccgcctcctgggttcacgccattctcctgcctcagcctcccgagtagctgggactaagcgctcgccactatgcctggctaattttttgtgtttttagtagacacggggtttcaccgttttagccaagatggtctcgatctcctgaccttgtgatccacccgccttggcctcccaaagtgctgggattacaggtgtgagcacaacctgtttctaaaagtcctccagatgattccggtgcctcctcaagtttgagagcagctggtctaatatccacgtctttcttgatgtttccttcactgtcaggccatttagtcctgtctggtctctggctgtcattttctctgatttagtttttatcaggagaggacagaaataacaaagacagaggctgggtgcggtggttttcgcctataatctgagcattttgggaatcccaggcaggcggattgcttaaacccaggagttccagaccagccttgacattgtgaaacctcgcccctacgaaaaatacaaaaaaattagctgggcatggttgcatgtgcctatagtcagtctcagctacctgggaggctgagttgggaggctgagttgggaagataacctgagcctaggcagcagagtgagacccagaaaaatctcactcagatttctgagtgagattcagaaaaagaaataaggcagttgtcctgaattttttgagtcgtctctgtcaaaaaaattttaaatgctttttaaataaaagacaatcagtgtagaagctttagtaaaaatgaccactcttttttacacctaatcagtgttaaacatttcacgtataacgtttcagtattttttacataaacatatgcatttttacaaaagtagtatttttaaaaacaacagtgtgtcagttgggcattatagcatatttctaagcttaatgcatcatgaaaatactctgagtaagtagaattctacaatgatgatgaccccttgtatctagaatcaagagggaagtatgtgttccctactcctctgggaagctcctcttgggatatgatttcccaagtctctcctatgtctatggggtgtggagattgtgttaaataatggaaagagcatgaaatttgctgtctggagtcctcagacctatttttgattcacattttctattactttctagctgtgtgatcttgggcaaatcacttaatctccctgatcttttttccttcttcatctccctgatcttttttcccttctctgaagagagtatgatacctgcctgtaagtttggtatgtggactaaacataagcataacacactcagcccacttagtgctcaggaattcagccgtggcagtgagatggagtgtgtgtttagaactgttgattgatctggctctccctgattaggaggccgagatcgagactcggattgctgagctgcggaaggagggtttctggtcactgaagaggctgcctaaggtgccagagccccctcgccccaaaggtcactgggactatttgtgcgaagagatgcagtggctctctgctgactttgctcaggagcgccgttggaaacggggtgtggcccggaaggtaggtcttccgctgggacttccttccttttccttttcaggtctgttccttcccggtttgttggaaggggaccagacagaatggtgtag

SEQ ID NO: 15852 - DNA, 2300 bp, Homo sapien
gagggagtaaatataatttcaggcaactctaatgacgtttatgttgtatggataaaaaagtatagtggcaaaatatgggtcctgcctttggggattgttaatagttctccttgacacctctaggccatctgtcccttgcagggcatttagcatgtgtttactgaaatgtatttgtgccacttagcacatgcttaaattccgtcaaagttcccactgcctgtatagtaagttgtaattatttcttaagtactacccagtttccgtctgtattttcggtcttgcctcctgccatgttcattccttctcccttccactccacacccacctttcttttgtatatctctgtccatttacacatagactttatgctgctgggaatgcttttttcctcatgtgtacttagggaacagccacctattttttaattgtcttggacagagtcttgctgtgtctcctaggctggagtgcagtggtacgatcacagctcactgcatcctcaacctcctgggctcacgcgatcttcctgcctcgatctcccaagtatctgggactacaggcgcgtgctaccacatcttgctaattaaaaaaattctttttaatttctttttttttaatttttttgtgaaacagagtctcaccccgtcacctagggcagtggcgcaatcttggctcactgcaacctctgcctcccaggctcaagtgattctcctgcctcaggctctggagtagctgggattacaggcatgtgccactatgtctggctaatttttgtatttttagtagagacagggttttgctgtgttggccaggctggtcttgaactcctgacctcaggttatccactcgccccagcctctcaaagtgctgggattatagacgtgagccaccgcacctggcctaaaaatatttttttgtggagacaaggtctcgctgttacataccaagctgatcttgaattcctaggctcaagcgatcctctcactttggcctcccaaagtgtgagccactatgcctggcttcacctacctgtttttttgtttttgagacggagtctcgctttgttcccaggctggagtgcagtggtgcaatctgggcttactgcaacctctgcctcccaggttcaagcgattctcctgcctctgcctccggagtagctgagtttacaggtgcccgccaccacgcctggctaattttttatttttagtagagatgggggtttcaccatgtcggtcaggctggtctcgaactcctgacctcacgtgatcctcccacttcagccttccaaagtgctgagaatacaggcatgagccactgtgcctggcccacctacctattttttgagacccagttccagctgggtgtggtgatgcatgcctgtagttccacctacgtgggagggtgaggcaggaggatcatttgagcccaggagtttgacactagtctggccaacatagtgagatctcatctctttaaaaaaaaaaaaaaatccagcttcagattgcaaaccttccctccacctgaggcgaagctggctcttcttcctgcatgctccctttgtgcttcctttagaccatagtgagcccctaaggttatttagttttactttcctaagaggccagcccaggatctggttaaagaaggtctccctaaacatcgggtaaaagtacataaataaaatggttatcttggtgagcagtccctttcacatctgtggcaggtggtgcaattcaagcaacagtcccggcttgaggaaaagcgcaaaaaagccctggacctgcatttggacttcattgtggggcaaactgaaaagtactcggaccttctgtctcagagcctcaaccagccattaacctccagcaaagcaggctcttccccttgcctcggctcttcctcagctgcctccagtcctccaccccctgcttctcgcctggatgatgaaggtgtgtgttctctttggtcctgttactcttcctcatgtaccctttccagagctgaaaaacccaccctgtggcttgcagggcccgtggactttgtgaccttgttctcctgctatagatggggactttcaaccccaagaggatgaggaagaggatgatgaggaaacgattgaagttgaagaacaacaggaaggcaatgatgcagaggcccagaggcgtgagattgagctgcttcgccgtgagggagaattgccactggaagagctgctccgttcccttccccctcagctgttggaagggccttccagcccctctcaaaccccctcatctcatgatagtgacacccgagatgggcctgaagaa

SEQ ID NO: 15853 - DNA, 2300 bp, Homo sapien
ccttccgcttgctgctaaccagggtgaggctcctggccttcctacttagcccttgctggccttggtccttccaggcatgcgctgggctactgtctgtccagccttccctcagtgttgttttcccttgcgaatatctatgatacctgtctgccaccttctcctgcccctggacttcttccattctttgggtcttttgtttcttttctaccttcctctcagtgtagcttcctcttgcagtgccaccaaccatggtgaataatacaggcgtggtgaagattgtagtgagacaagcccctcgggatggactgactcctgttcctccattggccccagcaccccggcctccgagctctgggcttccagctgtgttgaatccacgccccacgttaacccctggccggctacccacacctactctgggtactgctcgagcccccatgcccacacccactctggtgaggcctcttctcaagctggtccacagtccttcacctgaagtcagtggtgagtccaggtggctgaggccagaaatccttgccaggaatggagacgagatggggtcgcctcaaggtttcttagttttagtacaggttttttcatatcagcgtactgccttgatttgtagtgggccccagaactgggctgcctgagccctgacctaatttcaagatctatttgctggaatcttggaggggaagaaaatctaaagttgtcagattacttggatgtttgacttcatgttgtgggagtgaatgccttctgggaaatgggaagcttgggggtatgggaaagatgggacagggagtagaaaggctcaggaaaagaattctggggctaactcatcctctctctccacagcttcagcccccggagctgcccccttgaccatctcttctcctctccacgtgccatcctccctccctgggccagcctcttctccaatgccaattcccaactcctctccccttgctagtcctgtgtcctctacagtctcagttccattgtcatcttcactccccatctctgtccccaccacacttcctgccccagcctcggctccactcaccatccccatctcagcccccttgactgtttctgcttcgggcccagctctgttgaccagtgtgactccaccattggcacctgttgtcccagcggctcctggacctccctccttggcaccatctggtgcttccccgtcagcatcagccttgactctaggtttggccacagctccatccctgtcttcatctcagacacctggtcaccctctgttgttggctcccacctcttcacatgttccagggttgaactcaaccgtggccccagcatgctcacctgtcctggtgccagcttcggctctggccagtccttttccgtcagcaccaaatccagctccagctcaggcttcccttctggctccagcatcttctgcatctcaggctctagccacccctctggctcctatggcggctccacagacagcaattctggctccttctccagctcctcctctggctcctcttccggtcctggcaccatcgccaggtgctgctcctgtcctggcttcatcacagactccggttccagttatggctccatcgtctactccaggaacctctttagcctcagcttcaccggtaccagctccaacccctgtgttggctccatcatcaactcaaactatgctaccagccccggttccgtcacctctcccgagcccggcttctacgcagacactggccctagccccagctttagcacccactcttggaggctcatctccatctcagacactctctttgggaacggggaacccccagggaccctttccaactcagacattgtcattaactccagcatcatccctggtaccaactccagcccagacactgtctttggcaccaggaccaccactgggtccaactcagacgctgtctctggctccagcaccccctctggctccagcttctccagtgggcccagccccagctcacacgctgactttggctccagcatcgtcatctgcttcactcctggccccagcttcagtgcagacactgaccttgagccctgccccagttcctaccctgggcccggccgcagctcagaccttggcgctggccccagcctccacacagtccccagcttcccaggcatcttcccttgtggtttcggcatctggtgccgctcccttgcctgtcaccatggtatcccggctgcctgtttccaaggatgagcctgacacactgacattgcgctctggtccccccagccctccctccactgctacctcgttt

SEQ ID NO: 15854 - DNA, 2300 bp, Homo sapien
tcgaaagctgccaggacggctggtaactgtggtagaggaaaaggaactggtgcggcggcggcggcagcagcggggagctgccagcaccctagtgcctggggtctctgagactagtgccagcccgggaagcccgtctgtccgcagcatgtcagggccagaatcctcccctcccattggtgggccctgtgaagctgctccttcatcctcactgcccactccaccccagcagcccttcattgctcgccgtcacattgagctgggggtgactggtggtggcagccccgagaatggagacggagcactgctcgccatcaccccacctgctgtgaaacgtcggagggggaggccccccaagaagaacaggtctccagcagatgctgggagaggtgtggatgaggcaccctcatccaccttgaagggaaaaaccaatggggctgacccagtccctgggcctgagaccctaattgttgcagatcctgtcctggaaccacagcttattcctgggccccagcctcttggaccccagccagttcacagacccaatcccctcctgtcacctgtggagaaaagaaggcgaggacgaccccctaaagcacgagatttgcccatccctgggaccatttcctctgcaggggatggcaactccgaaagtcggacacagccacccccacacccatcacccctaaccccactcccaccactgctagtttgtcccactgctactgttgccaacactgtcaccactgtcaccatttcaacgtccccacccaaacggaagaggggccgacctcccaagaatcctccatcacctcggcccagccagctccccgtcttggaccgtgacagcacttctgttctcgagagctgtggattggggaggcgacggcaaccccagggccaaggggagagtgagggtagttcctctgatgaggatggaagccgccccctcacccgcctggcccgccttcggcttgaagcagaaggaatgcgaggacggaagagtggagggtccatggtggtggctgtaattcaggatgacctggacttagcagatagcgggccaggcgggttggaattgacaccacctgtggtctcactaaccccaaaactgcgctcgacccggctgcgtccagggtctctagtccccccactagagactgagaagttgcctcgcaaacgagcaggggccccagttggtgggagtcctgggctggcaaagcggggccgcctacagcccccaagtcccctggggcctgagggttcagtagaggagtctgaggctgaagcctcaggtgaggaggaggaaggggatgggaccccacgccgacgtcctggcccccgccggcttgttgggaccaccaaccaaggggaccagcgcatcctgcgcagcagcgcccctccctccctggctggccctgctgttagtcacagaggccgcaaggccaagacgtgagtgggctgcccctccacctaggctttccaccgtggccactccctccatgaccaggcctgactctgttaaccactacttgaagtcttgagggggaaagcctccagggagacataggggccttctcccttcttcccaccaaagtagggggtaggcaactggttgtcatggaaatggggatcatcacagtccccttccccttcaccccacgtggctgggcagtgttaagggtggcaagatagtctctgtccccacccccttgtacttgattccccagctgtctttcacacagccccccacccttaggggaagggggaggggcttctctacaatgaggtttttttcttttttttttttttttaagaagaaaaaataataaacttagtttctgtatgagcatccgcgtaaggaggcttctgattttctggtctggtggagggttgggtgggaacttgggcatcgtttttctcctccctcttgttcttgcaaagatcctagcacctgatctctagcccaggactatatgttccaggcagaaatctacccaagaagagggaagattggtgaatttgatgtggtagggtgcctttccccagtcagtttgaagtcacagatatccttttcctctcatttcttttccctcggttcctagacgttcctcggagctctttgatgcctcagacctttcccttttatccctcttgctcaggtgcttcctttcacaactttttccagagggcaggcgtcctagctccagttgctccatcccttgggccctcccctgctcttcatctagccaaactggtttgagtcagccacaccccttcccagctccctgggctcttcacgt

SEQ ID NO: 15855 - DNA, 2300 bp, Homo sapien
atggtctcgatctcttgacctcgtggtccacccgcctcggcctcccaaagtgctgggattacaggtgtgatccaccgcgcccggcccaacgcatagatcttaagtgtgcagcttgattattattatttttttttgagatggagtctcgctctgtcacccaggctgaagtgcagtggtgtgatctcactgcaacctctgccttctgggttcaagtgattctcctgcctcagcctcctgagtagctaggattacaggcgtgtgccaccacgcccggctaatttttgtatttttagtagaaatgggatttcaccatttggtcaggctggtctcgacctgaccttgtgatccacccacctcagcctcccaaagtgctggtattacacgcgtgagttaaccgtgcctagccgacgaatgttttaacgtaaataaacctgtgtagtcagtcactcaccacctataggaatataacatttgcagcacatcagcaagttccctcatgctcttcattattatttttatccccgatattgacctatggaaaccctttcaatctggttcctgtgtccttgtgataagccccgctcattagtaatgtctggcacaaatcactccagactcaccttgtactttccctgctgaagcctagaaattggccatttctcctgaaaagacttagttccttttattgggtactgttattgagaaatcagcatctagacactaggcgttctactgggaagttactgcttagggcattctgaaagcagaggtaagagccagtaaatagttaatgttatctactttacatcttttaaaaatctttttaaaaattccagtcaatcatagggttctttctccactttccccattccagattccagattccagattcccacagttaagaaccttggcttccagtcacatcaatatattgattactcagcttcagaattattatcctgttatattaccaaacaacaaatctaagtaaagttcaagattttttgcaattttgcctttagattgatggtatagagtcatagtactctataaaaagttacctgaattcatttttcttccctcataattgtaatcccaaagtgtcatttctaagatagctgtagggagataagttaattcttttcctctttggctggaacataacctccacagggtaggggtgtgtgtgttgtttcattgctctcagtctagttcctaggtcttagacggtcataaaaatttgttagtgaatgccaggtttgagctatgcactgagtcactcctggcagaatctaacaacctggtgggtttagaacagagtgtgatacaaggcttttgggagagggtggaagattgagaaagtgtgtaaatcccagatagtaaacgctagggctttggatgtatttaggaggagttgaagcggacacagaaaaggcttcctctggcattttaagtccgaactaagaggccaagctggagtccaagctgcgtgtgtccaaatgttttaagggctggagtgtactcaggacaggcgctttgggccaggctgctaatattgaaaagagcttgctgggcgttgtggctcaagcctgtaatcccagcattttgggaggctgaggcgggaggatcgcttgagccccgaagttcaaggctgcagtgagctatgatcgcgccactacactgcagcctcagcgtgggctacagagcgagaccctgtctgaaaaaagagaaaatgctgaattcagttagggatgcttggaggagaccgagggaaccctgctcaagtctgggaactagaggcgcgggaaggtcctgcttccccgccacccagagatcacgtttcccagtaaacccaacttccgggtcccattccaggcctccaagcccacgtgacaacaagctccgccctctgctgtcccgcagatgccactcggtgattggccgcgtctgaagccgcgccccggcgtcgcgttgcagccttaggtccagccgagcgccgactcacgccccagccccaattgggcggccggtttccaattggaagggcttctgagcctcagtcttcgggcggcgctgaccattggcgggcaggatggaggcggagccttgggttgtcgcccgccgccgggggttaaggtgagcgactgcaggcaaacccggcgacagcgcagctcgcgtcgaccctggctcctctgcctgccccctcaggtgagcctgcgctagacccccgtccccttcctgcgcccgcccgaatgcgcctgcgcggcaacagccgcctgcccttgcgccccttccccctg

SEQ ID NO: 15856 - DNA, 2300 bp, Homo sapien
cttcccatggtcacttgtgccaggcccggttcctcttctccctggggctcaaacctggtagctgccccctctcaccaatacaagccttgtgaagatcctggagcagggcacaagccgctgacgtctgctccagtgagaagccctgctggcggcagaaaatgagcgcgtggcagaagaggtccagggtgatggcgtccctcaggctctgctcaggacaccctagctccagcagctcagccagcacccttgggagggagagaggagtgagtgacaactgggcctcctttcatcaccctacacccaccacatgctttggagtcagccattcctcatgttttcccaacctgacccctcagcctttgccaagagctcttcccacgcccccctcagtccctactccctcatctcagcattggtggtcttctccagctggtgcatggaatggacgtccaggtacttcctgttatagtaaaagaaaaagagtattggtggccgttacctatcatgacaaggctgtgacagctagtgcgtgagactgggagttggccaccggcgtgaagctgggctcttttgccagcttgctgtgtgactatgcaaatcgttaactctctgggcctaaatgaactcttatgagcctctccatttctaaagcctagggttaggaatcttgaattcttttttctgctctgccactaccttgtatgaccttggtcaagtactccctgtggccctcagtgtccccctctgtacaatactccttagcggccatgagactccatttacattctgtctttggctctttttttctcacactgcctcctctttggactggagaggctggaaagccaacttccagtcacctggagtaattgcatctccaggcctcagtctcatctgtaaaatggggatgccctggccacagacaggactgttggggagacaataaagaacgcaaatattcagtgtaatttttgtctcttcacactcaccacatgcagatccggggtcggggcagcggcggctgcggaaagaaagcgaattggggaaggcagctgcggtgtcctggcccgtagcgaatctccagcaggccggagaagccgctgtaacttgccatctcatctcaaggactaaggagaggcgcgggcgagggagggcttcagcaggccctaggtgctctacgcgagcacagtaaccaccggggtcacacacccctgcctctcctcgcccaagcagcccgggagacgtcccgaacgttagtaagcataatgacaggtggcgcctgcgggggagccggtttataaatattcacgagcagaccagactgtcccgccctcaccggaaacaagttggctccggggtcttcatccgctttcgccgccgccgccgtcgtccactgagtccgcacactcgcacgcgtccgcgcggccgacccatgcactgagctgcgatccttccccgcttcccgccgcagctcggagagatgttcaagctccgactgcaccctcattcccaaaaagtggctggtcttgcggttgagcatctcgccgctcttccgtgccgcgaggcgccccgggctcccgccgcctaggttccaggacagccagcgctcggtcggcggctaccaaggccgggcccgttcgcctcgctccggccaatctacgcgcggagaggcgcggcggggcgaatccgtgggggcgtctccctccgtctcaacggcgacggttgccaagggggcttgtgagggaaggaaggcggaaagcgcaggctcacgccagtgggagcgaagagaacgcgcagatacgtgagaagttgcgagtgcccacctgggcgccctctcttccaggttgctaatacgagggccggtgctgtcctccaggctgggaagtgggagcgcggtgtcagttactatgggaactgcctcttggccaatcaccgagagaaagaggaggtgtttgggaagaagccagaggacccgagtggcgggaccaagcgtaaccaatagaagcagaagataaagaagtttcctcacatccggggctgcctttggcgcctgcgccctgcgcaccgttggggggggggcagtggcgtccagtgacgcccagtgacgtccggtgaaatccaagatggcggcgctaggctgaccctcctgctggtgagggctctggcgccgggggggacgggatccagcaggtgtgtgcagggtggagggtgtttggggctgtggaacaccagccgttcccacatctctgctctgtgtcttctgcaggtgacggaagtaccgcctcctcccgtttgacgcc

SEQ ID NO: 15857 - DNA, 2300 bp, Homo sapien
gctggaaagccaacttccagtcacctggagtaattgcatctccaggcctcagtctcatctgtaaaatggggatgccctggccacagacaggactgttggggagacaataaagaacgcaaatattcagtgtaatttttgtctcttcacactcaccacatgcagatccggggtcggggcagcggcggctgcggaaagaaagcgaattggggaaggcagctgcggtgtcctggcccgtagcgaatctccagcaggccggagaagccgctgtaacttgccatctcatctcaaggactaaggagaggcgcgggcgagggagggcttcagcaggccctaggtgctctacgcgagcacagtaaccaccggggtcacacacccctgcctctcctcgcccaagcagcccgggagacgtcccgaacgttagtaagcataatgacaggtggcgcctgcgggggagccggtttataaatattcacgagcagaccagactgtcccgccctcaccggaaacaagttggctccggggtcttcatccgctttcgccgccgccgccgtcgtccactgagtccgcacactcgcacgcgtccgcgcggccgacccatgcactgagctgcgatccttccccgcttcccgccgcagctcggagagatgttcaagctccgactgcaccctcattcccaaaaagtggctggtcttgcggttgagcatctcgccgctcttccgtgccgcgaggcgccccgggctcccgccgcctaggttccaggacagccagcgctcggtcggcggctaccaaggccgggcccgttcgcctcgctccggccaatctacgcgcggagaggcgcggcggggcgaatccgtgggggcgtctccctccgtctcaacggcgacggttgccaagggggcttgtgagggaaggaaggcggaaagcgcaggctcacgccagtgggagcgaagagaacgcgcagatacgtgagaagttgcgagtgcccacctgggcgccctctcttccaggttgctaatacgagggccggtgctgtcctccaggctgggaagtgggagcgcggtgtcagttactatgggaactgcctcttggccaatcaccgagagaaagaggaggtgtttgggaagaagccagaggacccgagtggcgggaccaagcgtaaccaatagaagcagaagataaagaagtttcctcacatccggggctgcctttggcgcctgcgccctgcgcaccgttggggggggggcagtggcgtccagtgacgcccagtgacgtccggtgaaatccaagatggcggcgctaggctgaccctcctgctggtgagggctctggcgccgggggggacgggatccagcaggtgtgtgcagggtggagggtgtttggggctgtggaacaccagccgttcccacatctctgctctgtgtcttctgcaggtgacggaagtaccgcctcctcccgtttgacgcccctcaggggaccctgcatcgctccagccgccgcggccatgtctgggccaggcaacaaacgcgccgccggcgacgggggctcagggcccccggaaaagaagctgagtcgtgaggagaagaccaccacgactcttatcgagcccattcgtcttggaggcatctcttccacggttcgtgggctcttgccttaaccctcagaacttcccagagccctccctctgttctctggccaaactgtgcggaatcttacacccacttccccaagtttagcaaggtccgcgttacaggaccttgaaagaaaggttagaaagaagctcagaacacgacgcctgtcttccctttacagataggaaaacaggtttccagggggcgtgtgacttgtcaaagactaaggatttacaaggggacaggcagaaacaacgtgagcctcctcacaacaaagacactttcgctgtgtgttgtctgagcctccttagattctgttagcggttagtgtgggaatacctccatctcccatgcattgcagatgctctgctcctctttctctctctgtgattggtttgtgggccctgcttgacgctctcgtcggcccctttgtttcctttggtaggaggagatggacctgaaggtactacagttcaagaacaagaaactggcagagcggctggaacaacggcaggcttgtgaagatgaactccgagaacgaattgagaagttggagaagcggcaggccacagatgatgccacactcctcatcgtcaatcgctactgggcccaggtggataccttctgctttcaaagaccaggccttgattcagctgccaatccccagattcc

SEQ ID NO: 15858 - DNA, 2300 bp, Homo sapien
cacacgagacacagctgccttggagaactccattcggccttgcagctccagctccacctcctcactgctgctggcacccagtgccaccacaaaagccaaggccggctcactgagagggggccgcagctgcatcagcaaggggtctggaaggaatggacagaccctcatgaggataagagcagcagttactaccactctgtaccaagttccagactgagcccttcaatactcatggttcacttaatcaacacaacctatagtgcactattatctccatcctgaaagtgagacaaatgaaattcagggaggtaaagtaatttcctcaaagctacagagttgcgtatcacatcctcagggaagcttcctgtactttaccaatataattagaatcacacgcacatgcatgcacacacaatcattccgtttcaggagccccagtactttctgcttactatgtttataatttcctcccttatagcaagtgcaacactcatttctaggaagcgtcaaatacatatttaatactcaaccataatactgttttgaaacaaatgggtgtcaaaacatgaattgctctataaaccaagttagtcagagtctaaagcctgtgtttttgtgcactgcactttactgcccaaacatgaaatccatttcgtgagaagtagtaagataggcaattcaggggcccaacaccaaagtcccctcctccccaggacttctcccagaacttaagctccccagatcccagcactctggtcctacctctcagctctgatgtccccggctctgggagaggagtcccatcacatgttggcccctcctgggtcccaggtgcctcaggcgctgaagacagctccccctggctctcatggcatcggagaagggcttccacagtttcatccagctggaaggagaaaacatcaaaaatgttatgaatcccttagtgctttccaacatgatactcctttcctagcaggggaatctggggattggcagctgaatcaaggcctggtctttgaaagcagaaggtatccacctgggcccagtagcgattgacgatgaggagtgtggcatcatctgtggcctgccgcttctccaacttctcaattcgttctcggagttcatcttcacaagcctgccgttgttccagccgctctgccagtttcttgttcttgaactgtagtaccttcaggtccatctcctcctaccaaaggaaacaaaggggccgacgagagcgtcaagcagggcccacaaaccaatcacagagagagaaagaggagcagagcatctgcaatgcatgggagatggaggtattcccacactaaccgctaacagaatctaaggaggctcagacaacacacagcgaaagtgtctttgttgtgaggaggctcacgttgtttctgcctgtccccttgtaaatccttagtctttgacaagtcacacgccccctggaaacctgttttcctatctgtaaagggaagacaggcgtcgtgttctgagcttctttctaacctttctttcaaggtcctgtaacgcggaccttgctaaacttggggaagtgggtgtaagattccgcacagtttggccagagaacagagggagggctctgggaagttctgagggttaaggcaagagcccacgaaccgtggaagagatgcctccaagacgaatgggctcgataagagtcgtggtggtcttctcctcacgactcagcttcttttccgggggccctgagcccccgtcgccggcggcgcgtttgttgcctggcccagacatggccgcggcggctggagcgatgcagggtcccctgaggggcgtcaaacgggaggaggcggtacttccgtcacctgcagaagacacagagcagagatgtgggaacggctggtgttccacagccccaaacaccctccaccctgcacacacctgctggatcccgtcccccccggcgccagagccctcaccagcaggagggtcagcctagcgccgccatcttggatttcaccggacgtcactgggcgtcactggacgccactgccccccccccaacggtgcgcagggcgcaggcgccaaaggcagccccggatgtgaggaaacttctttatcttctgcttctattggttacgcttggtcccgccactcgggtcctctggcttcttcccaaacacctcctctttctctcggtgattggccaagaggcagttcccatagtaactgacaccgcgctcccacttcccagcctggaggacagcaccggccctcgtattagcaacctggaagagagggcgcccaggtgggcactc

SEQ ID NO: 15859 - DNA, 2300 bp, Homo sapien
atgagtattgaagggctcagtctggaacttggtacagagtggtagtaactgctgctcttatcctcatgagggtctgtccattccttccagaccccttgctgatgcagctgcggccccctctcagtgagccggccttggcttttgtggtggcactgggtgccagcagcagtgaggaggtggagctggagctgcaaggccgaatggagttctccaaggcagctgtgtctcgtgtggtagaggcctcagaccgcctacagcgccgggtggaggaactctgtcagcgagtgtacagccgaggtgggttctttgtgcccatactgaaggggtgtccatccccacctgcatcttgatggcaccccttcctgattcccctaatgcccgagtccaagggcggccagaatttcccaaggaataaatcagccatgttcttggaagaggtaggttaggctgtagatgggggttccaactttgattccgggattgaatgctagagagatgggttggaggagttgttgatgccggtagaggctcctggccagaggcccctctggagcacttggtgtgggttgcggatccacaaggcatagcttcaagggctcaggccttgtaggttgacaggcttctcccaccttagttctgccaccctcacctggacatgctgggaaagtggctcccctctctgagctggtttccttctctgtgcagtggggataaagactcctggctttgtcatgagaaatgggcaagacagctggtggatcacactgggtatatagcagactccagaatgagttagttgtttgccccattgccctgagctgggctcttacctgggccctgccttcccaggggacagtgagcccctcagtgaggcggctcaggcacacacccgagagctgggccgtgagaaccggcgactgcaggacttggccactcagctgcaggagaaacaccaccgcatctcattggaggtgaggagccgggggctttgggggtgtgattagaatcaggcaggatttgggttagatgggcactcagggacctcaggaaccaagtcccccatccaagcatctgctccctcattgttcccagtactccgagctccaggataaagtgacatcggcagagaccaaggtgctggagatggagacaacagtggaggacttgcagtgggacatcgagaagctgcggaagcgagagcaaaagctcaataagcacctggcagaggccttagagcaggtggggcaggggtgctggggcaggtgaggcaaggctgggcccttgggccttagctcctcccctctacatccattgcctgtctgttttctctccacagcttaactctggctactatgtatctgggagctcctcaggcttccaggggggccagatcacactcagcatgcagaaggtgagcggcgttttcctcccaccccttctcacaacctcttctctgttgcactcttgaaattcccctcaggacaaaggacaaacatccatctctgaggcccttcctggtcactcctgctgctctttttttcatgcattcatatacttgttgagtagatttttgaacacttagtgctaggcactaggcatattggcgagaacaaaatagaggtcaaaactttcatggaccagacaagaaataaataaaagaatatatctttaggttctacttgtggtaacagacaagaaatcagtaaaatagcatatcagtgtgttatgagtaccacaaagataaagcacagaagagagagctaagagtgagttggagtcagttggcatctggtggtcactgtgccctttttccctttattagcactttaggcctttctggaatgccttccgtgactccccatcagttaagagccttagttcccagcaccgaccatgcagtattgaattttctcccatttttctgggagcccttaggaaagtacttggtttggggtgtcagaatcgatcattgccctgcacggggtgcttggggtggagtgtatgctggggatgtaagggaggcctgctgccacgtctggccctgcctcccatggccctgcctcccactccttagtttgagatgctgaatgcagagttagaggaaaaccaggaactggccaacagccgtatggcagagctggagaaactgcaggccgaacttcagggggctgtgcggaccaatgagcgcctcaaggtgggctgctgtaggggctgagaggtcctgggcctgtaagggagggactgagccctgaatcctgttgctgatcccatttgggcatccctgccccaggtggccctgc

SEQ ID NO: 15860 - DNA, 2300 bp, Homo sapien
tcgagtttgagcagaatctggcggccaacgagcaggcgggtatgtggtgaggatagggcggaggtggggccttatctgggagtgctgggccctggtgtggggctgctgcttatccagatgcaagaggctaaggccttttttttcacagagcctcggcttcctatgcaaaacagggcctgcactgcttggctcccaggcacagtgagggtccgccagctggggtggctgatggagcaggcacatgcagagtctgagctgtcagccctgtcctcattcttctggtctgatgacgtctctgtctctcagatacttgtgttacaaagatttatcaaatgccacctctgagccaggctctgttctagggtttggggttatgccagtgaacaaaacagaattcctgccatgtggagcaacattctggtagaagacagactagaggaagacgaactagtagaagaaaaatggaaaatgtgttagctcttgacagataggaaagtaaagcagaaaaggaagataggaagtatcaggagaaagggtgttgcaattttgaataggaggccagggaaatgtactgggaaggtgatatttaagaatctagaagaagttaactaacttttgtgaatgttacagttaccttctctattaaagggaattggatgtataaaaaaaaaaaagaaaaaacctaggccaggtgtggtgattcatgtctgtaatcccagcactttcggaggccaaggtgggaggatcacttgaggccaggaatttgagaccagccagggcaacaaagtgagacactgtttctatttaaaaaaaaaacaaaaaaccccacatattctatattagcaaaaatcgtatgaataggcagtgtcaagttaattttgggtgagtttccttgaagtcagcattatttactttgatgagttcatgctccgttgaggccgcaatgttcccctcctgcacagtgggagtgatggcatagcctcttaccccactgaggggttggagtcctaacccaggaactggttctgacacctttacttgctgatgctcctccagggcccatcaaccgtgagatgcgccacctgattagtagtcttcaaaaccacaaccaccagctaaaaggggacgcccagcgatacaagcggaagcttcgagaagtacaagctgagattggcaaggtgagaaggggcctgcctgggaaaaggtttggctagactccagtgaacaccatctgacttcatccctcttcctctctgcctttgcagctccgggcccaggccagtggctctgcccactccacccccaacctgggccacccagaggattctggcgtcagtgccccagccccagggaaagaggagggtgggccaggccctgtcagtacccccgacaacagaaaggagatggctccagtgcctggcaccaccactactaccacttcagtgaagaaggaggagctggtcccctctgaagaggacttccagggtataacccctggggcccagggcccttcctcccggggccgagaacctgaggccaggcccaagcgggagcttcaggaacgggaaggtcccagcctaggacctccacctgtagcctccgctctctcaagggctgatcgggagaaggccaaggtggaagaaaccaagcggaaggaatcagaactcctcaagggtctccgagcagagctcaagtgaggctctgttcctgtctccttcctgaccctgccaggtggcctccagtcccactcactaagacttcctcctgtaccttcttgccaggaaggcccaggagagccagaaggagatgaaactgctgctggatatgtacaagtcagcgcccaaggagcagcgggataaggtgcagctcatggcagcggaacgcaaggctaaggccgaggtgagggcagctggggcttgtggggcattcagaaaggcagagcagagtcctagctcagcaggaagcagtgtcaagagagtttcttcttccctgtgctataggttgatgagctgcggagccgcatccgggaattggaggagagggatcgaagggagagcaagaagatcgcggatgaggatgccctgcggcgcattcggcaggcagaggagcagatagaacacctgcagcgcaagctgggtgccaccaagcaggtgcggcccatgtggtgccctcgcgtcggagcgcagggagttcccttcataccctgtttggtgcctctagtgcctgcaggaccttgatgatctgggtcccctctgtagttctttgcttcgctgcgttttcccatggttcccccacagcca

SEQ ID NO: 15861 - DNA, 2300 bp, Homo sapien
agccaccgtgccctgcccggacttttttttttttttttgagacagggtctcactctgccacccaggctggagtgcagtggtgcaatcatggctcactacagcctccacctcccagaattaagtgattctcctgcctcagcccaagtagctgtgaccatagcgatgcaccaccacgccagggtaattgtttgtttttgttgttgttgttgtctttctttttttttgagaccgagttttggtcttgttgcccaggctggagtgcaatggcacgatctcagctcactgcaatctccgcctcctaggttcaagcgcttctcctgcctcagcgtcccaagcagctgggattacaggtatgcaccaccacgctgggctaatttttgtattttagtagagatggggcttctccatgttggtcaggctggtcttgaactcctgacctcaggtgatccacccaccttggcctcccaaagtgctgggattacaggcatgagccaccgcgccctgcccagctaattgtttttaagttttttgtagagacagggtttcactatgttgcccagccttcaaactcctgggctcaagttacccttctgcctcagcctcccaaagtgctgggattacaggcatgagccaccaggcctggcctttagcaattttttctctttcctgttttctcttttccttccttccttccttccttttctctctttctctccctccctccctccttctttttttttttttttttgcgacaggatctcactctgtcgtccaggctgcagtgcagtggctcaatcttggcttattgcaacctctgcctcccgggctcaagcgatctgcctgcctcggcctcacaaagtgctgggattataggcatgagccactgcgcctggctaatttttgtatttttagtagagacatggtttcaccatgttgtccaggctggtctcaaactcctgacctcaagtgatccgcctgccttggtctcccaaagggttgggattacaggcgtgagccaccgcacccagctgcctttagtaatttctgacctttggtttattcttccccccagcctctcagtctctggacagagccctctgcacgctcccaggattcctctgtgtttgtaacacatacacaataccaaacttcccaagggtagaaagcccaatttccatgcatctcagaggtatgcccaccccagtgttaaccacagtgcccaggaataataatgcagtgtgttgaactgaaagaatcaggtggccttaagtacaccagtcgcttctcacaccttggtttcctccccggtgaaatggggatgatgggcaaccttatcccatgggactgtgataaggaagacaagaaagaaaggctgtaaaaattgcgagcatagataacttggacgttgagaggccaccagtgttcctgggtttttaaaggtttcttctgctgtgagccgggtgccctctgagctatgagaaaagaggttctccctccttggccagggaacccccactggcttctttcctgccaccgtgagcctcagtttcctcctctgaggggaggtgtttggagaagaggggctggaacacaggctattgcaaatccttcccggctgtgcttgttcctgcagtcccaactcctgcagccatgacttccatcaagcattaaggccatgtttagtgcgtagggtgttccctctcaggtctgctctgccagcccctgctcccaccccagccccatcccagggttagtccaaacaaagactggcctcaggggatcagcagccgccaaatctgagatagggctttccgggcgcggccggcggagcccctgcgaaatgaagagcggccagaagcccagggaccctcgcgggcatcggggctctcccagatgcccacgctgcctgctcccactggagacggggacaggggcgtcgtcccagcctcctccctgctcccaccgctgtccccttttttccccaggctgcgggaggcaaagggttaaatcccatagagctgatgctctgactccaggctagaggggcccgggaagctggggtcacttcctgctccgtcccagtcaccctgaactggtccccgggtcctcagcctggaatcaccccttgagaaggaccccagagtcctcggcgcccagtccgtcccccgaggcagggcactgaaggggttaagtcccctggggctggattccgccttccggcttttcccagaccccagagccgtgagttggggacgcctgggttcccggggggtggcctggagtgcccgggacggccgccg

SEQ ID NO: 15862 - DNA, 2300 bp, Homo sapien
ctgcactccatcctgggccacagagctacactgtctcaaaaaaaaaaaaaattgtacagatatatatacacacacacacatatagaaaaattatataatttttcctcctctctctatatacatatatatatagatatatgtatacacacacacacacacacacagaggaaggtataggtgtcaaacctttttttttttttttgagacagattcttgctctgtggcccaggctagagtgcagtggtgcgatcttggctcactgcaacctctgcctcccgggttcaagggattctcctgcctcagcctcccgagtagctgggattacaggtgtgtggcaccacatccgtctaatttttgtatttttagtagagacagggtttcaccatgttggccagactggtcttgaactcctgacctcaagtgatctgcccgacgtggcctcttaaagtgctaggattacaggcgtgagccactgagcccagcctaaattcaattattaaactccttgagttaattaaagggtagccaggtgcggtggctcatgcctgtaatcccagcactttcagaggccgaggcaggaggatcgcttgagcccaggagttccagaccagcctggacaacatagcgagatcctgactctacaaaaaacagaaaaattagccgggcgtggtggcgcgtgtttgtagtcccagacactcctgaggttgaggtgggaggatcacctgagccctcgggaggtcgaagctgcagtgagcggagatcgcaccgctgcactccagcctgggggacagtgaggcggtctcaaaacaaaacaaaaacaaaaggggagggcggggggaagacttaaagacccctgagccagggccattattatttaacttggtcgggtctctgaaccattcggaggaagcttgggtttctatccttcccgactgagccacagacctgagtcttgactccggataaatcaccccagactgtttttctgtctgtgacacgggaacggcagcttctgcctcgcgaggtggagagagaatgagaagcgccgtgtgtggcgcgcctgacacggtcagctcgcgggtggaggcccggagcagaacgccctcgggcgcccgctcttgcagccgcactggagaccgggaatggctccggccacgcctctgccgactgcggcaacgcgagggacagctggtctccggggttgcagcgtaacgccctccttcccggcctcatctttcctgactgcataacgggcatacagtgggttccatggcgcaagggagctgaagaagccgcccgcccccagctcgcccgggatcctcacgcccctataacgccccgaggggccacgatgctgcccacagcccagatcgcgagtgcggaccctgcgggagggtctggcctagatgcgagtttcccgccgcagaccaggcgaggccacgcgacatatcccctacccgcttactgcaggccgcagacggagacagtgcagccctgcgcactgctgaggttgcccgaggtctcagcctcggcgggtcgggaacacgcggcgcgcgcccgcgccccaaccggaagtccgccaccggccgctctagcacgcgcagggctgcgtctgtggccttaacccttcccaaggctgcgccgccggcctttgtctccgcggagcgtcacaaaggttggaagggtcgcggggcctctgggtgccgagctgcagatgcctccactgcgagcacagccctgagacaagggcccaggcgcccagcggggctggtttcactcagtccagccgcacctacccgtgccctcaccagatcttaagatacagacattaaaacctccaccgggccgcggcacaggacagcagttttactttctgtttttggcattgcattgcctccatttcctagagtgcacgtaataaataccgctggtgattccaaaatataaaggttgaaaatatttactttacaaaaatttggttcccatactgcttttaaggccatcctctgcacttggttcccgctgctcctgatgtggttgaaagatggatgaccccaaagacgaggaaaagattattggctccattttttagatgcggcagccagctaaggtctagacaggggaagggacttgccccaaatcacagttagagcaaatcagtctgaatcaggaataactccattcctatcccgcatcctgccctttcactacgccacagctgcctggctgcctggaggaacaaaggagggccgggcaagaacgccattaccaactgcaaatccacaggcaaatgcaagagg

SEQ ID NO: 15863 - DNA, 2300 bp, Homo sapien
gggctgggggtgtcagggcctgggaggcagcccaatgttctgccgcgggctcaggcttggacctgaggcagcggctgctttgggtgtaaagctgaggagacaggagagggaactgccggactggcaggacaggaatgcgcaggccctctctctagtctggggcgcggcttgcgagggaggctacgatgggggccgtcaggcttggggcatgtttgtccagacatacatctcctggcctatcttagatggcttccaatctcattgtcacacccaccaggagggagacagatacactgctctcctcttcttagcaggcctagtaacaatcacaccccgccccccacccccaggagaacaagctacagagacctggacaggaagtcacacccatacgtcaaccccattaacctggtgtagacggaaaggaaggcacatagggatgatccatacttggtttctggcccccgcgaggggctcgcggtctgtcgaggaagcccatagacaacagaagctaatggggtttgtgaatgaagacgaggaggcccgtgtgtgtgtgcgcttgcgtgtgtctgcgtgtgtgcgtgcatgcggacgtgtgtgcgtgtgagcatgcgtgtgtgcgagtggatttgtgtgcgtgtgagtgtgcaggtgtgcgcgtgtgtgcatgtgcgcgtgcatgtgtgtgcgtgtgttcgtgtgagtgggtgtgtgtattgccgtgagcaattgctggaataaaagaagaaagagtttaactggagagggcacagcagatagaattgagccagacaattggtagggcccacaatcacatgtgtattaactgtaaatatttattgggcatttaccatgtgctgggcactgttctaagagccatatgcacattaactaactcctgtgttatagatgcggaatagagagaagtgacttgtccagggtaacacagttaggtgtggcacaactgggattttacctaagcagcttggctcaaaaaaatgctgtcttaaccatgctcctaaccccttatacccttaacctctggacatggtcacgcccaaattcacagacacaacagccacaccttgaaacacacacacacacacaacagcagcacaaattttgacatggtcttatctgctgacaagccagcctcaaataaagtcaacaaagacacactcattttatttaagtaatgtacattttatttaagtcatgtgatggattttcacagaatacatatgcccagggaaccagcaccagattacacaacagaactggatcagctcccagaagctctcccctcgtcccctcccaaccctaagggcgatcactatcttgactttggtgcactataaattagttttgtctggttctgaacgtaatacacctggaaccatctagtatgtactgttgcatttggcttctgtcactcaagatttcatcatgcgacttgtctatgttgctgtgtgtagccgggcatgtcaatcccgttgctgtgtctatgtgcatggtagtgagtagggcatcattcattttccattctgttgatgggttatttccagtttggggctgttatgaaagggctctgaacattcccatgcaccctcttgatgctcacacctacacatttctgctgggtgttgacagcctaggagtggaactgctggatcacagaggtggcatatgttcggcttcattagaaaactgccagttttccaaaatgtctctaccaatttacactcccccagaaatacaagagaggtccagtcgctctactttctcgcctccacacggtgcggtctttttcactttagccattctggtggtggagacccactcgtattcgcagcgcctggagcgtaattggcactcagttaacaagactgttgaatgaatggatgactgagtaagttgggcggtgtagaccaacagcctggcgagggcggacacacgcacgcactccacacacagcgtttcgcggacacccaccgcggctcacgcagcgcaggacacagaccctgtcgcgcaccccgcgcccacgtggtctgaacacacggcctcggccctgcctcgcgcgtccggtcgcaactcccgctctccgtccccaactcgcgcgtccgtccccaactcccgctctcggcggcgggcagggggcgctgagcgtccaggcgctccaagggggcgggcccgggtcggggcggggccggccgggcttccaggcctgggctctggccgcccgcgccaccgggccgctccggggacaggccggggcggggcgcggcggcaggaaacggggc

SEQ ID NO: 15864 - DNA, 2300 bp, Homo sapien
cattcaacagtcttgttaactgagtgccaattacgctccaggcgctgcgaatacgagtgggtctccaccaccagaatggctaaagtgaaaaagaccgcaccgtgtggaggcgagaaagtagagcgactggacctctcttgtatttctgggggagtgtaaattggtagagacattttggaaaactggcagttttctaatgaagccgaacatatgccacctctgtgatccagcagttccactcctaggctgtcaacacccagcagaaatgtgtaggtgtgagcatcaagagggtgcatgggaatgttcagagccctttcataacagccccaaactggaaataacccatcaacagaatggaaaatgaatgatgccctactcactaccatgcacatagacacagcaacgggattgacatgcccggctacacacagcaacatagacaagtcgcatgatgaaatcttgagtgacagaagccaaatgcaacagtacatactagatggttccaggtgtattacgttcagaaccagacaaaactaatttatagtgcaccaaagtcaagatagtgatcgcccttagggttgggaggggacgaggggagagcttctgggagctgatccagttctgttgtgtaatctggtgctggttccctgggcatatgtattctgtgaaaatccatcacatgacttaaataaaatgtacattacttaaataaaatgagtgtgtctttgttgactttatttgaggctggcttgtcagcagataagaccatgtcaaaatttgtgctgctgttgtgtgtgtgtgtgtgtttcaaggtgtggctgttgtgtctgtgaatttgggcgtgaccatgtccagaggttaagggtataaggggttaggagcatggttaagacagcatttttttgagccaagctgcttaggtaaaatcccagttgtgccacacctaactgtgttaccctggacaagtcacttctctctattccgcatctataacacaggagttagttaatgtgcatatggctcttagaacagtgcccagcacatggtaaatgcccaataaatatttacagttaatacacatgtgattgtgggccctaccaattgtctggctcaattctatctgctgtgccctctccagttaaactctttcttcttttattccagcaattgctcacggcaatacacacacccactcacacgaacacacgcacacacatgcacgcgcacatgcacacacgcgcacacctgcacactcacacgcacacaaatccactcgcacacacgcatgctcacacgcacacacgtccgcatgcacgcacacacgcagacacacgcaagcgcacacacacacgggcctcctcgtcttcattcacaaaccccattagcttctgttgtctatgggcttcctcgacagaccgcgagcccctcgcgggggccagaaaccaagtatggatcatccctatgtgccttcctttccgtctacaccaggttaatggggttgacgtatgggtgtgacttcctgtccaggtctctgtagcttgttctcctgggggtggggggcggggtgtgattgttactaggcctgctaagaagaggagagcagtgtatctgtctccctcctggtgggtgtgacaatgagattggaagccatctaagataggccaggagatgtatgtctggacaaacatgccccaagcctgacggcccccatcgtagcctccctcgcaagccgcgccccagactagagagagggcctgcgcattcctgtcctgccagtccggcagttccctctcctgtctcctcagctttacacccaaagcagccgctgcctcaggtccaagcctgagcccgcggcagaacattgggctgcctcccaggccctgacacccccagccccgaggtcctgtccacccggcagacaacttgccttccccctcgggccccttcccccactaggccccacggacgaggagctgagctcagggccaaggaatcctgtctcaaaagggggggtaggatgaaatgtttggggtctgggctctgattggctgcgcccgggccacgcccccagccctttcccctttctcccccctcgaaaggggggcgtgaagggagccgggatcagccaggggccagcatgagccggagggagggaagtctgggtaaggggctgagggaccggacgccgggtcgctgaggggcgcaggagtcagagggattgggagctgggggtctgggtttccgccacccccgggtccgggaggggagcggccttggcggggaagggcagggctccggtg

SEQ ID NO: 15865 - DNA, 2300 bp, Homo sapien
catgcaacaccaaattcaagcagtgaggatagaggggacagccaatcctctagggagggctaaggatttcctgactgataaagcctgagcggcaaagaagcctcctatccagccttgggcaagtctctgccaagctgggacttcacactacactggccagccattgacttccctgatagaaaaaccacaaccaacaagtcctcgctggggctggtctgccaaacacagaagacagagggaaggggagggggctgtcttggggtcagaagtgagcaggttttccaggggagaaggaagattgagaagaggggtatggctgctggctcacacctataatcccaacacttagggaggccaaggcgggaggcacacttgtggccaggagttcgagaccagcctgggcaacatagcgagacttcgtctgaacaaaaaaaaattatagtttaaaaattagctgggtgtagtggcgcgtgcctgaagtcccaggtattcacaaggctgagggaggaggatcgcttaagcccaggaggtcgaggctgcagcaaactatgatcctgcaactgcactccaacccaagtgacagagcaagaccttaaaacacacacaaaaaaaaccaaaaaacggcagaaagatgagaagccgttccatttgcataggcagttgaagtgtctaggcagaggcctccaaggctgactggatatcaggcaggggatgaggctggacagcctgcaatgcctccaactccaggttgcggaaatcgtgtttgtagtacctcagtcgaatggagattgagcgccccctgggagcagtgctcggtaacagacgctggaggaccccgatgaggaggggcgggggtcggttcaatctgggaggagcctgcgggtcagttttcttctcacaggagcgaactctgtccggcatcatggattcctgggctcccagaacggctgggctggaagggaccttagaaagggatctaccaccgcgtgccccgtgccagagttgggcactttggtgacaagaacattggcttgtttaacactcacaactgtgcttcgaggtggggatcattatccccattgtccccattttgcagatgagaaaaagcaaggtttggtggcttcccggggcggggcggggattcgctgtgactccaggtccttttccccggagcccgcacgtcttgtaagacactgattcccggaggtctgaggagcaggaatcgagtgggaggtgcccaggctttctagggaacaagagtgtgaatgcactctcgacgagaaccacgcccccctgttcgacaagactgattcctgctgccttcctttaagggccctcccctgaaacgcgaagtcctcgccccatggagaggcggacattctttattcccggatcgcccgacgtttttctcccccacccgcactgatccccactggtgacataaatccttcccctccactcgcgagtgaaagcttgggactacatttcccgccaggctgttcagaagccggtggcggagagaggagaaaagagtctttccgtttccgtcgcctcgcaatttggcgtgtccgccgggattcacatttcaacagcgacgtcctttctctgttggactcggcaaggaactacatttcccagcaggcaccggcgcagaggtcgaggggcgaggtcgccatctttttcgtagtcctctccctcatttccgcagggaagaggccagacgcctggactacacatcccatgtcgcagtcgccccggccctgcagccgccatctttgccggtggccccgccccatccccttccattgtctcgacttgagatgatagacgggagccgggagactgcaactcccgtcaggccgtgcgccactggtgggggggatttcgagaccacaggcgggcgaggtgcccaaggtggtggaaagcggagaccgggagaggctaggtagcctgccatctttacggtagtctcctcgtcctcctggttccgccattcttaaggaacactggaaggctataaaactactaatcccatcgcacctcgtaagatcgactactagtcaggtgtatgtccctcttccgccatcttgcttgtagtcctctttccttttcacctttccattgttcctgacgagtagaaatggcagcgggaaggcagcagatggactgcgactcccgtcaggtaccacacacgcggagggttgtggacaggagggcgtgtgagtgcctgggaaggaggtcgggtcgggggagaaggccatcttgtttgtagtcatcgttccctctccttctcgatgttc

SEQ ID NO: 15866 - DNA, 2300 bp, Homo sapien
caactcttcccctgttatccgagtgtagaatatcccaggctctccccaacctcaatctggggtaaactgcccagattcacctcccagatacccagagattcctagacggaagctccggacttttcctcccccccgccccaccaaccttttcatccacagcagccatccaatctctcttcccctcaacccagttatcctcaccagatccagcgagatccttgcccccaagtccctaacgatctcctctgcccactaactccccagagctctgacagccctggagatgcttcttcagagacccttctcagcccaagatctcagcccctcttgttccccacagggttccctcctccaggacaccctcctcttggatccctcaggtccacctgggcaatctcccaaattccttgggattctagaatccagcctgacatcttcccagaactgaggatgggctcagtcctaggacccccagcttcccgggctgctttcatccctaatcatctagaatcccttgggctccccctcccatggaaaccagatcctccaagatcccatgtggaattagaagcctggagggtctcttcccagtcagtcttaccccagattccccctttccggggactttcatacccatccatggggctaaggggccctccagcgctccaggggaggggcctggagggcggcgactgcaggcgggggtgggggctttcaaggggaagcagggtctaggaaggagggccagttccccagggtggagaggtcataggaaggagggctggagatgagtttggagtagagagagggtgaggctgggggcggggaaggtagagagaggccgggctgaggatgaatgggagtgggcgctgcccaggtctgggggtgaggaggagccgcatgaacccacctcacacgtgtcccgggagccatctctcccttctcggcagctcccggcgggtcggcggccatcggcggcgggggggccgggcggcgcggggcgcggaacgctcagaacgccggggtccacggccccccgagggcgctcggcccctccctccggcggaggccgggacggcggcgagtggagatggggggcgccgggggcgaggccctcccacgggctgcggcgcggcccttccagggggaggtcctgctctgggaggctcagtccctcagcccccccaggccaacgggggctccttgggcgcagggtgctcagcttctgcccggggcccactcagtcccgggtccgagtcccagctcccctccccccaccccgccccgcctctccccagcgcccctggccctttaactggccccttcccggaccccactgcccaggggtccagtgccaggcctgggccccccccaccgtttccggggttcaagcccgcccaccgccggttcccggggaggggggggtcgctgtaacctgcccccctcccctgggcccgcccctggactgcgaccccctgccctacggctgcgaggcgagcggagggggaggtgaaggaagctgctccggccccgccccccccagcccgcgcgcacccccgacctctccccctcccccaagcgcgcgaccctcgggagatagggatttaaataaaatttgaataaatccccctcctcaagcgggagggtggaaggaaaggatagagggggagagggaaaggggaagggggcagttggggtgtctcagcccccctggtcccccagccccgcgctgctacggcccggggccctggccgcctctctcatccctcctcagctccttcctccttcctcctctcttcccccctcccctcccctccctcctccttccctcctcctcctcctcctccccctctttactccctccttctcccagaggaaccccgcccccttccccctccttcctccaccacctccactttccaggacgaacgcacgcagggctcgacgggagttgtagtcctgcggccactgatgctacgggggaacaataggacgctggggacagcgggaactacaaacaggacggcggagggcgtgcccagccgggagccgaggatgccgggagttagagtcccgttgccccgaggctcccagttgcagaacatcgagaaggagagggaacgatgactacaaacaagatggccttctcccccgacccgacctccttcccaggcactcacacgccctcctgtccacaaccctccgcgtgtgtggtacctgacgggagtcgcagtccatctgctgccttcccgctgccatttctactcgtcaggaacaatggaaaggtgaaaaggaaagag

SEQ ID NO: 15867 - DNA, 2300 bp, Homo sapien
ttgggggagggggagaggtcgggggtgcgcgcgggctggggggggcggggccggagcagcttccttcacctccccctccgctcgcctcgcagccgtagggcagggggtcgcagtccaggggcgggcccaggggaggggggcaggttacagcgacccccccctccccgggaaccggcggtgggcgggcttgaaccccggaaacggtggggggggcccaggcctggcactggacccctgggcagtggggtccgggaaggggccagttaaagggccaggggcgctggggagaggcggggcggggtggggggaggggagctgggactcggacccgggactgagtgggccccgggcagaagctgagcaccctgcgcccaaggagcccccgttggcctgggggggctgagggactgagcctcccagagcaggacctccccctggaagggccgcgccgcagcccgtgggagggcctcgcccccggcgccccccatctccactcgccgccgtcccggcctccgccggagggaggggccgagcgccctcggggggccgtggaccccggcgttctgagcgttccgcgccccgcgccgcccggcccccccgccgccgatggccgccgacccgccgggagctgccgagaagggagagatggctcccgggacacgtgtgaggtgggttcatgcggctcctcctcacccccagacctgggcagcgcccactcccattcatcctcagcccggcctctctctaccttccccgcccccagcctcaccctctctctactccaaactcatctccagccctccttcctatgacctctccaccctggggaactggccctccttcctagaccctgcttccccttgaaagcccccacccccgcctgcagtcgccgccctccaggcccctcccctggagcgctggagggccccttagccccatggatgggtatgaaagtccccggaaagggggaatctggggtaagactgactgggaagagaccctccaggcttctaattccacatgggatcttggaggatctggtttccatgggagggggagcccaagggattctagatgattagggatgaaagcagcccgggaagctgggggtcctaggactgagcccatcctcagttctgggaagatgtcaggctggattctagaatcccaaggaatttgggagattgcccaggtggacctgagggatccaagaggagggtgtcctggaggagggaaccctgtggggaacaagaggggctgagatcttgggctgagaagggtctctgaagaagcatctccagggctgtcagagctctggggagttagtgggcagaggagatcgttagggacttgggggcaaggatctcgctggatctggtgaggataactgggttgaggggaagagagattggatggctgctgtggatgaaaaggttggtggggcgggggggaggaaaagtccggagcttccgtctaggaatctctgggtatctgggaggtgaatctgggcagtttaccccagattgaggttggggagagcctgggatattctacactcggataacaggggaagagttgggatctctccaagctaacaccacggacaaggagtgcctggcctttccaaggagctccggtgtggggatggcagaggagagggcctcggtgtcccctcctgctccctgggctagggaagggaccctgaggaggcggtagaggagcgaggccaggaagcagttcttgggctcctcttgagctgctgcagggagacaggccttgagtagaggattggcccccagatacacagaagggggtgacctccttgtccccctgaggaagagggcaggctctagctgcctgtaggtggagggacctgtcaggggtctcccaggccagggccccagtgggcccatctgaccctgccaccatccacctacagccctcggcgttgctgacgcccccaatgtcgtcgagcagccgggggccgggggccggagcgcgccgacgccgaacccgctgccgccgctgccgggcctgtgtgcgaactgagtgcggggattgccacttctgccgagacatgaagaagttcggggggcccgggcgcatgaagcagtcgtgcctgctccggcagtgcactgccgtgagttctgcccccacctttgggctctgcccacccttcccaataccttcttggaatggctggtgactgcctcccagcctgtactgtggagtggctgtttgttcactcgttcatttcttcccttcattcactagtttgtgtcagtatccatttttgtcct

SEQ ID NO: 15868 - DNA, 2300 bp, Homo sapien
tgggaggtgaatctgggcagtttaccccagattgaggttggggagagcctgggatattctacactcggataacaggggaagagttgggatctctccaagctaacaccacggacaaggagtgcctggcctttccaaggagctccggtgtggggatggcagaggagagggcctcggtgtcccctcctgctccctgggctagggaagggaccctgaggaggcggtagaggagcgaggccaggaagcagttcttgggctcctcttgagctgctgcagggagacaggccttgagtagaggattggcccccagatacacagaagggggtgacctccttgtccccctgaggaagagggcaggctctagctgcctgtaggtggagggacctgtcaggggtctcccaggccagggccccagtgggcccatctgaccctgccaccatccacctacagccctcggcgttgctgacgcccccaatgtcgtcgagcagccgggggccgggggccggagcgcgccgacgccgaacccgctgccgccgctgccgggcctgtgtgcgaactgagtgcggggattgccacttctgccgagacatgaagaagttcggggggcccgggcgcatgaagcagtcgtgcctgctccggcagtgcactgccgtgagttctgcccccacctttgggctctgcccacccttcccaataccttcttggaatggctggtgactgcctcccagcctgtactgtggagtggctgtttgttcactcgttcatttcttcccttcattcactagtttgtgtcagtatccatttttgtcctcagctccaagctgggggcagtgtccaggtgcacagaaggatctgacccagtccccactttcaggctcttcccagctctcagagtcacacccccgcagaatgcccagcccctgctctatcaccccccaagatgtctctgtgcaggagggggcccatccccagagatggcccccttccaacaggtcttgcccttctctggcctcttcctcacccagggtggtcttggatttgaggctaagctcaccctttatgtgaccttgagcaaatcatgctgaatgaacctcaggttccttctctgtaaaatgtttcctttgctgagttgtaaagattaaacaatggcatggatgcgagtgtgtctaccacaaggcccagcacacagtagggatcggggaagcatgggtttccgccctgccttcctcatcctttgagcctccctgggctccagagcacggcccctccccagcagccgcgaggagccagctgcatcctgcgtccccctccccactctgccacctccctctcttcctcctgccactctttcctggttggtctcttcacccctcagcccctcacttcttttcctttatcccccaaccccttgcctcacttttccttctccccctacctgcatcttccttgatcctgccgcatccttgttatgactcagtcctaccactgtcttcctcaaagtcacactgtctgaggctgcccccacttccccaagactagtggcttccctagtgttcccagggggtcttgccaaaaccggattcattgtgggattcagagcaacccttgggctgctcatggagcgaccttggtatcaccctaagctgtcttccccaccctctgagtgttactgtcctcctctccaaagccagctgtaatttcagggtcccactggccctgggtccagctataacagtcacaggtgataacagctacatatcagtgtctctcgcgtattattttgctctcccaagagtcctgcgagggaaagattcttagccccattctgcagatgcagaaacggagacttaaggaggttaaatcagttgcttgaggtcacactcccaaaaggagcaaactcaggatcagacccagcttgacccgtgggtgctgcacctcatccgtcacctggccagggtccctagaaggaagggtctttcccctgttgttagctttcggggcccctgatgtcccctctcccccaacagcccgtgctcccacacacagctgtgtgcctcttgtgtggggaggctgggaaggaggacacggtggagggagaggaagagaaatttggtttgagcctcatggagtgtacaatctgcaacgagatcgtccaccccggctgcctgaaggtgatggccctgggaccccggcgtctggggtggggcagattgtcagggagcagagagtgggggatcaccctggctctgggcttcctggccaaccccccactcactgccctcctgcctacagatggggaaggc

SEQ ID NO: 15869 - DNA, 2300 bp, Homo sapien
ggccagtgccaaccccttgctcacctgcctggtctcagctccactgccccatccccaggttgccaccgcctaacggaccactgcctcccgctgttccgccgctgccctcgtctacgccgcctagacctgcgctcctgccgccagctctcacccgaagcttgtgcccggctggcagctgccgggccccctggccccttccgctgccctgaggagaagctgcttctcaaggacagctagttgggcgccccccaccctcccccggactcgacaggagcctggacctccggcttcatttcacccctgctgggaggccaggttcccacctcaccaccctgggattcctgagtgtcagtgacttgggattcccacccagggactcaagccagccacccccttctttcccccctgcactgatatctctgggggtttctccttcctatgtcctgcccctgctacctgcttcattgtccatcccctgggggagtgggtcagaggtactggagggtgctgagccgaagggacggtgggaggggggttatggtgcaagtgttgggggggagaatggggaaaggacacacacaggatatgggagccaggggctgggggaggtggaaggggcggggggcggggcagacagcagaccaccaagggttcagggaacaaagaccagttacttggagtggggggtgggggtggggccacaaaaggaaaaccggaggagcaattggggatccaggtgtcagaggtaggggaaccaggggcaagctggggctgagctggaggtggggatgagagcaggtgtggggacagcaatacccccttgggggtcacctctctgcttcccccctccccaggcttcagttccttccccctgaccctgactccttgaacgtcactgaaaacggcagctattgcaaggagtgggggccgcgggcagccgctcttcagctcgcggcccaggggagtggcgaggggcgccccaaccccctgcccgcctctccgcacaatacttgaacattcatctgtactgaagtgttacttgaaccgggggaatctcggacctgggggagccggggtgtgaggggactggaccagcttggactgagacctgagaccgggccggtgggcgcccatttgggactgcgccacccccaggcttgttcttgttttactgtattgagcggcggcacccgccggacccgcattatggctgggggcgccagcccaagaatggggaccatgggactcctccagcctggctcttcccactctttcatcgtcatggaaacttgtatcccatttgcccagggaactgccactcctggttgccatggaaatagcagccaacggacacctcccgatgccagtgctaaggctggaaatggccccctcttagttgccatgggaacctagtaacagactctgctggccctccttccctgccccttcctcgagcgcggggtggggcttcgggaccccggggatgagccgggccaggtcccgcccctccgcgcaggcctccggggggccggggcttaccatgtaggggaggggagatctatccacatacctcaggtaacagggaggtgcgcgggtggggggagggctgggcggaccaaaggccggaggggtggggcctggggatagcgagaggcttgagaatggggccgcttgggggagggaagaggcagcccggcgaggggcaagcgggggacccagccgggctgggcccctgggccccgggtctgtacaatacggtttgctataaaactcaaaatcttccagccggggctgcggagttcgtgtgtgtatctgcggggtccctacctacagatgagtgggctcacctctcctggactcattttgggagggatttggaagtgtggacacctggggtgtccagctgtaccttggagggggctggggttggcgtgcacctcggtggggtccgggcgcttggataacgttcttggtgggtaggggtcgcggggaatctctgcgggcccgggactgcggggacttggtccccggctccaccccatcatgtggctagccccggctccgcctctgtcccagttcctgttttggcctccgctgtcccgctccggctcctggggctccccgcagacgctgcttttcttgctccactgggggtgcctcttcctgggcgcccgccgcctgcatcctgctcgtcctgtctgggaatggggccgcccccgggcttgggccggcccggctggggcccccgaggcgcttccgccccgtagtgaccgcctggtgccgccccccccccaggatga

SEQ ID NO: 15870 - DNA, 2300 bp, Homo sapien
acggagtcttgtgttgcccaggctggagtgcagtggtgcgatctcagctcactgtaacctccgtctcccaagttcaagcaattctcctgcctcagccaccagagtagctgggattacaagtgtgtgccgccacacccggctaatttttatatttttattagagacggggtttcgccatgttggccaagctggtctcaaacttctgacctcaggtgatccacctgtctggcctcccgaagtgctgggattacaggcatgagccaccacacccagccctccctgagtgtttagtataagcactctttttttttttttttttttgagaccgagtctcgctctgtcttgcactgtcgcccaggctggagtacagtggcatgatctcggctcactgcaagcgccgcctcctgggttcacgccattctcctgcctcagcctcccaagtagctgggattacaggtgcccaccaccacgctcggctaattttgtttttgtatttttagtagagatggggtttcaccgtgttagccaggatggtcttgatctcctgacctagtgatccccctgccttggcctcccaaagtgctgggattacaggtgtgagccatcgcgcccagccgagacagtctcactcttttgcccaggctggagtgcagctgtgcaatcttggctcactgcagctttgacctcccaggctcatgagcctcccacctcagcctcccaaatagctggcaccacaggacgtcccaccaacccagctaattaatttttttttttttttgtagagaggagggtctcactatgttgtccaggctggtcttgaactcctgggctcaagtgatcctcccaccttggcctcccaaagtgctgagattacaagtgttagccactgcacctggcctcaagtttctttcttgagcaactaccacatactaggggactttcataggttatcttatttaactctcacaacaccttaagcgttaagtctttatcattttcatttcagagataaggaaacaggcccaagaaggctgaagatcttgcccaaaaccacacagctagtccatgaaactgaacttggactatctacccctcacacgggaatctctctttgatttgagaaaaggaaccagtgcctttcaactggaacagaaaggaatctgatctcaacacctatgcctccacgtaaattatttttttcagccttatttccctcaaaattgtagagtcctaatcttcttctatcttgtggtgtgagaccttggataagtctcccttccaccttttcctattacttaaaatggtgaatttgcataaaccaggctctaagggtcttttctgcactgttcggatgtgtacaaattgacatccaagtttaaaggaagactctgaaacttaggtcaatgacttgcccaaggccatatagcgagggcctgatgtacacatatcaggagcttggggcatcctcagctcaggaaaagggacctcctgggagtgcctgcgcccacacgggatcaaaacggtgcccagccttcagaaacctcagcccgagttccaggggtaggcctgggccgctgctgcccttgtgcggaggcatcccgtgagcatagggcgccatagccaaagaagcgggcagtgggaccatgacgccaggaggacacaccagtccagtcccgttcctgtaggacctcgtttattattacaaggcccatttaagggcacttaggccccactaggctcatcagaaaaccttgaggcggtccctggatttaaccactaatggtgggtttgagtacggcaaagtagggcaccttctacaggcctcactctccccatctggcaaatgggcatcctaagcagccagacacccaagggcaataacgggaaggaaaggtaccctgcatttatgtgcgaggcggggcaaaccgcctgagtcaccgctcacggttgtgtttttccacctcccggccgtccctcccatccgggtgagtcctcgtgggtcctcccggaggcgccccctagtcccaggctctgcacgccctggccccgccccttgactcggccccgcccacagcggaatccgcagattcgccaggtcggatcctcagaattcctcgggtccctcgatactcggctgaaaattctcatcggactctgagaggagcgctgggctggaggcattttccccagggacagaagcgggctattctctcacttgggccagtaagaaaaatccaaaaaaagttgtcgactctgccagcagggattggctaacgggccgttattttcttgactccacc

SEQ ID NO: 15871 - DNA, 2300 bp, Homo sapien
ggaaggtggtgggagtcatattgactgggcaggtgcccccaaaagttgtctcctaaatgagagggatgggcaggttccctttgggacagtcgcagagggaagtgtgtgtgcagcagctgtgctggtggaggagtgtgttcttcgagcgaggcttcccgaggacatgcatgctgaagcgtgaggtggtctgtagggggcgctgccccagcgtggtggggaggaaggtgagaggaggcctgcatgcatctgggtcctcactggcttcctggagtgggttgctgccacaggctgagaccccagcgggtgtctagagcctaaggtgcagccaagagcctggctcagggcgccagggttgggagtgcggtggactcaggtgaatcgctgcctcctagggccgggcctggtgccggcggccctgttggcgctgagcggggaagccagttgtgaagccagtgagtccgtgggctgcagttcagagcatgagctcaacccacatggcctgggagcagagcttgttctgtcatctggtaactgaccacatctctgtgcctcagttttcctgtctgtaagataggaccctctgctgggtacagtggctcacgcctgtaaccccagcactttgggaggccgaggcgggcagatcacgaggtcaagagatcgagaccatcctggccaacatggtgaaaccctgcttctactaaaaatacaaaacttagctgggtgtggtggtgcatgcctgtagtcccagctactcgggaggctgaggcaggagaatcgcttgaacccgggaggcggaggttgcagtaagccgagattgcgccactgcactcccacctggcgacagggcgagaccccatctcaaaaaaaaaaaaaaaaaaagataggaacctctttgggctgttgtgaggattacatgagttactctacgtaagaggtgtgattggtgttaggcacaaaatccattgggctggctctgagagcctcatgcaggctttcccagggatggcggccaagggaggatgcactccccgtcctgagggtacgctggggaggcagcacccccagctcggagccagtgtgttccctccccagccacccgcatcctgggatctccactccagccctgcttctctagcagcgctgtctcctgcccctccctgcagggcatgttcaaattctgtaggggatggggaggaaggcaagtttcataaaatattttaatacaaagatgccactttttaggttgtatcgtgttcaccttgctaaactgagaatattgtttatgatggagataatggatattttagctgaaatgtggctgactgggtccttggcatgtgacatggctggggcctgggcacagggctgtcccgccagtctgggtaggaaagtggagtccagggcgagtggtgccgcccttctcagcgtggttacagcttgttgtgatggtgtctcctgttggactgtggctccgggaggacatggaaggtgtgtgtgtggactccgagtgtcccacacacgtgtcacagcgggaacgaatgggtgggaaaccccctctcatcaagggagttcatcttgctgggatgtggggctgaggccagggcgtctgtgttccctccggggttcctgggcggaagtgggggagagcacacagcctgtggtcatgggcggccagggtggctgagcctgggtctccctgacctcctttccttcctatgtgcttccttcccaggccccacggaggagtcaccccccagtgcgcctctgcgtcccccagaaccacctgctgggcccccggcccctgccccacgccccgatgagcgtccctcttctcccatccccctcctgcccccacccaagaaacgccggaaaactgtctccttctctgccatcgaggtggtgccagccccggagccccctccagccacaccgccgcaggccaagtttcccggcccagcctcccgcaaggctccccggggcgtggagcggaccatccgcaacctgcccctggaccacgcatctctggtcaagagttggcccgaggaggtgtcccgaggaggccggagccgggctggaggccgaggccgcctcaccgaggaagaggaggctgagccagggacagaggtggacctggcggtcctggccgacctggccctgacccctgcccggcgcgggctgcctgccctgcctgctgttgaagactcagaggccacagagacatcggacgaggccgagcgccctaggcccctgctcagccacatcctcctggagcacaactatgccctggccgtcaagcccac

SEQ ID NO: 15872 - DNA, 2300 bp, Homo sapien
gaggagggcgtgcagaggctcctcactgtcttctgggaagtaagggttgctcctcacacggaggtgcggggcctgacatgggcggcctgccatttgcattagccggtggcagccaacaggtgcctgttttggagagaggtccagggaggagagatgagcagggtgccgttggtgacatggccagtcatttcaggagctgccccaaccccagacttgccccagcagtccgggaccccactgtgaccaggcagatgctcgaaggagtcagtggctctcttacccagtgcagatttccctggagttccctgcgggtgacttagaatggccaccagaggcttaggatgctgccccaaagagggagggctcctggaagcagagtcgagagagtcagtgccgggttagcgggagctggaggcagagctgcagctccaggcctggtgggcgtggacctggggtgctggctggcaggcgtgctcaggggcaggaagtgggggactcttccctgaccatcgcatctcaccctggcagatggtggccgacatgcgggagaagcgctacgtgcaggagggcattggcagcagctacctgttccgggtggaccacgacaccatcatcgatgccaccaagtgtggcaacctggccagattcatcaaccactgctgcacggtgcgccaggggccagccggggcaggagttgggggtcggtgggggtggccacggctcacacgcccttccatccgcagcctaactgctacgccaaggtcatcaccatcgagtcccagaagaagatcgtgatctactccaagcagcccattggcgtggacgaggagatcacctacgactacaagttcccactggaagacaacaagatcccgtgtctgtgtggcacagagagctgccggggctccctaaactgaggtggggcaggatgggtgcccacacccctatttattccccctggtgccctgagctcccagcacccccccagccttagtgggctcagcagggcccacatgcccccatctccaagcgtggggttgggggccccaagcccagcgagggagcctcagtccctggaggcagcttctgcctctcctgtcacccctgcccaccaccccctgattgtttttctttgcggagaagaagctgtaaatgttttgtagcagccagcagctgtttcctgtggaaacctggggtgccggcctgtacagattctgtcctggggggctacacagtcctcttgctttgtgttaatggggacttccccttacgccctgcgtgtacccctccccagtttaggggtctctggggcagtggccatgttctccccctgggggggctctgcacccccagtcctggggactccgtgcctggaaccctgcctcatctgttcctgccagaccctgagggtcacccttccaccctggtgtcactccccggctcagccaggccaggatggcggggtgggtcccttttgctgggctggactgtacatatgttaatagcgcaaacccgacgccacatttttataattgtgattaaactttattgtacaaaagtgtttggtcggtgtatttgggcaggagcgaggggttgggggtagagggcacggagggttgtgcaagttgaagagagggaaaagtgggtacctgaagtgtggggcaggtaaaggggccttcaggcaagagcccagacctgcagagacagtccgagactgtctcggaccccctgacaggctgcagcagccgcacccgcaccaggaataccccaccagtgcccgccagggtggtgccaaggtcaggcctccccttcctacaatcacagctgcagctggacctccggcctcctgggaagcccagcaggagggaaggcctgaggtcacactgtgggatgaggtcaccgctggctccacccacagccccagaccccttcagcccactctgcaagttcgagcttcatccccaccaagttctccgctggacccagatgccagtggagcacagagcggccgccagggggcgccttggggcaagagtggtgggggttgtggctgggcgggtctctgttcctggaatggggcaggagggagaaggaggagccagcggaaggacggtgtgcgggccggccagccctggacgaaagaagagggcccctccaggccagtctgggcaccctgggatagcggctgcaggtaggcagaggcgctgccagtgcccaggtggcctttccctccatccggcccttcccaccttcctataaccttccctccacctccctcaactcctggcctccccaccctt

SEQ ID NO: 15873 - DNA, 2300 bp, Homo sapien
cctgtcccttcccagaacgcccctctgcaggacaggaagtctgccccaagtctggccacggccctcctgctcccatctcgggctgcttgggagacatcagagcaggccccagcccccagtcccctcttccggccgcctggacaggacccccattcagcccaggtgtttccggaagtcccacggccttggggccacaggagaagggttgaagcgtggctggggcaccactccccccacctggagtggcattgggcccacagctgcccatctctgggcctcaggtggaccaggggatctctaagggtctgctgtgccctttctatgcgtcctccacatcctatgatgtgcctgcttgttggctgctgtctgtgtgcgtcctggcatgttgtctggaggctggtgtcttttgcatgttcttggacaaatgtgtgctacctgcccaggcgcctgcaaccattgagcccacatgtgccccacgtgtgccctgcgggtggtcccgggcctggccagggctcagtgctcctcttccccctcctccctgttcccacccctcatgaagcacactgcgtgtccatcccatgtacccgtgggtcgacacacgctcttgccacgccctgagcgtgtacacatgatgtgttctatgcattcaccctgccccccagcccgccctgcagaggacaagatgggtggccccggctccctttcccctaaccgcccctgcccgctgtgcagccgtgtgcgttggcgtgtgtttctgtgtcactggcgtgtcacgtgatgtagccgtgtttgctgacatgagcccctgcccccttctctgtttctccgttggtttctagagctctctccctccccttctcagaggggacaggactcctggggcctggctggggcccagagccaggccgccctctcctgttagccctcagagtcccatttctgttagccctcagagtcccatttctattggtgaccaacttgcaaatggataaaacacaggaaaatcctgccccccccttcctccctgcatgtcctgtccccagagccccccaccccaccctgggccaggtcaggccctgtgggacgggagaaatagcaaccaatccaacagcgggtgtgccgtgtgctcacttccttctgtccccacgtgggatgggcgccgtggggaggcggacatggggtggggggatgggagggagagctggacagacagatggacacggtcgtggatgaggcttttaatccggggtcagccaggtacagcattggggacatccccaggcccagggctggcgatgtgctgggaaggaacttaggtagagaggtgggaagtgaaagcatagggaggccatagccctccagaggggaattctaagacagacagttgaaggtgaggcctttgaaaaacaatgggaacatcacctcccaaagagggactgaggtggctggaggaaccagagccgcctctgcactctgcaccgagggtcgcgtgtggctgtcaggagagcagcgtaagcctgtggagcctctgctcgcttcctgctcagaaagccagaagagagctggggcaggccaccagggcaccagacactcaccaagcggccatcaggactgggatgagaggacagaggaaggacactctgtccccaaaccctcccgtgtcctgacggccctagaacttggaggtgtcaggacacaacacagactcaaggctcctggattgaaaatgtggagggcttgggccaggcgcggtggctcacacttgtagttccagcgttttgggaggcccacgtgggaagatcacttgagcccaggagttcaagaccagcctgagcaatatagtgagaccctgtctctaaaaacaacaaaaaaaagccaggtgtggtggcgtgcacctgtggtcccagctgttcaggaggctgaggcaggaggattgcttgaacccaggaggttgagggtgcagtgagctatgatcacaccactgcactccagtctgggtgacagagcaagaccctgtctcaaaaaagaaaaagaaaatgtggagggctctacgacaaggacagccattctggccccagagccctgcctcctgctctggaatgcagctgtcccttcccgtccagggtgtgagggctcgggacctgggtggatgtgctgtatctgggcctccaggccccagccccaccgtcactgggctgaacccgtagcggcctgtacccagagaatggtacgggtccggctatcctcccacgagaacaggggctcatagccgaaatggcgctgagccttgtcggtgctga

SEQ ID NO: 15874 - DNA, 2300 bp, Homo sapien
gtggactgcacctaggtcccatctggccctgtctaggttcaatctgagctgtctgggatctgtctgggatccgtgtgagcctcggctagttcagtctgagcctgtctggtttctgttaggccctgtctgcgttccgctgggaccctggcaagctcttctttttggattccaactgagtacacccccaggtggatgctgtttggatcctgtcttgatttcacccagcctctggggtttggattctgtctgagctctggctgggttctttttggaaatcagaatgaactctgtatacatttccactggggctgatcagggctccagatgtcattaagcttgatggactcagattttgctgtcagacctctgtcccaagcagagaaggactcaggtgtgtgtagcacagggcacctcccctacagcctctcctgtccagctctgagtgtgtgtgcagacatgaggctcggagaagctggaagaacaagcccagtgagccctcccaaatgtcctcaggggtgcagctgaaagccagtgtgtccacacatgtcagtgcggctcagctgtgagtctgcgtgcgggtgaacgccagcatcagtgcatctccgtgtgggtgtcgggggggcctattcctgtgtgccttgggtgtcagctcttctgtctgtgtctcgagtctgtctgtcggtggcagtggtgctgtgggtgggtaaatctctttgtgtctctgagccctgcgggtggagggttgagcagctgcaggttgcaactgggaaatccaagccagcaagagtaggtgggtgtgaagttggaaggggctggatgaaagcaagtgaatccactgcgagggagagccggctgggaggggagggagagtgggcgggaagaggggggcacagggcgcgagggaggtcggggtgctgcccgtatctcttatccagccctcactgcttgctcaacttggcgcctgccgctggcagtgaagtgaccttgcacaggggacatgtctggtcaggtggggcaggagaggaagagaaggagtaaagtgagatctgggcaggagagcaggaacagtagggagatccaggctcccgggactctagtccaggacccttcatggagcccagggtcagttactgcaagcctgacgttgagccgttgttgaaatattgaaatcatccctattggctggtcaaggctggctctgcgcccccaaggccacatccaccctgagagggggtctttttccaattccttctaaggaatcctttgggctgacaaacacttttggtgcctttgccatctaccctgcatgggacccctcccaggacccctcctctgagcctagagctgggagcacctgtgtgtgcatagcagggagagggtgggagagctggagagccagccttggggacccaggtagggcctgctcatggactcagccttccttgtccccaggcgaaagacagtgatgatgaagaggaggtggtccacgtggatcgggaccacttcatggatgagttctttgaacaggtaatgggcctccaaggcccccagccccagccccagccccagcacccagccccagcccctagtcccaccgcccagcctcagccccggcacccagccccagccccagcacccagccccagcccctagtcccaccgcccagccgcagccccggcacccagcccctagccaccgacaacttccttttccctgtcccccacttccctgctcctgcaccctccctggccttttatcagccgttctggggctggtccattcccctgaaccctggctggttcccctggaacccgttgtttggcctgacagcttggctgggtatagccgattttctgctccaggtggaagagatccggggctgcattgagaaactgtcggaggatgtggagcaggtgaaaaaacagcatagcgccatcctggccgcacccaacccagatgagagtgagtgtggctgccggtgactgtggggtgggaggagaaggggcctggggttcccacccagacatctcacttgccctcgccctcccctcagagaccaaacaggagctggaggatctcactgcagacatcaagaagacggccaacaaggttcggtccaaattgaaaggtgaggagtacaatccctcaaccaggaaggaaaagaattgtgggtggagcatggtggctcaggcctttgggagggcgaggcggggccaattgctcaatcccaggagttcaacaccagcctgggcaacatggcaaaactctgtctctacaaaaaatacaaaaattagctgggc

SEQ ID NO: 15875 - DNA, 2300 bp, Homo sapien
aaagcctcagtgtccttgtctatacacttgggatcttagcagtggctactgtgaggttgggaggtttctgggagctaccagcatagtgaatgcaacacgttggatgcccagaacgtgctggcattataatggcggggaggcaaggacagctttctgtgctttgagtggctgggtggatggagatgacgccatctctgagggagaacacaggaaggaacactttggggacagccacctccttgaggtccccacgtcagcgctagccatgcccactgtagtcatggatctactcatggctctggtggcatcttcaatctctgtcttcttggtgcccagctcagagcttaggcatatagtaggggctgtcttacagggggaggatctggctcgcaggtacagatgtgggcactgcagacacggaggtgcagaaagatgcaggtaaagaaggaagagaatgccaggcatggtggcccaggcctgtaatctcagcactttgggaggctgaggcaggaggatcgcttgaccctaggagttcaaaaccagcctggacaacatagtgagaccctgtctctacaaaaaataaaattagccaggtgtggtggcgcgtgcctgtagtcccagctactcaggaggctgaggtgggaggatcacttgagcctgggacgttgaggctgcagtgagccgagattgcaccactgtactctagcctgggcaacagaatgagaccctaactcaaaaaaaaaaaaaaagagagaatggacggagcccagggaaccctgaggttgaagggctgtgggaaaaaaggtaaggacctggaaagaggctgggagacaacactcacagatcaggttggggggtaggtgggcggagcaccacagacaggagggtttcaggaagaggggctcatcagggtcacatgctgctgagaggtcagggatggtaaggcccgactggcggtgtgggatgagggtttatcagacacagatttggcaccaaggaggtcactgggtacctggcaagagaatgccgggtgcggtggcccaggcatggaatcccagcactttgggaggctgaggcaggaggatcgattgagagtcaagacctgtcccattggggaccggcgccccattgcagggggtgggaggagctggtgtggtgtaaggatggggagaggagaggtgggcatcagaacaggaggtcactcagaccctcaggggcacctgatttcccctcccactaaggacaaatttcatgttcaacagtcagagccatctgcagatgggccaagaggtcctgggaggtagtgagcaccctgtccctggaggcagacaagcagagctccgagacccaccgcggcgggagaggcccaggctgtgcaacacaagccccgtgtccttctcagcaagcacctggctggttccctgcatcgtaaaaaccacacagagggtcggtctttctatttatagtgtccaaagagcctcctgcaagaacacacatgggctcgcacccagaggtggtcggcgcgcagcctcacgcagacaccagacacaaaacacagccgcgatctgtgtctcctggaaagggatccacatcctggctcccaggttattccctgaattcattccgtcaccccctctttccgccgggccaccccaccccccgggccaccctagcatctccgcttggctctccgcatctctccctgctcctcgggctctgcccacccccacccgcctccaggcctctcccgccccctcctcgggtgtcccccaagcccgtgactacaacccccaggcgcccccggcccgggtgctgcgcatgccccctgctccttgcgcgctcccgctccccccgccctcgcttcctcctcacctccctccgcccccctcccccgcgctcggctcccgcatccctccatcctaccctgtgccgcagccgcatcgccaccgcagcccggcagagccgagcccggcccaggcccctgcccctgcccggccctcggccagtcgcccccggccccgcccccgcccgcaggccccccgcagcggccgcggcgccccccggcgcccccagaccccggcctccggcacagaggcgggagacccggagcagcagcagaggcaggaggactaggaggaggaggaggagccgtcgcaggatgaaggatcggactcaagagctgcggagtgtgagcttgggggtggggagaatgggggggcgggaccccaatattgggggagcgcgtggggatggagtgggggaggtgctgggacgtgggggcgaaggatgagatcggaggt

SEQ ID NO: 15876 - DNA, 2300 bp, Homo sapien
gattgactgaacctgagagcacaccactgcactccagcctggatgacagaaccagacctgacctcaaagagaagaaaaaaaaaaaaaaaaaaaagcccagaggggagggtaccctcaacagttttccagccccttccacatccttcctaacctcacttgatagtgttcaagtcctaccttaggcaaggcagaaattataggaccaagccgccaaatggggaaattgagtcccagagagaagtaatgcattatttaagatcccatgcaggactatgagtcaggggtccaagagcccttccaccgtgtgccactcagagacacagagtaggagggggaagggggtcgggtggcaggggacaaaagatgcaggaggcaagcagcagtgactgaagaggcagaggctgacatgaaagacccaggagcagagaatctttccttatcatctccaggggacaccactgggcagggcttggcctccggaaaaaccctgcattccctctgtgggttcatcagggcaccactctcctactagctgggttttttttttttgttttgttttgtttttgagacagagtcttactctgtcacctaggctggagtgcaatggcgtgatctcagctcactgtaacctccacctcccatgttcaagcaatcctcctgtctcagcctcccaagtagctgggattacaggcacctgccatcatgcctggctaatttttgtatgtttgtagagacagggtttcgccatgttggccaggctggtctccaactcctggcctcaggtgatctgcctgcctcagcctcccaaagtgctgggattacaggcatgagccaccacaccctgcctgagctgggttttaacaggaagaggagaagagccaaaactcctcacatagaatcacacagcacttgacagtttccaacctcatcatcactgaagtttagagcagccgatacccataaagatgatctccccatccccctacagttacccactgtgcagagggagatccacacttagagacaggaagcgatttccagaagtccatagcaactcagtcccaggaatctaggtttcctgaccagggcatagcagaaagggtccattcctttccttgcttgtaccttcacagaagcttcctggacagagccctggggtccaggagacctgttattcattcccggctatgctgagacttgctgagtgaccttggggactccttctagagaatataagttccacgagtgcaggaatttttgtctattagtccttgatgtatctccagccctagaacagtgtttggcccatactatgtgcccaaaaaatatccattaaatgactgaatgttgctgtgcatggtggtgcatgcctgtaatcccagcactttgggaagctgaggcagaaggattgcttaagcccaggagttagagaccagcttggacaacatagtgagaccgcatctcgtaaaaatttttaaaaataaaaaatgagtgaatatctagatagccaggattagagaagtgtcacagtcagaaagcctgaagcctaaagaagaccaaggaaccaggggctttatcctcagatacatgaaagcctgaaattctgtccacaagtatttatagagggcccgtaatgttcttggtactgggctaggaactccccagattcagttaagaacaaagtcattacctggcctcagatgcaaggcaggggctggggggtgtgagtggcagggaggcagcgtgatcaatacaaacacttttcttagcctgagctgccctgacatggtctgacggctcacaaggtggtgagtgcagccgggctgcagtgttcaaggagggcgccggctggccgcccacctgtcagaggctgcgccagaaggatgcggaagaagagatttctgccttggctgaggtcacttcccacccccagattccctgcccacacaaccctgcaattttctgacgctgacgactcggatcctattatttcccgattttcaaggtcccatgatgctgacagccccaaatgctaagtcgtcagtccgcccacgccctggacccgaaagcaataaaggcgaggtcagcaagggtcctaccacccactgcctcgaaaggcctctgggggtggtcggcgcgcccctccccacctcgcgggggccgtgtgggcgtcgctcggtcgttggggtgccggggacgtcgtgatgagaacggcgtcccagagacggcggtgacagagccgggacacgtgacagtcacagggtcacattctgcggtccacgagtttgggaccgggctgg

SEQ ID NO: 15877 - DNA, 2300 bp, Homo sapien
ggggacaccactgggcagggcttggcctccggaaaaaccctgcattccctctgtgggttcatcagggcaccactctcctactagctgggttttttttttttgttttgttttgtttttgagacagagtcttactctgtcacctaggctggagtgcaatggcgtgatctcagctcactgtaacctccacctcccatgttcaagcaatcctcctgtctcagcctcccaagtagctgggattacaggcacctgccatcatgcctggctaatttttgtatgtttgtagagacagggtttcgccatgttggccaggctggtctccaactcctggcctcaggtgatctgcctgcctcagcctcccaaagtgctgggattacaggcatgagccaccacaccctgcctgagctgggttttaacaggaagaggagaagagccaaaactcctcacatagaatcacacagcacttgacagtttccaacctcatcatcactgaagtttagagcagccgatacccataaagatgatctccccatccccctacagttacccactgtgcagagggagatccacacttagagacaggaagcgatttccagaagtccatagcaactcagtcccaggaatctaggtttcctgaccagggcatagcagaaagggtccattcctttccttgcttgtaccttcacagaagcttcctggacagagccctggggtccaggagacctgttattcattcccggctatgctgagacttgctgagtgaccttggggactccttctagagaatataagttccacgagtgcaggaatttttgtctattagtccttgatgtatctccagccctagaacagtgtttggcccatactatgtgcccaaaaaatatccattaaatgactgaatgttgctgtgcatggtggtgcatgcctgtaatcccagcactttgggaagctgaggcagaaggattgcttaagcccaggagttagagaccagcttggacaacatagtgagaccgcatctcgtaaaaatttttaaaaataaaaaatgagtgaatatctagatagccaggattagagaagtgtcacagtcagaaagcctgaagcctaaagaagaccaaggaaccaggggctttatcctcagatacatgaaagcctgaaattctgtccacaagtatttatagagggcccgtaatgttcttggtactgggctaggaactccccagattcagttaagaacaaagtcattacctggcctcagatgcaaggcaggggctggggggtgtgagtggcagggaggcagcgtgatcaatacaaacacttttcttagcctgagctgccctgacatggtctgacggctcacaaggtggtgagtgcagccgggctgcagtgttcaaggagggcgccggctggccgcccacctgtcagaggctgcgccagaaggatgcggaagaagagatttctgccttggctgaggtcacttcccacccccagattccctgcccacacaaccctgcaattttctgacgctgacgactcggatcctattatttcccgattttcaaggtcccatgatgctgacagccccaaatgctaagtcgtcagtccgcccacgccctggacccgaaagcaataaaggcgaggtcagcaagggtcctaccacccactgcctcgaaaggcctctgggggtggtcggcgcgcccctccccacctcgcgggggccgtgtgggcgtcgctcggtcgttggggtgccggggacgtcgtgatgagaacggcgtcccagagacggcggtgacagagccgggacacgtgacagtcacagggtcacattctgcggtccacgagtttgggaccgggctggtcacgtgacgcggtgggggcaccatggggtgatgtgagatgcgggtgtctcggattacgtacaaatgacgtattcctaccccttttggcaaccagatttccgttggaagatgcaacggttccggtgacggtagcaagttctcgcgtccaggcatctccgcttccgctcggggcgcaacaacttccgactccaccttcccagcctcgggcaaggaagagacgcgaccatgtgcgcatgccccgaatttatcacggaggggcggggctgaggctgcgggagctggagcggggaagaaaagggaattccaacctgtggaaccttggggggtccccggggtcggcgccttcccattgactgtgggcggtgcaagggacggagcctctggcggctcgtgggggtgttggggtccgcagggggagggaggggagtgtcagagtgtgagcggggt

SEQ ID NO: 15878 - DNA, 2300 bp, Homo sapien
cagtcagagttgccctagaggggctgcctcctaacatctgtacaaggctggggtgggggcggcgttcccctggccctggttgtgagttgagttgagcttccagccctgtcctggaggagctggcctcagtcatgctacagccaatgcccttttgcagctgagacttacaggaaagagatctcattcagtaggagtactgagacctgaggctggtggtgccaggaggaggcagggatagggagggctttgcagcagctgtagataggcctggaagaatgggtaaattcagacagatttgtgaaggcacagttcaccatctgtgaaaggtatgagccatttgaggcccttagctccaagctaccactgcagatagaggttgtatgggataagtgagcaggggacaagggactacatgatagaaggggcctggaagccatccccaaggagtctgaacttttgtcagatcaagtcttgcccttgtctttgttagtgcaatttttttttcctgccaggaatgttcttcagtcatctggggtggggtgggcaaaggcatccttacctccctgaaccaccccatcctctgagcagggggagatgatcaatcggattgagaagaacatcctgagctcagcggactacgtggaacgtgggcaggagcacgtcaagacggccctggagaaccagaagaaggcgaggaaggtgagcctcccaggcccggccactgccccaggcaccctgtgtgacttccctgaccccctcctctcccacagaagaaagtcttgattgccatctgtgtgtccatcaccgtcgtcctcctagcagtcatcattggcgtcacagtggttggataatgtcgcacattgttggtgagatgttgtgggctgccccctggcctgccccagccctggccccagccctccctcctccctcagaccctgttctccctcctttccttacaggcactaggagcaccaggaacccagggcctggccttctctcccagcagcctggggggcagggcagagcctccagtcggaccccttcctcacactggcccctatgcagaagggcagacagttcttctggggttggcagctgctcattcatgatggcctcctccttcaggcctcaatgcctgggggaggcctgcactgtcctgattggccgggacacacggttttgtaaaaaattaaaaaacaaaaaaagagcatagaaagccctgtgcacgtgtgttcctggaagggctggcccaaggcttccgggcatccaacctccttacctcctggacgtccccagggccaggtctggccctggctgctcaggtcaaactgccaggggtgctgtgcccacagcaggctggttctgcctttctgcacccccataggaatgggtgggcagggaggggtaacaccggcatctagctcctggctcagtactgtccccgggaaaggaccactgtgagtatctgtcttggaaatgatgaggctgaccaggccaggctgggacgcaggtgagatgggggtttgggtggcatcagtgggccttcttgtggcccagaggaagaggcaccatgaaaaaatgcctaattgaggctgtcactttggatgcagtggatagggatggtctggtttcagcagggatgacattggagtgggatgttaagctggggaagaggttgccagtcagaaagcacaggaggccgggccctgtgaccaacaaaagcatcatcttttacataagcgtttaggcagggtgtggtggctcgcaccagtaatcccagcactttgggaggcccaggcaggaggatctcttgagcccaggagcttgagaccagcctaggcaggatggggcaacctcttctctttagagaataataattttacaaattagccaggcgtgatggcaagtgtctgtcgtcccagctactccagaggctgaggtgggaggatcgcttgagcccaggagattaaggctgcagtgagccatggtcatcccactgcactccatcctgggtgacagagcgagaccctgtctcaaaaataatagcaatcatcatcagtagcagcagcagcagcagcagcagcatagagagccagtgatcctggatcagtgcacctggttgctgagggttacctggctgaagcaggtggtggcagcagaaaagcctgacctctgatttcttccataaggtacctgaaatccaagccctgactaaatttctttttttctttttttttgagacagagtcttgttcttttgcccaggctggagtgcagtggcactatctcagctcactgcaa

SEQ ID NO: 15879 - DNA, 2300 bp, Homo sapien
ttgggaggctgaggcgggtggatcatttgaggtcaggagtttgagaccagcctggccaacatggtaaaaccctgtctctactaaaaatacaaaaaaattatccaggtgtggtggtgcatgcctgcagtcccggctactcgggaggctgaggcacaagaataagaattgcttgagtggggaggtggaggttgcagtgagccaagatcatgccactgcactacaggctaggagacagagtgagaccctgtcttaaaaaaaaagcaattaggccaagtgcagtggctcatgcctgtaatcccagcactttgggaggccaaggagggcagatcacgaggtcaagaaatcgagaccagcctggccaacatggtgaaaccctgtctctactaaaaatacgaaaattagctgggtgtggtggcgcgtgcctgtagtcccagctactcgggaggctgaggcaggagaatgccttgaacccgggaggtggaggttgcagtgagccgagatcacgccactgcactccagcctgacgacagagtgggaatccatctaaaaaaagaaagaaagaaattggctggagaatcgcttggacccaggggtggaggttgccatgagctgagattgtgccactgcactccagcctaggcaacaagagcaaaactccgtctcaaaaaaaaaaaaaaaaatcccagcactttgggaggccaaggagggcagatcacgaggtcaagaaatcgagaccagcctggccaacatggtgaaaccctgtctctactaaaaatacaaaaaattagctgggtgtggtggcgggtgcctgtagtcccagctacttgggaggctgaggcaggagaatggcatgaacctgggaggcggagcttgcagtgagccgagatcacaccactgcactccagcctgggcaacagagcaagactctgtctcaaaaaaaaaaaaaaaaagaaaagaaaagaaattaaacagtgtgatgtgacaaaaagtgatagggggttggagacagcttttctgttggatggttaggaatggcttcttagaaaagatgactgacacatgggaggctgatgtggcagatcacgaggtcaggagatcaagaccatcctggctaacacggtgaaaccccgtctctactaaaaaatagaaaaaattagccgggtgtggtggcgggcgcctgcagtcccagctactaaggaggctgaggcaggagaatggcgtgaacccgggaggcagagcttgcagtgagctgagatcacgccactgcactccagcctggacgacagagcgagactccatctcaaaaaaaaaaaaagaaagaaaagatggctgacacagagggcagagctgagagccaagagggcagaaaagagccatagaaaaccatttccaggcctggaagcctaaaggaatttcccagctggatttgcagttgctttggattggtgactcctttttacctttcattgttaggggacctgcaggttcctttgcctgctgtgcagctacagctccattacaccaagacaatagggatgcagcagagagagttactggtgcagggcacctagtgcagagatgggaagaggccctcaaatctatctccccgagcaattctgggagagggtttctaaggggactgtggagggtaggggattgtggagggtaaggttttgggcaactgggtcattgattgattgggggaaggatgtagaagctgcgtttttgggggaattagctccttgtggggtccttcaggtcagctgagtcagtagttccatgaggacctgaaggaatctcttttcttttcttcttcttcttcttttttttttttttttttgagatggagtctctctctgtcgccaggctagaggtgcagggggtcgcaggctagaggtgcagtggcatgatcttggctcactgcaacctccacctcccgggttcaagcaattctcctgcctcagcctcccaagtagctgggactagaggtgcgtgccaccacacccagctaatttttgtatttttagtagagacagggtttcaccatgttggccagggtggtctcgatctcttgacttcgtgatcggcccccgccccaccctcggcctcccaaagtgctgggatcacaggagtgagccacggtgcccagccttaatttttgtattttcagtggagacggggtttcaccatgttgatcaggctggagtgcaatggtgcaatcttggctcactgcaacattcgcctcctggatttgaatgattctcctgcctcagcctcccaagtaactgggattacaggaa

SEQ ID NO: 15880 - DNA, 2300 bp, Homo sapien
gcctcagcctcccacgtagctgggacttaaggcgcatgccaccacacctggctaagccctaggatttagtgggaaaagtgaaataaccaagtgagaataagatggagttttgtgggattggggccaaacccaaaggggagatgcttgaggatcctcctggtggaagtggggctccagtgaaggacttgtcagatttggaacaagcaggaaggacctggggatttgcatggtgtggtggaagccatggaaagttcttgagcagggaacaggaaacatcattcattacttttgggagaagaccggctgcatggggttggggagggagggcagcgtgcaggcctgaggccgggatttcaggcagaagggtgctgactttaaggatgtggcccttgccacgcgtcaggggctcctgtgtcctccctgggtcaaccaggtaagctgcttctcccgccctttcctggcataaggggccctgagtctctgtatttcccctagcaccctcgtggctcagctcagtttcctcctcctgaaccccagtgtcataacttagaagccaccaacccctaacgtgtccagatgaggaaatagtctttttatttttttttttttgagacggagtcttgctctgtcgcccaggctggagtgcggtggcacgatcttggctcactgcaagctccgcctcccaggttcacaccattctcctgcctcagcctcccgagtagctgggactacaggcgcccgccaccacgcccggctaatttttttgtattttcagtagagacggggtttcactgtgttagccaggatggtctcggtctcctgacctcgtgatccgcccccctcggcctcccaaagtgctgggattacaggcgtgagccaccacgcccagccgggcggaaatagtcttataaacaacactcatttcactgaggtctcatagtaatccacagggctgcaagtagaacgtaggccccctagcctctgggcacacctggctccctgcagcccccactcctcagaccccttcccccagcagcagctgctgagcactccttaagtggatctgccataatcctcttcccttcatcccccagggaggatgagctggtgttaagactaatacagccattaatcctgtttcctcccaaccatgatccccaggagcagctgggtggagggcgtctgggttctggaccagaaagtagggatctcagctagagctggtatcccaggaggccatgttagatcagatacatcagttatgactcagaaagaggcttccagctgctagcaatggctcaggctgccttgagtgattctccattaccagagttgtgggaacaggccaacaagattccagagcagagagtggacagattccagtctggggcggaggcccgtacagctgtgcaaggccagaattctgtgtgaacagttgctgtctctgaggactaaccatccagaggaggaaagaaaacacaaatgctggggacctgtcacttccagacagtgccagctaccagatttagcccattggctcagcccttttctggtcccaggtctgtcttttctgggcgcttggagaccttcaggccaggcccacgtctgggtacactctttatcctggcatagttcttggacactgagctgaagaaggaagatggtgagacagatggaacctgggcctctgggaatgccacagtgtttggaaaagcccgttgggggcggggggggacgtgtaggtgaatcttttgtgaccctcagcctcctttcttagtggctctgcggacacttggtccaactcctttcttcaatgagcagatcagggaggaaacgaacgcaggatgtcagagccaggaatgctgggcaggaaggatgtgtgggttccgaggtgagaaatgcagatgagatagggttctctctgaggctttcaggagtggcgaaggtatgtggctttggtctaactttgcttctcttgcagagaaaccccgttcaccaaggccatggaagtggaggctgcagaggcccggtccccagcccccggctacaagcgctcgggccgccgctacaagtgcgtgtcctgtaccaagacatttccaaacgcgcccagggcagcgcgccacgctgccacacatgggccggcagactgctctgaagaggtggccgaggtgaagccaaagccagagacagaagctaaggcagaggaagccagtggggagaaggtgtcaggctccgcggccaagcctaggccctatgcgtgtccgctatgccccaaggcctacaagacggcacccgagctg

SEQ ID NO: 15881 - DNA, 2300 bp, Homo sapien
tgtgagaatgtccaccaataactgtttattaactaaattcctccacctttccaactccacaaggctcaactattgccccaatatcccacagtgggctccctgtcgtggcgatgaagccttgctttgcctcactactggcttaggaaggggatgaagttctgctgtctcactaggcaagcaaagattcaatttccaaaaatcctaggctaggaccctggggcagggatgaggagaaaaaggaggcacctcaatcttcccatctctaaacaagcagtcaccacacaggcctcacggccaggagtgacgtagtgagcggatgaaccctgcagaagtgagcgctaatcatatcctaggcctcctaccgggccagttcacaacctgatcccaacctacttttccagcctcagctccagcgacagagtcctcctcccggcagcgaccgaacctccagccacaattctcaatcctccacctctagatgcagtttcctgggctcggggagcccttgcctgccttctccaacgggaaagcccctttacatccttcaagaacccccttccctagtgccctcaggaatactttatggcagtagagaggtaagggccccacgccgctctggacctcagtttcctcatcagtaaaatggggtcccttaagtttgtgggagtttgaagggcggtggggcctacgaagcgcgccgaggagccgagagttgcagaaacccggagctcctcgctcctcgcaaccgtctgtacgcggcgcccccgccagccaggcagcccctggagggcaggaccccggttataagcctcagaaaacgtggcttcggaggacgtggcaaggaggactgaacgaaggatgaggagatgaacaaatgaatggacggaaggccgaatgagggacaaaggcttgcaagatggcgttctctaggaccgcgggagtggtggccgggcctcagcaggggagggggccgccggcgcctgggatcttgcagcgcgggccacgcgaccgggacaaaaacccaaaacatggcgggctctaggacccccgggaccacaccgcgccgggccagcagccgcgcgggccgagcctgggtgtccgcagcccagaaccgcggagacagccggcgggttctaggacctgctgggcccgcaatgcgcccggggccgctcacagcccgccccgcccgcgctgctcgcgctgggccaacccggcccgccctcggcgcccgcagggaaactgaggccagctcggatcgtggccgcgtgggagctgcccggggccctcgcggcttcccgccgacgtttcctacctgatgagacttgtgctgactccgtggcgtcggcgtcggctcctcgcaccgacggagcccggaccctgccaaacaggggccggcgctaggacccagcggggggcggggaggtgggaccggtggcgcggcgagcggaagtgagggatcttcctcagctaggaaggaagggaaagttcccggggaacctccagcctatggcggcagagaagcatcttgcaagaggtctctgtgtgtgctgaggcaaggggacgccaggcaggctgacggtatacgcccgccttgtgttagtctggggccaggtcaccggcaatgtcttcaagaaccagaaggtgggaggacaaaaaggccatgctcaagctctgcaaaacctaagtccaattatattccacaacatttcctttaatagcaaggagtgggtttcacgaagttttctccatctgccttgggaaaagtcctccagagagccccacgaaaagtgtcaccaaagtactgtggccagggctgtagaatctttttctccctttctgcgcctattcaatatgcaccggaacgattctagctgctcttgccggaagtgtggctagcttagcgtgcaaagacgccgcgttgtgacctacgtgggcggagtcagccgtgcagacctagaacttagcgccggaagtgtgtctgcgtaaaactgcggctcggaggcgggacaggcagtgctcccgaagcggaagtttcgcggggaagcttttgcacctaaggacacttcctgtttcctagtaacaataggaagtgtccgtagagctgggagtagactcctggctcatgccagctgcgccctcttttctctacctccttcctcttccccccttctcctttccctctttcccttccctcccacctcccgggaaccctggctgagtgtgcgtgtgtgggagcgcgagagccccccgacagccaccccttggggcgcgcggctgcagttagggtaagggtcccagtg

SEQ ID NO: 15882 - DNA, 2300 bp, Homo sapien
cacgtggcagcaccttcctctggtggaggggccaaggcctaggaagagggggcagtggtcaaaaggaaggcctgaattaacttcgcctcttggctctacgagcaacaagttcacctgaggtcactgagaggttccccaagcatccatgcccaaggacctaatttctactagatccaatctgcaggcaccatcatttaaggcttccctgtgcacaagcttcccaaatataggagctcccctaggcttaagtcatccctacaggtatagctaaggaaattaaagttgagagagatgcaacctacttctgatcacagacctgttatgttcttcagaccagactcaaaaggcattactgtcctttaagaacagtaggaatctgctccctacaatcctgaaacaaaaattttctgtgacatcttaaaaggacaccaaaaccttctctaggcctttcaataagagaagtccaaatcttcctacttcatctctcagctaaacagagtagctgagaagcactgaaaaagcagctgtttcctccagttaatagctgaggacctgagaggagaggttagaggcctccttcagggaaagggctggcttgttcccccaccaccccgagtcatttcagtgtcacaaggtctcttttccttgtgacaagagagttaagagagttaagactctcttaactgggccaggtgtggtggctcacgcctgtaatcccagcactttgggaggccgaggctggtggatcacctgagttcaggagttcaagaccagcctggacaacatggtgaaaccctgtctctactaaaaatacaaaaattagccgggcgtggtggtgggcacctgtaattctagctactcaggaggctgaggctgaagaactgcttgaacctgggaggtggaggttgcagtgagctgagatcccaccacagcactccagcctgggtgacagagcgagactccatctcaaaaaaacaaaaaaccccaaaagactctcttagcgacttcttttatctacttcccttgaactcaaactatcttccatcttgggaataacatcaataccaggttgtaatgtcacttcattgcctaccttttctctcccatgcctcctgatcttaccctcaccagtctttctcatttttttcttctgcctcctctcttaatactgatgatgacagcaactcatgaagagtattatattaccatgtgccaggcactgtgctaactatattcattgtgttactcaatcctcagaacacacggcaatgcctgttattctagttcacgtaacagcaaaccccctgactgaggcggtcttcatcccaaagcccttgctctctcatgccccctacatcgtcttgtccttctccaactctgactcttcttcccatgggaccccagtacaactgtctccgaccgtaaaccccttcactgaacctgcccccggaattctcacctcacaaagcccctttgatcaaaagtcccctcccctagtcaaccaccaatgaagtcctctgacctcactcatctcgtctgccaatttcctctcaggacgcctacctcgcaccggcggccccctctccttcccgccgcgggcgcgtcagttggggaccgcgaacaagagcgcgcctgcgcactgggacccttaccctaactgcagccgcgcgccccaaggggtggctgtcggggggctctcgcgctcccacacacgcacactcagccagggttcccgggaggtgggagggaagggaaagagggaaaggagaaggggggaagaggaaggaggtagagaaaagagggcgcagctggcatgagccaggagtctactcccagctctacggacacttcctattgttactaggaaacaggaagtgtccttaggtgcaaaagcttccccgcgaaacttccgcttcgggagcactgcctgtcccgcctccgagccgcagttttacgcagacacacttccggcgctaagttctaggtctgcacggctgactccgcccacgtaggtcacaacgcggcgtctttgcacgctaagctagccacacttccggcaagagcagctagaatcgttccggtgcatattgaataggcgcagaaagggagaaaaagattctacagccctggccacagtactttggtgacacttttcgtggggctctctggaggacttttcccaaggcagatggagaaaacttcgtgaaacccactccttgctattaaaggaaatgttgtggaatataattggacttaggttttgcagagcttgagcatggcctttttgtcctcccaccttc

SEQ ID NO: 15883 - DNA, 2300 bp, Homo sapien
ttttattagagatggggttttgccatgttggccaggctgctctcgaactcctaacctcaggtgatccacccccattggcctcccaaaatactgggattacaggcatgagccaccgtgcccagctgaatttctaaatttttgatagagatcgggtctttctatgttgcccaagctggtcttgaactcctagcctaaagcagtcttcccacctcggcctcccagagtgtttggaatacgtgcgtaagccaccacatctgccctggagcctcttgttttagagacccttcccagcagctcctggcatctaggtagtgcagtgacatcatggagtgttcgggaggtggccagtgcctgaagcccacaccggaccctcttctgccttgcaggttgcctgcggacacgctgggcctctgtcctgatgctgctgagctccctggtgtctctcgctggttctgtctacctggcctggatcctgttcttcgtgctctatgatttctgcattgtttgtatcaccacctatgctatcaacgtgagcctgatgtggctcagtttccggaaggtccaagaaccccagggcaaggctaagaggcactgagccctcaacccaagccaggctgacctcatctgctttgctttggcatgtgagccttgcctaagggggcatatctgggtccctagaaggccctagatgtggggcttctagattaccccctcctcctgccatacccgcacatgacaatggaccaaatgtgccacacgctcgctcttttttacacccagtgcctctgactctgtccccatgggctggtctccaaagctctttccattgcccagggagggaaggttctgagcaataaagtttcttagatcaatcagccaagtctgaaccatgtgtctgccatggactgtggtgctgggcctccctcggtgttgccttctctggagctgggaagggtgagtcagagggagagtggagggcctgctgggaagggtggttatgggtagtctcatctccagtgtgtggagtcagcaaggcctggggcaccattggcccccacccccaggaaacaggctggcagctcgctcctgctgcccacaggagccaggcctcctctcctgggaaggctgagcacacacctggaagggcaggctgcccttctggttctgtaaatgcttgctgggaagttcttccttgagtttaactttaacccctccagttgccttatcgaccattccaagccagtattggtagccttggagggtcagggccaggttgtgaaggtttttgttttgcctattatgccctgaccacttacctacatgccaagcactgtttaagaacttgtgttggcagggtgcagtggctcacacctgtaatccctgtactttgggaggccaaggcaggaggatcacttgaggccaggagttccagaccagcctgggcaaaatagtgagacccctgtctctacaaaaaaaaaaaaaaaaaaaaattagccaggcatggtggtgtatgtacctatagtcccaactaatcgggaagctggcgggaagactgcttgagcccagaaggttgaggctgcagtgagccatgatcactgcactccagcctgagcaacagagcaagaccgtctccaaaaaaaaacaaaaaacaaaaaaaaacttgtgttaacgtgttaaactcgtttaatctttacagtgatttatgaggtgggtactattattatccctatcttgatgatagggacagagtggctaattagtatgcctgagatcacacagctactgcaggaggctctcaggatttgaatccacctggtccatctggctccagcatctatatgcttttttttttgttggtttgtttttgagacggactttcgctcttgttgtccaggctggagtgcaatggcacaatttcggctcaccacaacctccacctcccaggttcaagtgattctcctgcctcagcctcccgagtagctgggattacaggcatgcgccaccaggcctggctaattttgtatttttagtagagacagtgtttctctatgttggtcaggctggtctcgcactcccgacctcaggtgatctgcctgctttggcctcccaaagtgctgggattacaggcgtgagccaccatgcccggccagcatctataatatatgctaaaccttacccacagctgcctctgtcttggggtcagggttcttgaatggtctgggccagcctgagttaggagtgggaagaggaagaggaggcacgcgccaaagtgttcttcccgcctgaccgagtcctctgcg

SEQ ID NO: 15884 - DNA, 2300 bp, Homo sapien
cgagatagcaccattgcattctagcctgggcaacaagagcaaaactccatctcaaaaataaataaataaatagatagataggctgggcacggtggctcacgcctgtaatcccagcactttgggaggccgaggtgggcggatcacctgaggtcaggagttcaagaccagcctggccaatatagcgaaaccctgtctctactaaaaatttaaaaaattagccaggcatgatggcgggtgcctgtaatcccagctactcgggaggctgaggcaggagaatctctcgaacctggcaggcggaggttgcagtgagccgagatcacaccattgcactccagttgggcaacaagagcgaaactccacctcaaaaacaaaataaaataaaataaaatcaggagattggtcagcttaattccatctgcaaccttaattcccttttggccatttaacctatcatattcacaagttccagggattcatgcagggacatctttggtgaccattattctgtctaccacactctctagaagagagtagatgtgagaaacagcatctggagagggaggagccagcaggagagggaaatatcacagacgccagaggaagagagttcccagaagggtaggtgcaacagtaagggatccctctgggaagtcaagcaagagaagacctgaaaaacaaccattggccgggtgcggtggctcacgcctataatcctagcattttgggaggccgaggtgggtggatcacttgaggtcaggagtttaagacaagcctggccaacatggtgaaaccctgtctctactaaaaatacaaaaattagccagacatggtggcaggcacctgtagtccaaactacttgggaggctgaggcacgagaaccacttgaaccctggaggcggaagttgcagtgagccgagatggcaccgctgcactccagcctgggcgacagagtgagactccgtctcaaaataagtaaataaataaataaataaccattgggtctagcgtcttggtgacaccagccactaggtgtcagggcaatgctggaggcagcagctagtttatggcgtgggcagcaaggaagaagtgaggaagtagagactgggagtgtagaatctttccaaaaacttgaatgtggaggggtagatgggataatgccgggagaggaggctggtgaaggacctcttagtgaagggagatttgttgctgtttctgagatgggaaagagaaacaagttgcagtgtagatggggaggatggagaggttgaaggtgtaggagagatgggtcaccatcagatgggacgtctgtgaaggagagacctcatctggcccacagcttggaaaggagagactgactgttgagttgatgcaagctcaggtgttgccaggcgggcgccatgatagtagagaggttaggatactgtcaagggtgtgtgtggccaaaggagtggttctgtgaatgtatgggagaaagggagaccgaccaccaggaagcactggtgaggcaggacccgggaggatgggaggctgcagcccgaatggtgcctgaaatagtttcaggggaaatgcttggttcccgaatcggatcgccgtattcgctggatcccctgatccgctggtctctaggtcccggatgctgcaattcttacaacaggacttggcatagggtaagcgcaaatgctgttaaccacactaacacacttttttttttcttttttttttttgagacagagtctcactctgtcggcctggctggagtgcagtggcacgatctcggctcactgcaacctccggctccccggctcaagcaattctcctgcctcagcctcccgagtagctgggattacaggcatgtgccaccacgcccggctaatttttgtatttttagttgagatggggtttcaccatgttggcgaggctggtcttgaactcctgacctcaggtaatccgccagcctcggcctcccaaagtgctgggattacaagcgtgagccaccgtgcccggccaacagtttttaaatctgtggagacttcatttcccttgatgccttgcagccgcgccgactacaactcccatcatgcctggcagccgctggggccgcgattccgcacgtcccttacccgcttcactagtcccggcattcttcgctgttttcctaactcgcccgcttgactagcgccctggaacagccatttgggtcgtggagtgcgagcacggccggccaatcgccgagtcagagggccaggaggggcgcggccattcgccgcccggcccctgctccgtggctggttttctccgcg

SEQ ID NO: 15885 - DNA, 2300 bp, Homo sapien
ttgggaggttgaggcacaagaattgcttgaacccgagagggggaggttgcagtgagctgagattgcaccaccgtactccagcctggatgacagagcaagactctgtctcaaaataaaaattaagataaataataaaaaataaataaaaatcagcaaattaggccaggtgtggtggtggctcatgcctgtactcccagcactttgaggtgggaaggttgcttgaaaccagaagtttagaccagcctgggaaacaaagtgagaccccatctctacaaaaataaaaataaattagccaggtgtggtgggacgtacttgtactcctagctactagggaggctgaggtgcaagaatcgcttgaacctgggagacggaggttgcagtgagttatgacagtgccactacactccagcctgggtgtcaagggtctttgaaaaaataaacaaaataggctgggcgtggtggcttacacttgtaatcccagcactttgggaggctgaggcaggcagatcacaaagtcaggagttcgagaccagcctggccaacacagtgaaaccccgtctctactaaaaatacaaaaattagccaggcatggttgcacgcgcctgtagtcccaactgctcgggaggctgaggcaggagaatggcttgaacctgggggggggcggaagttataatgagccaagattgtgccactgcactccagcctaggcaacagagcgagactccgtctcaaaaataaaaataaaaataaatcaatagagcctggtatgatggctcacgcctataatcccagcactttgggaggcccaggtgggtggatcatctgaggtcaggagtttgagaccagcctgaccaacatggagaaaccccatctctactaaaaatacaaaaaattagccaggcgtggtggcacatgcctataatcccagctactcaggagcctgaggcaggagaatcgctttaaccggggaggtggaggttgcggtgagtcgagatagcaccattgcattctagcctgggcaacaagagcaaaactccatctcaaaaataaataaataaatagatagataggctgggcacggtggctcacgcctgtaatcccagcactttgggaggccgaggtgggcggatcacctgaggtcaggagttcaagaccagcctggccaatatagcgaaaccctgtctctactaaaaatttaaaaaattagccaggcatgatggcgggtgcctgtaatcccagctactcgggaggctgaggcaggagaatctctcgaacctggcaggcggaggttgcagtgagccgagatcacaccattgcactccagttgggcaacaagagcgaaactccacctcaaaaacaaaataaaataaaataaaatcaggagattggtcagcttaattccatctgcaaccttaattcccttttggccatttaacctatcatattcacaagttccagggattcatgcagggacatctttggtgaccattattctgtctaccacactctctagaagagagtagatgtgagaaacagcatctggagagggaggagccagcaggagagggaaatatcacagacgccagaggaagagagttcccagaagggtaggtgcaacagtaagggatccctctgggaagtcaagcaagagaagacctgaaaaacaaccattggccgggtgcggtggctcacgcctataatcctagcattttgggaggccgaggtgggtggatcacttgaggtcaggagtttaagacaagcctggccaacatggtgaaaccctgtctctactaaaaatacaaaaattagccagacatggtggcaggcacctgtagtccaaactacttgggaggctgaggcacgagaaccacttgaaccctggaggcggaagttgcagtgagccgagatggcaccgctgcactccagcctgggcgacagagtgagactccgtctcaaaataagtaaataaataaataaataaccattgggtctagcgtcttggtgacaccagccactaggtgtcagggcaatgctggaggcagcagctagtttatggcgtgggcagcaaggaagaagtgaggaagtagagactgggagtgtagaatctttccaaaaacttgaatgtggaggggtagatgggataatgccgggagaggaggctggtgaaggacctcttagtgaagggagatttgttgctgtttctgagatgggaaagagaaacaagttgcagtgtagatggggaggatggagaggttgaaggtgtaggagagatgggtcaccatcagatgggacgtctgtga

SEQ ID NO: 15886 - DNA, 2300 bp, Homo sapien
gctcaggcaggccagtcacggtgaggcgtcctccctccaagtttatatttattattatttattatttatttttttcaccttcaagtttattatttattatttatttatttatttttgagacggagcctctctctgtcgcccaggctggagtgcattggcacgatcttggctcactgcaacctccgcctcccgggttcaagcgattcttctgcctcagcctcccgagtagcagggattacaggtgcatgccaccacatccggctaatttttgtatttttagtaaagacagagtttcaccatattggccaggctggtctcgaactcctgacctcaggtcatctgcccgccttggcctcccaaagtgctgggattacaagcatgagccactgcacctggctaacctccaagtttaaagacagccgccaggcccagtggctcactcctgtaaccccaacaactcaggaggctgaggccaggaatttgagaccagcctgggcaacatagcgagaccccggctctaagaaaaataggccaggcacggtgggttacgtctgtaatcccagcactttgggaggctgtggcaaaaggattgcctgagggggaaaaaatcaccctgggggtagtggtgcacacttacagtctcggctacttgagaggctgaggtgggaggatcatttaagtcggaggctgcagtgagctactatggagcgactgtattacagcttgagcaacagagcgagaccccatctccaaataaataaataaagatagcctccaaagatgtcacttgcttcacttagcactttttattgaacatatttaggaaatatataaccatggtaaagaaaattgcaattagtacaaatacacactacacacatatgcacgtgcacacactgaaacgtgtcccttccagcgcctcctgcctggataattttttttttttttgcaacggagttttgctcttgttgcccaggatggagagcagtggcgggatatcggctcactgcaacctcctcctcccgggttcgagcgattctcctgcctcagcctcgcgagtagctgggattacaggcgccagccacaacacccggctgatttttgtatttttagtagagacggggttttgccaagttggccaggctggtctggaactcctgagatccgcccacctcgtcctctcaaagtgctgggattacaggcctgagccactgcgcctggcctaaagtaattgtcttcttattggtttctctgcctttggtctcaccaaacgccccactctaaatcactgcagacaaggggttctgtctaaggaggagagcccaccagttaaaacccttcagtagttcctaactaccctaggacaaatgcagacttatccttcgctctctgctgccgcccctctccttcccagatcccatatggctccagccatatcctcagaccatctgggctgttgtctgtcctgccacacacccttcccaccccgctcccttgcaagtcctactcaggctgcacctacacagctgtctcagtttctatctgaggctcccgcagcctcctctgaaagtcctcatcacagccaatgatactgaaactgttttcttatgcagggcacggaaagatctattcaactcactgcccaatctcctctcctggtgcagaaaagacacccagtcagcgacttgcattatctgcaggcatgagtgaataataataatgcctaacccttatatagtgctaattccacgcctggcactgttctaggcactcatataaattcatgtaatccacacaaccccaaaactgatgatatctcttcatcttaccaagcactgagcagttaaataacttgctccagatattaaggggtcgagctggggtttgaagcctggttacccataaatgaaccaagaactggaaggaggacaagagctccgagaaggagtcaggtagggcgtgatctgtgcgctttacatctaagatcttccagctcccagggagcccgtttcatagagcaggagatagaggctgggagggacacggagagcctcgagagccgtgtggaggaagcggtgctgtttggggtccgggagcaagggcgtggcctggatgcgcgggcgcccgggacggcacgtcctcagaccaaactacaactcccaggacccagcgggcgctgccgcccacgcgacgtcacggcggcggagggcgcaggcggctgggcgcctggcgagtggactgttcgagcccttccgctgggacccgggccctggctccggccccgcggtaagtggggcgac

SEQ ID NO: 15887 - DNA, 2300 bp, Homo sapien
acccaagctggagtgcagtggagggattatagctcactcagcctcgacctcctgggtttaagcgatccctctgcctcagcctcctgagtaggtgggactacaggtgcgggccccgaggcccagctaattttttttttcccccaaatttttagtagaaaggaggtctctatgctgcccaggctggtcttgaactcctggcctgaagcgatcctcctgcttggattcctgaagtgcgagattacaggtgtgagccaccatacctcaacactgtattttcaacccgctcttcgttcaatctccaaaggtgggacatgcggatatggagggccgattgtgtatggttggaccatacacatataaatggctttaacctttactgactctcacagaaccctcagtgcagtggcgtgatctcagctcactgcaagctccacctcccgggttcacaccattctcctgcctcagcctcccgagtagctgggactacaggggcccgccaccacgcccggctaattgttttgtatttttttttagtagagacggagtttcatcgtgttagccagaatagtctcgatcttctgacctcgtgatccacccgcctaggcctcccaaagtgctgggattacaggcgtgaaccaccgcacccggcctttttattttttttgagatggagtctggctcttggtccccaggctggagtgcaatggcgggatctcggctcactgcaacctccgcctcccgggttcaagcgattctcctgcctcagcctcccgagtagctgggactacaggtgcgtgccaccacgcccggctaaattttgtatttttagtagagacggagtttcacggtgttagccaggatggtctcgatctccgcccgcctcggcctctcaaagtgctgagattacaggcgtgagccaccacgccccgcccaactcgtcctttctttagactttatcctgtgagggtgaattatggcctgtccctggacacacccgttctgctttccccgcaccaactgtatcccaaataggggaagtagtctcttcaaccttcaaaaatggggcactggctgggcacggtggctcacgcctgtaaccctagcactttgggaggccgaggcgggcggatcacctgaggtcaggagttcgagaccagcctggccaacagggtgaagccctctctctactaaaaatacaaaaaatagccgggcgtggtggcgcgcgattgtaatcccagctattcaggaggctgaggcaggagaatcgcttgaacccgggaggcggaggctgcagtgagccgagatcgcgtcactgcactccagcctgggcgacagagcgagactccatctcaaaaaaaaaaaaggggggggggcggggagcgacattaggccagcgcgagtgtgcggctccaggccaccagggcggccgctctggctctgccctgttaaagtgggggcagcgcccgctgaaaattggcacatcttggcttccgcaggtaccagggcctttaaaaaggttcagctggccgggcacggtggctcacgcctataatcccagcactttgggaggttgaggctggcagatcacgaggtcaagagatcaagactatcctggacaacatggtgaaaccccgtctctactaaaaatacaaaaattagatgggcgtggtggcgcgcgcctgcagtcccagctacccgggaggctgaggcagaggaatcgcttgaacccggaggcggaggttgcagtgagccgagatcgcgcctctgcactccagcctgggcgacagagcatgattccgtctcaaaataaataaataaataaataaataaataaattaaaaaaaggttgagttgagtcatcgcatgaggtaagtctgtctcctctcctcacccataggctgcagccacaggtccgcacggaaaaccaggagctccaagactgccgcacactcaacatccaactcgcggggccgcggggacggccacagaagccaatcggctcctgctacatcacagaccccgccctcaaaccttgaggagcccgccccacgcactgctgacccggagccaaaagaactgcgtggcgtccgattctggcgtcacttcccttcccgcgatggcggcacagggagctgctgcggcggttgcggcggggacttcaggggtcgcgggggagggcgagcccgggcccggggagaatgcggccgctgaggggaccgccccatccccgggccgcgtctctccgccgaccccggcgcgcggcgagccggaagtcacggtggagatcggagaaacgtacc

SEQ ID NO: 15888 - DNA, 2300 bp, Homo sapien
tgtcgcccacactggagttcaatggcgcaatctcggctcactacaaccttcacctcccaggttcaagcaattctcctgcctcagcctcctgagaagctgggattacaggtgcccaccaccatgcccaactaatttttgtatttttagtagaggtggggtgtctctatgttggccaggctggtcttgaactcctgacctcagatgatccgcccacctcagcctcccaaagtgctgggatttacaggcgtgagccactgcatctggcctatttattttatttatttatttattttgagatggagtctccctctgttgcccaggctggagtgcagtggcacaatcttggcttcccaggttcaagcaattctcctgcctcagcctcccgagtagctaagattacaggtatgcgccaccacgcctggctaattttctttgtattttttaggagagacggggttttaccatgttggccaagctggtctcaaactcctgatcttgagaatgatcctcccaccttggcctcacaaagtgctgggattataggtgtgagccaccacatccaagctccacaattttttttgtttgtttgttttttgagacggagtctcgctctgtcgctcaggctggagtgcaatggcgcaatatctcggctcactgcaacctccacctcctgggttcaagcgattctcctgcctcagcctcctgagtagctggaattacaggtgcgtgctaccacgcctggctaatttttgtatttttagtagaaatggggtttcaccatgttgttcaggatggtctcaaactcctgacctcgtgattcgtgtgccttggcctcccaaagtgccgagattagaggcgtgagccaccacacccagcctcaacaggtgttttgaacggccagagtggccctcaaggaggatacatgcctcactcccaccgcagccacacggcaagccttctttccctgagcctctgccctctgcaccccatccccccatcttcgccttaccaccttttataatccctttcggtctcagtttccaaggcaattcctcgaggaccctttcacaatgccagcctttgccaggctgtggtgtgctcacgccattctttttcatcactattcctagcttgaaattattgtgtaattgcaatttttttttttaagacagggtctccctctgttgcccaggctggagtgcagtggcgtgatcatagctcaatgcttcgttgaactcctgggctcaagcaatcctcctgcctcagcctcccaaatagctggaaccataggcatgcgccacaatgcctgcctaatttttatatttctttgtagagatgaggcctcgctatattccccaggctggtctggaactcctggcttcaagtgatgctccagcctcagcctcccaaagccgactagccaccttgccagcctgtttgtgattatttgattgaagtgtgtcacccctacttcaccatgagctcagggctcaagggggacggggctggtgcctgttttgtcctggacacctgggaacatcataggcacttaggaaatgtctgtgggatgattggtgctgctccacaagctcgccaccacccatgaggtgcaggcatcgcagaaagggcctggcaggggacagaccatagtgtcttaagctcccataaccagcctaaggagggagggaagaagggaggagtggctgtggctccagataataaaagctggggccaggccctggggggcataactggcctgagataacctgaaagacctgaggcggaggagagtcgtcacattccagggagactgcacacacacacaaaccacatgcacgtgcatgcacgcacactcagacacacacactacacacacagggacacacacagcctacacatgtgcacatacagcctgtacatgcacacacacacacataccacaccacataagaggacacacacagcctacacaggcatacacacacaccacatacacactacacaccgggacacacacacaaaaggcctatgcatgtgcacacacatacacacggacacatacatgcacacacacgggcctgcagctctgaaaggactcatgactttggtggcaagaggagctggcggagcccagccagtgggcggggccaggggaggggcgggcaggtaggtgcagccactcctgggaggaccctgcgtggccagacggtgctggtgactcgtccacactgctcgcttcggatactccaggcgtctcccgttgcggccgctccctgccttagaggccagccttggacact

SEQ ID NO: 15889 - DNA, 2300 bp, Homo sapien
tcctgggttgaccctgcatttctgctgtccaccctgatttgttccctaagagtgacctttatggaccatataatggtctcccttgaactctggcctctgggaggtttcaatgaaaagagccagggggtgatcagaggatgggaggatcccagcacttttggaagactgaggcagcaagatcgcttgagacaggagtttgagaccagcctgggcaacataataagaccccatctctacaaaaataaaaaacattagctgggtatggtggtgcgtgcctgtagtcccagcttctcaggaggctgaggccagaggatcgcttaagcccaggaattcgaggttacagtgagctataatcacagcactgcactccagcctgggtgacagagtgagaccgtgtctctaaaattttttaattggtttaattaaaaatagagaggatgagatgagagtgagatggggatttttctttccccactccctctctgctggtaaaggctgcatttctctattgaaggccacggctcctaacagctatctcttccatagctgcagctcttgctgggttccagtaactgccccctctctgcctcttcaggccagcaggtagcaagggctctctattattgctggccccaggatgcgttaccatccctctttggtttcctttttttttttttttttgtgagacggagttcgctcttgtcacccaggctagagtgcaacggcgctatcttggctcactgcaacctccacgtcctgggttcaagcatttttatctgcctcagcctccctaataggtgggattacaggtgagttccaccacactcggctaatttttgtatttttagtatagatggggcttctccaagttagccaggctggtcttgaactcctgacctcaggtgatctgcccgcctcggcctaccaaagtgctgggattacagccgtgagccacccagcctctttggtttcctttgaccctgcctacacttctataaatagtttcttccttaaactctcttcaactcctctttgaagagccatatgtttctttcttcttcttattcttctttttttttttctttttgttgttgttgttgagacagggtctcgctttgtcacccaggctggagtgcagtggcacaatcatagctcactgcaacctcgacctcccaggctcaagcaatcctcccacctcatctcccgagtagctgggatacagacgtgcaccaccacgccctgcagttcataatttttgtattttttaattttttgtagagatggggtcttgctatgttgaccaggctggtcttgaactcctagcctcaagcaatcctcccacctcagtctcccagagtgttaggatcacaggagtgagccaccgtgctcggccaagtcatatgtcccttaaactggctcttactgatacacaccaagaggttgggttactttcccaaagtcacacagagtaagtgacagggcagctaagagcattgtcactggaacacagagcagggtggaggctttttcagcctcgccagcctgcccagccccctcccagggtccctatgccctgcccaacctgctggaatctgtgatccttttgttgggatgggattgaattccctagggctcctgtcccagacctggccagcagctccagtaaccagagctgtgtgagaagaaaaggccaagccactggggcagccgcaccccaaacagaggtgaggtctccgatgagtcatgcccgtgaggggccacttcccctgtcctaagggccactgctcaccaaggacacagaacactgtcctcctctttgacctttgcctgcagtgtttttcatccctccctctcccacccaacaggtgtccaggagctaggacacctgtcctccacccccaccctgggcctccagagacatgagatgtgcgcagggctctgggtggggccttcaggctccccagcttcccccttccagccccagatcctctcagattcccagagatgggctccagccagggagggtggggctgcccctgggaccatcaggagtcacgggctgcctgggcagtgacagagccctgcagggagcagaccttcacttggctctgcctccgctgactctagcgccatggcccggcacctgctcctcccccttgtgatgcttggtaacctcaggggacaagagtggctgcaaagggcctgggtcctggcatctggggggctggagagcaggattcctggtttctgtgtggggagcaggaagtcagagagaaggaagtgaggcagcagaaggcgag

SEQ ID NO: 15890 - DNA, 2300 bp, Homo sapien
tagaatcacttgaacgcgggaggcacatgttgcagtgagccgagacggcgcccctgcactccagcctgggtgacagagtgagacagtgtccccccaaaaaaaaaaaagataaaatgtcatcctcacatcagccttttgttgtgaaaaataaaatcaagagtttactcagtcagaacagggcctgacagtaagtcttgttaaagtgttagctattacatattatagatgagcacaatgtatatcattattaaatgtcagctttattattattatttgttttgagacagtcttgctctgttgcccaggctggagtgcagtggcacgtcttggctcactgcaacttccgcctcctgggttcaagcgattctcccatctcagcttcctgagtagctgggattacagatgcgcggacgacgcctggctaatttttgtatttttagtagagacggggtttcaccatgttggccaggctggtctcgaactcctgacctcgtgatccacacgcctcggcctcccaaagtgctggtattacaggcgtgagccaccgcacccggtcagctttattattaaatgttaacttcatctgctttgtacacgaatgcatacccagtgcccagaacagtgcctggaacatactaggtgctaaataaatatttgtgacttaatgcatgaataagggtggacttcctttcttttgctctcactggagagttgaactctccttccaaaggcggtggggtggatattggcatattcagggcctttagggctgaagtcaagggcttagtggggcttaatttgtgggcgggcccagggcatggccctcattgtttctctagaaagacgtgtccaaccctcaaaggaccttctgaaatcccgctgaaaggttaagttgggaaggaaaacctgcatgcctatgtatcaggaattaacgtcttttgtcttgttttattcagtagtttcaaattgccttctccaggcaaggctgatgaaagtgcaagttgcaagttaatttgaatgtttctttttgcttttgctctcacaggaagtgaaaaggcgaccaaacactctagcattcatgccaccaaaaagaggagtgttttgcagttacaagacctggattcgaatcacgactcctcttagctgccctgtaatcaggcacaattacttgggtctctgagtctcactttccttatctagaaaacggaggtatctttacttccttcgtaagactgatgacaaggaaattatctgtgcattttgaaaccacttaagccttgtacacgttttatttctgggatcgccctggtagggcttcagaaaaataaaaaggaggtccctgagaaaaggctgggtaccgtacatctgaggtcaaccctctctggtcccaaggatggcctgggctgttccgccccgtggctccccaggggcaaagccatgaggatccgggtgagagcccagtgctggacgagcccggggcccaggggtcccggccgaaatccctgctgtctttcaggtcaaacgtcataatccccgaaccccagaaaggccgaaaggcaaggcaaccctgaaagacgacgaagtcaacctcagggcgcaggagagggagggccagtgtgctgccgacgagggaggctggagccgcggggacgaggcgccccatacagcggcaagagggtggagggcaggagctcgccatcctgggtgaaagcggggcccagcgaaggggcccggccacaggaatctcggttccaccccgctactcccggctgtgactccagtttcgtccccagccgccgggaccgccccctcgccccgcccccagcgggcactcaggccgtaccactgtgccttcatgggggtggagatagatcgtgggctagtcctgccgaggagagaggggttcttcctcaaaaaatatgattatgtatagtattcgcatgattctagttaacttgtttcccttctgcctgctcggaccctctacctgccctacgaagggggcggagtgcgttcctgcctccccctgctcttccgcgtttggtgcgcgcctgcgcggtgcgtaggcggcggagcgtacttaagcttcgacgcaggaggcggggctgctcagtcctccaggcgtcggtactcagcggtgttggaacttcgttgcttgcttgcctgtgcgcgcgtgcgcggacatggcctcaaacggtaggtaagggcgcgaggcgacggcggcggcgcacccggccgaggcctcccagctgggcttttcgttttcagtgggaccggggcggcgatcccgtgtgggattt

SEQ ID NO: 15891 - DNA, 2300 bp, Homo sapien
tgtgggttcatgacttaggtgtcattgcgtgtgggtacaatatttatatatggcgaattcagataaacattggtcaaagatggtctctggaaaaacaaaatagaggctgcattacggaaataagatttctggtctgttccctgggacatgcttaaaaaatacaatagctattatgtatggtttttattttcatgtggtttcggggaaacaacacggttttaaggatggtttctaaagatgaaattaaaaattgttccacaagggttaagtgtctggtggtaaagttgggagaaactggatggatgcacatcgcatggctggtggcgagcccatctctcttctctcgggtgagagaaccgggccaagctgagttggtttgttcactttaatgggtctccgtttcccctgccacctgtgctgaggacatttcccagcctgagctgggggaggcagcatttgctgaagtgtggagttgtctctgtggagactcaagttacagatcttaaggggcctgcctagaattttctcctctgggcaggcgacccaggaaagggtttggagtgaggctgtgagcacttacttgatattttacaagtttggatttggtgttaatttttttccttgtccgttttttcctgttgactaacggctcatcttttccttgtttttgttttttttttgttctttttttccatgtcactaaaggccctcgggaccaaggatcacgtcatgactccggtgagttcacacgtggtggcatgaaaagagtggctaaagtggtatcaagactgcctggatgttctttgaaactattataaaaaggaaactgaaaaaaatggggatagagaaggaagggagttaggtgtgtccttagttagcagtgagaagtatttgttacgaagtatttctcagaaatacctggcttgtgggttccacccccagtgatttaggtctgagaggaccctgaaaatctacctttctaacaagtccccagtgatgctgatgcgtctggaccacactcagatggtttacagcagtggttctttcaaaatgtggatcatgtccaagttggtgaacaaaactagtgaaagacctgaccacatgaagtaaagcattgaactcctgtttaggttgtattgatgtttgtgtactagatttgaatgtaaaatgggtttcttatttaattcggggaccttcaactgaaagttgataaatactgatggacttttctgtgtggtcttgttgggcatttcactcctgagccctggtttccatactgtatactgggtgttaacatgtttcaaaggataattgtcaaactgaatctgaaatttatcagcatggctggcatatagggactcaaaagggatgtggatttctttttagttgtcttccataaaccaaatgataccagttgcttgatggatactaggtgctttaggttttttcctgtgttttttattttaccttttcacatttgcattttctctgttcaacaagcagaacaggataattcagacaacaacaccatctttgtgcaaggcctgggtgagaatgttacaattgagtctgtggctgattacttcaagcagattggtattattaaggtacttgtggagaggagtgggagctttctgtcagtgttgtaggcttgtggatttcacacattagtaaaagcaagtctttaatggttgccagcagtaaaaacaagtcttagtggttgttgccagcttaatttgttgaggaaagagccttagttactgttttctaaaagagaagttctatcttaacacaaaaagtataacttatcagagtaccctaaactcttgagatttgtactctatagtaacttttagttttatctttcaatattggagtgagagacagttttctttaatggaggtttacatgtgaggtaggaagaagtaactgggaagaggggagctgaagtttgggaattataaacctcatgttctagaggaagaagatggaaagggagtactgtagcctttaaaattgatgttacctcattttgctttcttcagacaaacaagaaaacgggacagcccatgattaatttgtacacagacagggaaactggcaagctgaagggagaggcaacggtctcttttgatgacccaccttcagctaaagcagctattgactggtttgatggtatgtatgagaaggctggcagaggtggggctggggatatagggcagcaagccttaggaaacaagccatagtttgagggttcttttgagtcttccaacacttactttagctgcggtttcaggtag

SEQ ID NO: 15892 - DNA, 2300 bp, Homo sapien
tgtctctatccattctcctggaagatccccccaaactggacctacccactaaacagtcacctgggaccctatttccttttaaggtcaaggccaatcacatatgccatttgaaggacacaggaacttgacactaatggtcccagtaatcatatcttacaaggagcttcgacctcctccactcctaacaggagggcatcaggggaccacaaccaaagcaagattagaatcctgctaggcaaagcaccaacagtgaactactcaaatatcgtatcaggccatttcaactaaacatttaacaaagaaaccagcagtggcagggacggagagaactgccacatcctctacatgtactaagtcaaagcaatgcctgggaaggcccacttgacgatcctttgtttttaatacgccagaccactctccgcctactgttgcttagagagcaccccaatgctggcaggggaagtaaacctgctattcctcttaaaagtcatggtttattgggaggctgaggtgtgcacatcacctgaggtcgggagttcgagaccagcctgaccaacatggagaaaccccgtctctactaaaaatacaaataaattagctgggcatggtggcgcatgcctgtaatcccagctatcgcttgaacccaggaggcggcagttgcggtaagccgaaaaacgtgccattgcactccagcctgggcaacaagagcaaaactccatctcaaaaaataaagtcatagtttctgtgcctcaaatcacccaagattcaaggatgcagcaactcttcagtagagaacatacttgtggaacacttgaaaatttgagaggatggccagatgcagcggctcatgcctgtaattccagcactttgggaggccaaggcaggtggatcacctgaggtcaggagttaagagaccagcctggccaacacagtgaaaccacacctccactaaaaatgcaaaaactaggtgggcatggtggcccacgcctgtagtctcagctactcagaagctgggattctcctgaggcaggagaatcgcttaaactcaggaggcagaggctacagtgagccgagatcacgccactgcactccagcctggatgacagagcaagactctgtctctaaaaataaaaaataaaaatttgagaggaaagcacttcccaattaggggtccccagcacatttgtaagctatgcttgtgatggcagctgtcttacaaaccaagttcgaaaaccctgtaaataaaacctttctgctcttgggttaatgttacgctctgtgtaactaaaataaaaagcatgctaaataactggttggcaggtacgtgcaagtttacaaccacatggtaagaggctgaggagcactgctctaaggttttaactcattggctgcaaccccttccccctcttatcacttatcattcccttaggagggccttccaccctccaatcaaaaagggatcaagcctaaaatctcataatgtcaatgacctcaagccctctgagtacaggcaggatgtgaaagtaacccagccagaccagtctccttatagcaggtatctacccaagcgctgttcaccagggcagctaggaagggagtcactcacctcctagatcctgactccactccacaaactcctgcagcactcagttactctccttcctgtgaaagacccagagtggctaagcgctctccaccatggtcaaatctgaatactgccccatttaaatgtagtttgtttgagcctcaccattaaaagggccaaaagatcaaagagttcttaaaaagggataaactgctgcaaataaactaagaccagtatgcaaataaatgtggtaaaggaaaaattccccatagctgggcaaatttaggccaacactcatgacatcccatgttcttcatttctcatttatacaccaactttccccatgacagaaaagtttaatctctgctctcaaggatatcatttggccttctccccgaacactgtattccagttcctgctgggcagggtaatctgaacaggaaaactctctaccttcctgatcgggacatcgatcttccaggaaagtgaaaagggggaagaggaacaaaatttaactaaaatggtcacttttaatgggaaccagaggtatagttacaattacatagtccgacacaaaaaaacccttgggtgatcaggaattggaaggttacaaaataacgagggtaacactgggtacaggacaaaaagctgttccagaacctggggagccaggctaattaatacggcctctccctgcgatcctgtctgtgctcac

SEQ ID NO: 15893 - DNA, 2300 bp, Homo sapien
agtcatgagggggtctctgagccaggcaggtgcaggatcatatgtgtgggttaggaagatgtatccttctggccacagtgcacaaaaggaaatggagattctggaaggataaaggccagtgagaaggcatgataaacatccatgagccaaggaacactggctgttggaccacaagtgccacccatggtgaggatgttggcacacagcttaccccagcccacatgctacaaggatggggagcaaggccaggcacagtggctcacacctgtaatcctagcatgttgggaggccaaggcaggaggactgctgagcccaggactttgagaccagcctgaacaacatagggaaacccattctctataaaaattttaaaaactagccaggcatggtggcacaactgtagtcgcaggtactcaggaggccgaggtgagagaattgcttgagcccaggagttcaaggctgcagtgagccacaatccctccggtgtactccagcctgggcaacagagtgaggtcctgtcttcaaaagaaaaaacaaacaacaacaacaacaacaacaaaaaggctttcagcagggtagcagagcactgctccccatcgtggtttttgtttgtttgtttttgttcctgttttgagatggagtttcgctcttgttgcccaggctgaagtgcaatggtgtgatctcagctcactgcaacctccacctcacgggttcaggcgattctcctgcctcagcctccccagtagctgggattacaggcacctgccaccacgcccggctaatttttgtatttttagtagagatggggtttcactctgttggccaggctggtctcaaactcctgatcacccacctcgccctcccaaaatgctgggattacaggcatgagtcaccgtgcccggcccatcctggttgtcttgtttgtttttgagacaaggtgtctgttgccgagtggcacagagtgcagtggcacaatcatagctcactgcaccctcaacctcctgggctcaagtgaccctccggcctcagcctcccaaagcactgagatgacatgcgtgatgagccactgcacccagccatgctggaagcttttgaatacaacatgctgcaggcatcacagcctcattcattccttcactcagcaaatctttactcagcacctaatgtgttccagatacatttttttttttcagatggaatctagctctgtcacccaggctggagtgcagtggtgcaatcttggctcactgtagcctctgcctccgaggttcaagcgattctcatgcctcagccgccctagtagctaggattacaggcgccctccaccacacacagctatttccaggtacattcttgacgctaggaattcagcaaagaataagacagttaaggtctccgatgctcataggcctcacattttagagagggatgaatgtccaataagcatataaacgtataatatgtcagggtcgtatgactacaaggaacagtgattgttacaacccagatgagagggaaaaataaaggattccaaatatcccccttgggaagtagagtcaggattcaaacaaagaactgtatggcttcaagttcatggtctttaatctcctggaggctgtctctctttcttttttcttttttttaatcagtgttgggatcaaattctggctcccctaggaagcatctggcaaggtttcgggagccatcgggttggccatgttatgctggaatatttataagcaccggagggttatccccatgtcgtagaaaatgaaactgaagctcagagagatttgcactctctgcccttttgtacaactcatttttccccagtatgtggaattgagggagcttcacgcttctagctgtcatgattccaagattctacgacatgtgggagaggatcctaaggttcggggaaccgcggaggtttcggggttctagaaatccgaggttctaagcctaggtgctccaataaacccagtgagagccagcccaggtttccggtctgtacccgctggtgcaagcccagagacaagcaggcgccacccatgagcccctctgcggccccctcccgggtcccacctcgcaggccagctggagggcgcgatcctggcgtcccccgacggcctggggccccaatccagaggcctgggtgggaggggaccaagggtgtagtaaggaagcgccttttgctggagggcaacggaccggggcggggagtcgggagaccagagtgggaggaaggcggggagtccaggttccgccccggagccgacttcctcctggtcggcggctgc

SEQ ID NO: 15894 - DNA, 2300 bp, Homo sapien
gaaagccaggcagtgagatgttggggagttaggagatttaaaatcagggaattgggagaggtcttgctggaaaggtaatattgagcaaagtctgagggaggaaaaagaggatgccatgcagtacctgggttggagagtgttccaggcagaggggaccgtaagtgcaaagtccctgatgccgagtgatcaatggggaaaggggtgataaaagagtcagagtgattaatggggtcatagcagatagggctttgtaagccacagttagcactttggtttttattctagatgaaatttctttcttttcttttttttaatatttattgttttttttgagacggagttttgctcttgttgcccatgctggagtgcaatggcatgatcttggctcactgcaacctctgcttcccaggttcaagcaatcctcccatctcagcctcccgagcagctgggactacaggtgttcttcaccatgcccagctattttttttgagttggagtttcgctcttgtcacccaggctggagtccagtggtgcgatctcggttcactgcaacctctgcctcccgggttcaagcgattctcctgcctcagcctcccaagtagctgggattacaggtacctgccaccacacccggctgagttttgtatgtttcatagagacgaagtttaaccatgttggccaggctggtctcaaactcctgacctcaagtgatccacccgcctgggccccccaaagtgctgggattacaggtgtgagccattgtgcctggcccttgccaactttttaatggggttgttttctgcttgttgaaatgtttagtttctttatatattctggatagtagatctttgttggatgcatagtttgtgaatattttcttccattctttttttttgagacggagtctcactctgtaccccaggctggagtgcagtggcgcgatctcggctcactgcaagctccgtctcccgggttcacaccattctcctgcctcagcctcctgagtagctgggattacaggtgcccgccactgcgcccggctaattttttgtatttttagtagagacggggtttcactgtggtctcgatctcctgacctcatgatccacccgccttggcctcccaagagtgctgggattacaggcgtgagccaccgcgcctggcctttcttccattcttcagttgtctgtctgttgatagttgcttttgcttttgctgtgcagaagctctttagtttaatgaggtcccacttaacaatttttgtttttgttgcttttgaggacttagtcaagaattctttaccaaggctgatatccagaatagtatttctcctgcggtttcttctatgatttttatggtttgaagtcttacatttaaatctttaacccatcttgagttaattttttttatatggtgaaaggtaggggtccagtttcattctcttgcataaggctagccagttatcccagcgccacttaaatgaaatttcagctgagatttgaaagatacacatacaggaaccagggcagaattgagttctgggctgcaggctctggattcagttcattcatttgttcaatgtctctctatcattcattctccaagcatttagagaggcctactttgtcccaggcttgtcctgggtgtactagagagaccaaagtggaaaagaccctcccctcagctctggaggaagaaaacatttcagggtggggtgaggtcctgccctcctgcaggtggggtaatcctgccagggtgaccttggtcagccataaacttggggaatgagtgggtgacaggctggggaggggctgccagcaaggaggaaggagctggagagtgtggaggtgggagtggggggagaaagggcagacccccttcaattttctgtcttttctgtggtgtgaaaggccctggctccccgctggctctgagctctgactccaggcaggccggggagagaacagtggatgggccaagacaggtggccctgtcatgtgatgtgtgcccagggactactcagccctcacttttagaacggtttccggaagtgatgggagggattgggcagggcagctaaatatagtcctggggccatggctcagtctgggagggtcttccgctgagcactgtgtgcccatcacgcgtggtgtccactgccagctgcccctgtgagtccctgtccttgcttggagcctgctgcttgtctcagatccttggacccagccctgaccccagtccagctaagctcaaccctgaccggtcctccttcgagactctttcagcctaagatctccaac

SEQ ID NO: 15895 - DNA, 2300 bp, Homo sapien
caggctggagtgcagtggcgcgatctcggctcactgcaagctccgtctcccgggttcacaccattctcctgcctcagcctcctgagtagctgggattacaggtgcccgccactgcgcccggctaattttttgtatttttagtagagacggggtttcactgtggtctcgatctcctgacctcatgatccacccgccttggcctcccaagagtgctgggattacaggcgtgagccaccgcgcctggcctttcttccattcttcagttgtctgtctgttgatagttgcttttgcttttgctgtgcagaagctctttagtttaatgaggtcccacttaacaatttttgtttttgttgcttttgaggacttagtcaagaattctttaccaaggctgatatccagaatagtatttctcctgcggtttcttctatgatttttatggtttgaagtcttacatttaaatctttaacccatcttgagttaattttttttatatggtgaaaggtaggggtccagtttcattctcttgcataaggctagccagttatcccagcgccacttaaatgaaatttcagctgagatttgaaagatacacatacaggaaccagggcagaattgagttctgggctgcaggctctggattcagttcattcatttgttcaatgtctctctatcattcattctccaagcatttagagaggcctactttgtcccaggcttgtcctgggtgtactagagagaccaaagtggaaaagaccctcccctcagctctggaggaagaaaacatttcagggtggggtgaggtcctgccctcctgcaggtggggtaatcctgccagggtgaccttggtcagccataaacttggggaatgagtgggtgacaggctggggaggggctgccagcaaggaggaaggagctggagagtgtggaggtgggagtggggggagaaagggcagacccccttcaattttctgtcttttctgtggtgtgaaaggccctggctccccgctggctctgagctctgactccaggcaggccggggagagaacagtggatgggccaagacaggtggccctgtcatgtgatgtgtgcccagggactactcagccctcacttttagaacggtttccggaagtgatgggagggattgggcagggcagctaaatatagtcctggggccatggctcagtctgggagggtcttccgctgagcactgtgtgcccatcacgcgtggtgtccactgccagctgcccctgtgagtccctgtccttgcttggagcctgctgcttgtctcagatccttggacccagccctgaccccagtccagctaagctcaaccctgaccggtcctccttcgagactctttcagcctaagatctccaaccagacctgtgagtcccgtgggctggagagagggggaggggaggtctgggtatcttggtaaagtgagggaggggagtctcggagtgggggctctggagaatttgggtccgggactaaggtcagaggctgaggcctggggctaaggcgagggcaaggacagtgggctagaatctgggcttgtgttcaggaactggggttgactgatagggcatatttttggggttggagctgagaattgcagtggaggctgcttttgggcctgagaccgagttcctctttccccttggccgtcagagtcccatccagtgtaggatgtgaggtctttacaggctggggcttctccctgcggggcggcgggcccggcctgggctagggctgggccagggctgggccgggagcgcggcgccgcggggtccccctaacctactcctcctccacccaggcccgccatgtcggctgcgcccggcctcctgcaccaggagctgtcctgcccgctgtgcctgcagctgttcgacgcgcccgtgacagccgagtgcggccacagtttctgccgcgcctgcctaggccgcgtggccggggagccggcggcggatggcaccgttctctgcccctgctgccaggcccccacgcggccgcaggcactcagcaccaacctgcagctggcgcgcctggtggaggggctggcccaggtgccgcagggccactgcgaggagcacctggacccgctgagcatctactgcgagcaggaccgcgcgctggtgtgcggagtgtgcgcctcactcggctcgcaccgcggtcatcgcctcctgcctgccgccgaggcccacgcacgcctcaaggtgcgggatccgcgcgcatcgtggtcggaggggctgttcggtggcacggggccgatggggaggtcgctgcagtgatttgga

SEQ ID NO: 15896 - DNA, 2300 bp, Homo sapien
cacctccacctccaccagctgatgctccagcacagccacactcttctccttgcgcatgcatgcctcctgcagctgcagtttctgctgtggcagctgtgtctgggggtcgaggcatggagaagtgatggggatgccacccacccaaaacccacacctcccatcctaaacctgccctctgtggctcaacctcaatgccagctcctcctccagccatcttcccatccccaaacccacttacatgcctcccagccccagccagtgctactcctgaggtccgaatgcttcccctgccccttgtctattttggtgcggttttttatttatttattttggtgttttgttttgagacagggtctcacactgttgccctggctggagcagtggcatgatcacagttaactacagcttcaacttcccaggcttaattgaccctctcacttcagtctcccaagtagctggaactataggcacacaccaccgtgcccagcaaattttctgatttttttttttttgagttggagtctcgctctgtcacccaggatgcagtgcagtggcacaatctcagctcactgcaacctccacctcctgggttcaagcgattctcctgcctcagcctcccaagtagctgggactaattttggtgcaccaccacgcctggctaattttggtatttttagtagagacagggtttcaccatgttggccaggctggtctcaaacttctgacctcaggtgatccacccacgtcagcctcccgaagtgctgggattagacatgagccaccactcctggccatgattttttaaaatatttttgtagagacaatctcactatattgcccagactggtctccaactcctggcctcaagcaatcctcccacctcagcctcccagcatgctgggattacaggcatgaaccgccacacccccagccccttgtctgttttgttgacccctccctggccttgccttccctgatcccctctgctcagcagtcagccccatagcacaggtctttgcgaggatgacaaacatcagtgtggtttggtctctcccaccagacaggcaggcacagagcttggcacacaacagacctcagggggtacatgaaggatatatgaaagaagaaaggcaacctacccctactcctgggcttcctctcttacttaaaagcagaacatcagcctcagtcagcctgtcagcctgaccaccaagtcagcctgcctgtacacacatgggcttggagtagggggcaggaaatttaattaaaatgtcccctgctggccgggcgtggtggctcacacctgtaatcccagcactttgggaggccagggcgggtggatcacgaggtcaggagttcaaggccagccagaccaagatagtgaaaccccatttctactaaaaatacaaaaattacctgggcgctgtggcaagtgcctgtaatcccagctactcgggaggctgaggcaggagaatcacttgaaccagggaggcggaggttgcagtgagccaagaatgtgccactgcactctagcctgggcgacagagcaagactgcatttcaaaaaaaaaaaaaaaaatgtcccctgcacagaccaaccattctgtggtctagatcttacccaagacctcaaatgcaaatatgcaaatataggagagctcccaatactcctgccaaagccattttttttttttttttttttttttttggagacaggattgcctaggctggagtgcagtggcagaatcacaactcgaactcctaggctcaagcaatccttttgcttcagcctcccgagtagctggcactacaagcatgagcaaccatgccaggctacaaagccacttctttgctgggaggtgcctgaccatggaatcagttccattcctgcctcaatgacttgcaacctgtttcctcctctgcagattgggaacagcaatccccacctcaacaatttggcgcccccactctcccaggggaaactgggggaccctctaggcggtgtttgcagagtcccctcccagcaggagccacagggttgaataggagctgccagatcagtctccttcccgggacatccccgggggcggcagctccacctgctgcaggaaaggtaggacctgatggctccaggccctcggaggctcagaggcgcagggctgagccatgggaacgaagcgcgaggccatcctgaaggtgctggagaacctgacaccggaggagctcaagaagttcaagatgaagctggggacggtgccgctgcgcgagggctttgagcgcatcccgcggggcgcgctcggg

SEQ ID NO: 15897 - DNA, 2300 bp, Homo sapien
gcacctgtattctcagctactcgggaggctgaggcaggagaatcacttgaactcgggaggcagaggttgcagtgagctgagatcacgccactgcactccagcctgggcgacagagggagactccgtttcacaaaaaaaaaaaaaaaaaaaaaaagaaaatgtgttgagaaagagtgaaaaaaatcattggcttgagaatcacattggcggtcacataaaggtgaggtttgtgttccatgtatgtgtggaaggatacctattttcctgtgcctttgaaaacagaattaaaagtgacagacacaggggagggtaaggatatatcacagagtgaagtatcattgaaccattcctctgttgaatattcaggtttttttagcttttcatattaacaataatgctgcaatgaacaagcttgcaaatatatatatatatatatatttttttttttttagagataagagtcttgctctgtcgcctaggctggagtgcagtggcacaatctctgctcactgcaacctccgcctccagggttcaagtgattctgctgcctcagcctcccaggtgggattacaggtgcctgccaccacgcctggctaatttttttgtctttttagtaaagatgaggtttcaccatgttgggcaggctggtttcaattgctgacctcaagtgagccaccccgcctcagcctcccaaaatgctaggattacaggcatgagccaccgcacccagccaagtttgtacatatatttttgactacacttcttaactattcttaggataaattactagaagtgaaaattcttgggtgaagagcttgaggcctttacacacacacacacacacacacacaaaaataggctggatgcagtggctcacacctgtaatctcagcagtttgggaggctgaggaaggaggatcacttgagtccaggaggttgagaatagcctgaacaacatagcaagatcttgtctctacaaaaaatttaaaaaaaattagctggccatggcagcatgtgcctgtagtaccagctactcggaaggctgaggtaggaggatcgcttgagcccaggaggttgattgaagctgcagtgagctgtgattacaccactgcactccagcctgggcaacagagctagactctgtctctaaaaaaagcacaaaataatatttaaaaagcaccaggtatgcctgtacttgagttgtctttgttgatggctacaaatgaggacagctctggctgaagggcgcttccatttccatgggctgaaggagggacattttgcaaagtgtgttttcaggaagacacagagttttacctcctacacttgtttgatctgtattaatgtttgcttatttatttatttaattttttttttgagacagagtctcactctgtcacctgggctggagtgcagtggcattattgaggctcattgcagtctcagactcctgagctcaaacaatcctcctgcctcagcctctggagtagctaggactacaggcatgtgccaccatgcctggctaattttttaaatgtatttttttgtagagtcggggtctccctatgttgcccaggctggagtgcagtggtgtgatcctagctcactgcagcctggacctcgggctcaagtaattctcacacctcagcctgtccagtagcaggggctacaggcgcgcaccaccatgcccagctaattaaaaatatttttttgtagagacagggtctctctatgttgcccaggctggtttcaaactcccaggctcaagcaatcctcctgccttggcctcccaaagtgctggcattacaggcgtgagccactgcgcctggcccgtattaatgtttagaacacgaattccaggaggcaggctaagtctgttcagcttgttcatatgcttgggccaacccaagaaacaagtgggtgacaaatggcaccttttggatagtggtattgactttgaaagtttgggtcaggaagctggggaggaagggtgggcaggctgtgggcagtcctgggcggaagaccaggcagggctatgtgctcactgagcctccgccctcttcctttgaatctctgatagacttctgcctcctacttctccttttctgcccttctttgctttggtggcttccttgtggttcctcagtggtgcctgcaacccctggttcacctccttccaggttctggctccttccagccatggctctcagagtccttctgttaacaggtgcatgggggtggggtgggggactctgggtggggaggagggtaacttttgggtctgtcataaatagagggccc

SEQ ID NO: 15898 - DNA, 2300 bp, Homo sapien
accaggaccttgcccagcacttctgctgatgggcccagaatccaggctgttcctgaggtccagacccacacacccagctacctccgacctctctctcggaggctccacagatgccctcttcccaccaggacagctgtcacagcacagcaatgatcacagctgccagcccaggtttctacccactctcccgagccctccacactactcaactctcccagcaacaacagggggtgtggactttcatgatcactcccattttgcagatgaggaaactgaggcacaaagaggttgaaatagtccaagctcttaaacactgcactctggtttcctcaaaactgaggttggcctaacccctatccttcctcctccatcaccttcgtcctccctgcagcgaccgatcagcctccagcccatccccacagccaccagcccaccccaaagacccccaacatctctctcctgacaaatcagtctccagctgcttcccaaagaaaccatgccccggccgggcgcggtggctcacgcctgtaatcccagcactttgggaggctgaggcgggcggatcacgaggtcaggagatcgagaccatcccggctaaaacggtgaaaccccgtctctactaaaaatacaaaaaattagccgggcatagtggcgggcgcctgtagtcccagctacttgggaggctgaggcaggagaatggcgtgaacccgggaggcggagcttgcagtgagccgagatcccgccactgcactccagcctgggcgacagagcgagactccgtctcaaaaaaaaaaaaaaaaaaaaaaaaaaagaaaccatgcccccatataacccactttctaaaatgaaaatgtgaagatctcagtccccatgaattcccttcaatgctgtcctccactctcaggacaaaatcaatgtgtcttcaccaggtgtggtggctcacacctgtgatcccagcaatttaggaggctgaggcaggaggattgattgagatcaggagtttgagaccagcctggccaacatggggaaactctgtctctactaaaattaaaaaatatatatatataaatatatatatatattcaggtgcagtggtgcaatcctatagtcctggctactcaggaggctgaggcaggaggatcccttgggcccaggagttcgaagcagcagtgaactatgcacccactgcactccagcctgggtggcagagcaagaccctgtttctgaaattaaaaaaaaaaattgatgtacattaggggggcttccacggcctgaggcctgcttccccttgctttcctcccagtggccctgaccttgtctcttacaacttcccaccctgactgtctggttcccattgctgatttcacacacagaccctcctgtcccctgcctcatccatgtctggctgctctgtcatctcccaactttggttgctttcaatgctcagctcaagcaccacctctttcaggaagccttctcagaaagccacaccttcacaacccgggtgaggcaccctgtggtctctgtgcttccccctcacagcaatgaacttgctgtttatacatctgcctctccactgaccccagggctggtgctttgtggtttatattttcttccccacctagcagagggcttgcatctccaggctcaaattaggcttcttgaataaatgatgaataaatgagtgaatgaatgaatgaacaaatactcgctctgtgctcctcctagggacccggatgccccactccttggcccagactttccaggtcagagtggagggctcccaccagggtttcctttagggtcctgaggggttggcatctgcccaaaccccctccagtctggctgaaatttcaaggtcaaggggtgccttctggcagtcaagggtgagcctgggaggggcagggcagggatttgcatccatctaagcaaagggcatcaagccaagtcatctgatgagagtgactccggttggggggtgggggcgtgtgggaggccgagcctgtcctcggatcagttgcgtactctgcccgccccctctgactcatgctgacaatcttcttccttcccctggccacctctctgcccacttgcttcctcagtaccttggtccagctcttcctgcaacggcccaggagctcagagctccacatctgaccttctagtcatgaccaggaccagggcagcactcctcctgttcacaggtgagcctggaccccaatgaagtagggctggggacccaggcccaagggagccagggccctgaactgggggctcaggctggggggttaggatctggg

SEQ ID NO: 15899 - DNA, 2300 bp, Homo sapien
atatgtatgcatgtgtatacatgtgcacatgcacacatgtacatgcatgtgtgtgcatgtatgtgtgtgtgcgtgtgcacatgcaggttgagacgcagggcctgacttccctggtgctgatggggaagaaagataaggaagcaaaacagtgggctttggcaggctgaggcctccccctggtttcacatttgctctcaagcctttggtgagactgacatctggctgcaaatagggtgtgccttccagcacctccgtgggtccagactccatccacaggggcctgggcacccatcagaatgcccaggacacctgtctctccggtggaggcctctggggcagaggggatgcttgagaggtcacatggaagggggtttcctctccaggtgctggaagatcgtctcttctcaggacagatgctaacttcacacaggaggggagtgggggcctgtatttaagctgagaacagaacaggcccagtgtgtggctgttgcctgggatgatttgtttaaaatattaacaatcaaggcaagagggttgtttgaggcctggagtttgagaccagcctgggcaacatagtgagacctcatctctacaaaaaataaatataaaatacaaagtagcttggcatgctgttacatacctctagtcctaactactggggaggctgaggcaggagaatcgcttgagcccaggagttggaggctgtagggagctttgatcacaccactgcactccagcctgggtgacagagtgagactccatctcaattaaaaaaagaaatttaacaaaactaccattcagcactgagcagtgaggacaaacactggctagggactggtgccagtttgtgtcattgctggatggggtgacattgagggaggaaggaggggtgggtccagggaggggcacagatatccagggtggtggaggggtaggccctctgcttcctaccgtctgaattggagaaatcttcctggtttttttttttttctttttttttagagatagtcttactctgtcactgaggctggagtgcagtggtacaatcacagctcactgcagcctccaactcctgggctcaagtgatcctcccacctcagcctccagagtagctgggaccacagagaagagctaccatgcccagctgatttttaacaatttttagtagatgtgaggtctaactatgctgtccaggctgatcttgaaatcctgggctcaagcaattctcctgcctaggcctcccaaagtgcttggattataggagtaagtcactgcacccagtctgaccttcactcttttgttgatggggctgagcagcttcatcacagcctttttcattttttatttttttgagatggagcctcactctgttgccaggttggagtgctgtggtgcgatctcagctcactgcaacctccacctcccaggttcaagcaattctgcctctgcctcccaagtagttgggaccacaggcgcgtgccaccacacccacctaatttttgtatttttagtagagacggggtttcaccatgtgggccaggatggtctcgatctcctgacctcgtgatccgcccccctcggcctcccaaagtactgggattacaggcgtgagccaccacgcctggctcatcacagcctctttaggcaactttaagagaatgaagggccttgttccaggcaaggggttagggaagctctgcccctgatgaggagaggacccagggtgtggagcctgactcccatcgccagactaggggcttaggggaggaagggttttgggagagtgagctcttgtggccaggaggccacggtcctggactccaggagtgtcacttggaggaccggtgccacctccttccccagagtgcccaagacaggagcaggacattgtgttcctgatcgatggctcaggcagcatctcctcccgcaactttgccacgatgatgaacttcgtgagagctgtgataagccagttccagagacccagcacccaggtgtgcctttgggggagggaggctgctgggggtgggtgcttcgatcctggtgaaatggcctcagccccagccctgtgtgcttctcccagttttccctgatgcagttctccaacaaattccaaacacacttcactttcgaggaattcaggcgcagctcaaaccccctcagcctgttggcttctgttcaccagctgcaagggtttacatacacggccaccgccatccaaaatgtcgtgtgagtcctgatttcttccaggcacagtcccaaagcacccaggtcttcccttgggcctcatctgtctccac

SEQ ID NO: 15900 - DNA, 2300 bp, Homo sapien
aatcacagccctcggctcggtttcctgcaagggcatcgttaatgcatcacaattaatttcttctgtccattaaatgtcagctctcaagtaaattgatgtaaaatttttgtatagaaaactatttcatattatttgcacttgatgtttaattacattttaaatgttttgtttgtttcattttgttttgtttttgagacagagtcttgctctgttgcccacgctggaatgcagtggtgtgatcttgactcactgcaacctctgcctcctgggtttaagcgattctcctgcctcagcttcctgagtagctgggattacaggcgtgcaccaccatgcctggctaatctttgtatttttagtagagatggggtttcaccatgttggccaggctggtcccgaactcctgacctcaagctatacacctgcctcagcctcccaaagtgctggaattacagacataagccactgtgcccagccaaatgttttaaataattgtcacatatatatacaaaataatttatgttataggtagggatcttgttatattttaaccttcaaagtatattcctaagctttttatttattttttattttttatttattgagacagtcttgctctgtcgcccaggctggagtgcagtggcgcaatcttgactcactgcaaactctacctcctgggttcaagcgattctcctgcctcagcctcctgagtagctgggattacaggtgcgcaccaccatgcccagctaatttttgtatttttagtagagacggggtttcaccatattggccagagctggtctcaaactcctgacctcaggtgatccatccacctcagcctctcaaagtgctgggattataggtgtgagccactgcgcctggcctattcctagccttttatatatagacctttttctttttcacattttaaaggaacttttatgtttaatcatggaatatttcaaacatacagaaaaatcacagaaaataaataacaaccactcatttatcttctccccaaccccatgtaataaatattaaaatattgtgttaaatgctaaatttaacacatgctaaaggttcctggctggatgtggtggctcacgcctgtaatcccagtactttgggaggaggaggtgggaggattgcttgagtccaggagctcgagaccagcatgggcaacatagtgcgatctcgtctctacaaaaaacaaaaaaattagctgggcatggtggtgtgcatcagtaatcccagtgactgggaggctgaggtgggagaattgcttgagtctgggaatttgaggctgcagtgagccctgatcatgccactgcattccagcatgggcgacatagcaaaacttgtcaaaaaaaaaaaaagtttcctctctgccccaccatagacaaccactcttctgatttctatcttcgtagatgaattttgcccattctcttgtatatgaaaggaaccagacattaggcattctggtgtctggtttctttcacttaagataaaattgagttaacctgtattgttgtacagaactgcagtttgttctttgttatttattgtaaagacagggtctggctatgttgcctaggctggtctcgaactgttggcctcaagcaatccacctgccaagctctgggaccacaggcatgagccatggcatctgatctgtagtttgatcttatttcttgctgagtagtagcccatggcatgactttattattttgggtgtccattctcctctggaggggctctgctttttgaaaccacaccctggcctagctccccttctccctgcctctctgccggctcacatccacatgccaagacctctgcagccattctgcttcctgtccttccactcctgtgggacctcagagagctacggggctccctgggtaccaactggctcctgaggcctgggggagggtggtcttctgggagaaggaagccaggtccctgcaggttgtggagggggacagaatgagggtttttccccagggtgttgttggcccctgcccccacttctgttccataattaaccacgcccctcctacccactgtgcccctcttcctgctgtgtggaggccctgaatcattattttaactaccccctgggagggtgagcaccttctgtgctctgtccccaaccttccacttcccctcaacgcgctgctcagggatgaccttcggcactgtgcttcttctgagtggtaagtggggccagggtgctggggagaagcttggaggagttctgaggggactccatctgggagggcaggctgggggctggtggt

SEQ ID NO: 15901 - DNA, 2300 bp, Homo sapien
acctggcctggctgagtcccactctcatcagtaacgtgcggtggaagtgacaccatgccagttataggtctcagaagccttggtttcttcggcttttgcacttttggaagccctgagccacgatgagagaagtccagctgccttattggaggcacccatggaggaaggccacctgaaataagaggctcagccgtccccaccaagcctgccttccagcatatcccccacaggcaccagacaccagcttagtgctggattgtttaacccacttaatttggggatggtttgttaggcaacagtagataactgaaacaattagtgtcagattatcctgaagattaaacaaggtcaagcttttacagtgaatggcctacggtgactactaattagataacagctgtaacaaacaattaaaaatgtaactatcggccgggcacagtggcccacacctgtaatcccagcactttgggaagccaaagtgggaggatcacgaggtcaggagtttgcgaccagcctgaccaacatggtgaaaccccatctctactaaaaatacaaaaattagccaggtatggtggcgcgtgcctgtaatcccagctactcaggaggctgaggcaggagaattgtttgaacctgggagatggaggttgcagtgagccgagatcatgccgttgcactccagcctgggcgacagagcaagactccgtctcaaaaaaaaagaaaaaaaaaagtaactacctgctcatgtaactctataaactcagataaactcagagcaaatacacacaggtgtcaaatacaatattggaaataacccaaatatccaacactggggaaagggtttagccagtcatgacctagcctgttagtagacacagccatttcaaaggaaagcagtatgggaggccgaggcaggaggctctctcgaggcccggagttcaagaccagcctgggcaataaagcaagaccccatatctacaaaaaatgttttttaaaattagccagatgtggtggcatgcacctgtgatcccaactcgggaggctgagtcaggaggattgttgagcccaggagctggaggctgcagtgagccgtgatcgtgccaccgcaccccagcctgggagacagagtgagacctgtctcaaaaaaaaaaaaaaaaaaaaaggaaaacaaaaaattgtggacctagatgagggggaaaaaaacccagacaggatgaaaatagcttctgccctgaatgtgaccatacaaaataagcctgaataaagatgagtatggaagtggcattgtgctatgcagctgagatttattgattcacttgtaagtatcccttgatgttactaaaatactgtagggcggttgactagagggactgtgggtaatataatacttcttttaaaaaaagtttccttaccattattgccgtttgggttttgctttgtttttgtttttttgtaataaaacttctttttaaaaaaagaagacaagaaagaaagggaagaaaagaaagagaaggaagaggctgggcatggtggctcacgcctgtaatcccagcatttgggaggctgaggcaggcagatcacttgaggtcaggagttcgagaccagcctggccaacatggtgaaaccccatctctactaaaaatacaaacattagccaggtgtggtggtgcgggcctgtagtcccagctactcagaggttgaggcaggagaattgcttgaacttggaatacaaaaatcagccgggcatggtggtgtgcacttgtaatcccagctacttgggaaactgaggcaggagaatccaggaacccagaagatggaggtggcagtaagccaagattgtgccattgcactccagcctgagcaacagagcaagactctgtctaaaatacaaaacagagtgagagaagaaatgaagtgagggagggaagggagggaagggagaaagggaggaagagaggaagggaagaaaggaaggagggaaagagggagggagggagaaaggaagggagggagggaagggaaggaccggcagcagggaggtccaatccttggctgagtccagccctgagatgggcttggctctggggagcaaaggctgctgggaaatttcctgcagtctgggcatgagagcaggactggagttggtgagaaccactcggtcacccctgcctcattcatttttttccccaggccccaccactggaagaactttgaggggtgaggtggagactccagaatgggacactcccgtgtgactttaaacttacaggacagacggaggccttcctctgggttgctgagtc

SEQ ID NO: 15902 - DNA, 2300 bp, Homo sapien
gcaaccagaaaaactctgaggggccttttaggggagaaaagaaacctagaaccttttcttccttttttccttctttttttttttcttgagagagtcttactctgtcacccaggctgaagtgcagtggcacaatcttggctcactacaacctccacctcctgggatcaagcgattctcctgcctcagcctcccgagtagctgggattacaggcacgggccaccacacccagctaatttttgcatttttagtagagatggggtttcaccatgttggccaggcaggactcaaactcttgacctcaagtgatccgccctcctcattctcccaaaagtgctgggattacaagcgtgggccactatgccaggcctctagaactttgtcaagtaaaaatacctgtcttcatgtctgttttctccaggagccattatcttatatacgtagggagggggctatgtgtagagggagatgccaggtatctttaactggaatagggccccatcttctctgcaacaatgccaaagtccagctgggaaaaaaactgtaggaagaattctattatagctcagtgagagctcaggaataatttttgtaacactgtataacatttgactgctcaaggaggttattttttttaaaaatagcagcagcttaaagttggatggaacatactgttcagtttattaccaatgagaaacaggtatagagccccttcttgaaaatatatcttcctcgttttttttatatattaaattcagattatatgtctatataattcattcttcttttgtatattaagttcatattagtacatcagcccttgatcaaagctagaagcttcctattggattgtaattctgaaaaggcattgttgtagggttaaccaaagtaacaaggttcaagcattcattacatacatatttttagaacacctccttcatgccaaggtccctgcccgttgctgaggacagaacaggcagatgtcatccctgcctggtcttgtggctttcttgtgacctgctttgatagagggttcacaccagccctgtctaggcttgctttctccaagtagtcatatttttcagattgaaataatgcactttgcagtagacacctgtcaggcttgtggctgcctggaaccttttgaatactcatcctagacctggagattttccctacaattcctgcctccctaaggcagaatccagagctcagtttcccatcccctcctgcagctgggggacctaggggttgccagttggtgcaatcacataattctttcagaaaagagcgacccaggatacaggtttcatgaagaatctgttttcaagaggggatgagggtggaaaattctggttttccagggcagccttaatgaagcttttggcatccagggtccagcagtgtgagctgtgggggtgtcactgcagctggccaacggaatgacttgtttatgactgtgcagactgtaggcatctctggctatatcagacatagtaagctacctaagattctcaattacttatcttctaaaactagtaagagtgagttctgttctttgcaaagaactgtgactaatacatatactgaactactgttacctgccaaaatccaggttgacacattcctaccttacataaacttcataaaaatgatgtaagggccgtgtagtggctcatgcctgtaatcccagcactgtgggaggctgaggcgggaggatcacgtgagctcaagagttccacaccagcctggacaatatagtgagatccccgtctccagtatttaaaaaatcttttaaggtacgaattattatacattttacagctgaaaacactgagactcaaaaagacacttaattcattctacaaatatttattaaagcccaactgtgtgccagccaccaggcatagaatagggaacaaaatagtttccctgcaactatataaaaagaatggcatattgtacttaaatgcctccttgccaaaataagaggcacaggacaacagctgtctggagatgacctcaagccagtcaggccccattttaaatatagaaacccctaagaatagccgccagtgctccagactcaacaggtgattggcccagagaggggaggtgaccccaggccccaggaaagggagcgaggacagcgctggttcccggctccccgcaccatcatggctttgcctctgaggcccctgacccggggcttggccagcgctgccaaaggaggccacggaggagcaggaggtgagtggggaacgggcggatccgggggctcccctaccctgcccacctgttc

SEQ ID NO: 15903 - DNA, 2300 bp, Homo sapien
tttccttctattcctagtttgctgagtatttttatgatgaagggtgctgaattttgtcaaatgctgtttttacaccaattgaaataataatgttttcctttattgtattgatgtagtgtattaatttattttcataagttaagctaaccgtacattcctgggataaatcccacctggttatcctttttatatatttctgaattttatttgccggtattttcttgaggatttttatgtctatattcataagagatattagtctctagttttcttgtgatgtctttgtctgattttgatagtagggtaatactggcctcagaataagttgggaggttttcactgtcatgacttttataacctaattataagtaattcttgccaggtacggtggctcatgcatgtaatcccagcactttgggaggctgaggtgggtggatcacctaaggtcaggagttcgagaccagcctggccaacatggcaaaaccccatctctattaaaaatacaaaatttagccaggtgtggtggccgtgtgtgtaatcccagctacttgggaggctgaggcacgagaatcacttgaacccaggaggcagaggttgcagtgagccgagatcgtgccactgcactccagcctgggtgatagagcaagactctgtcaaaaaaagaaagaaagagagaggaaagaaagaaagagaatgagagaaagagagaaagaaagaaactcctatagtattccacaggtcacatagaccaaccctggtgcattgtgggaagggactaaaaagggtgtgaacaccaggagtaggatcactgggaactatctcagcagatggctgccatagccaccaactgactaacattcactgaacactcaccatgtgccagacattgtgctaagctcttcacttggcttatctccttgaatcttcccagcaaccttatgaggtaagtaggtgctgttattattgccatgttacagatgaagaaattgagatacagagattagattcaccaaactgcccaaactcccacagctattaactggtggaaccaggaatcaaactcagtagggtgtgcatataatatactttgggtggtggtggttgttgttgttgttgttgttgttgttgttgttgttgttgttttgagacagggtttcactctttcacccaggctggagtgcagtggcatgatctgcaacctctgcaacactgcaacctctgcctcctgggttcaagcgattctcctgcctcagtctcctaagtagctgggattacaggtgtgcaccaccatacccggctaatttttgtatttttagtagaataatttttgtatttttagtttcaccatgttggccaggctggtctcgaactcctgacctcaactgatccactacccttgccctcccaaagtgctgggattacaggcgtgagccaccgcgtctagctttttttttttttttttttttttttaagagacatggtcttgctctgttgcccaggctggagtgcagaggtgtcaccatagctcactgcaccttcaacctcctgggctcaagtgatcctcccacttaagcatcctgagtagctgggaccacaggcgcccaccaccaagtccggctaaattttaatttttttttgtagagatgggggtctcgctttgttgcccaggctgatccctaactcctggcctcaagcagtcctcccgccttggcctcccaaagtgttgggattacaggcgtgagccactgcgctcagtctgtgtatcctgattactaaattttggggtgtctccttaaattctgtgccagaagccagtgcctcactcgccctaccctaattccacccatcccggtgacccaatgtccccgttcaacctgcaccatggcgcttcccagccccgctcctagcgcctcctcccgcccctaggggtcgccgtcgcgccgtcattcccttccttcgatgcccgggcgagacgcgcaaaaggtgggaggaggagaggcccgcgtgtgtgcatgcgcatggcgcggactccctcatcctggtcagggagtggaggggttgggtctcaggcagctgttagcggagtcctcagtgtctcggtcgtttctccctgtcttggtgagggccaggggacaggtcggggcagtatttgggggaagcgagaggcaagcagggcgggctggatacggagcgccctatgactgaggttagggaggacgcccgagacccccggcatcctagtcctgggccgtgggctccggacgccgggccaggacgcctccagctcccagggtcccttg

SEQ ID NO: 15904 - DNA, 2300 bp, Homo sapien
ggctgaatagatgtggcaaaagtgggcatccctttcttgtttctgatcttagaggaaaagcttttattctctcaccattgagtatgatgttggcagtgggttttttcatagatgccctttatcacgttaattgagtttccttctattcctagtttgctgagtatttttatgatgaagggtgctgaattttgtcaaatgctgtttttacaccaattgaaataataatgttttcctttattgtattgatgtagtgtattaatttattttcataagttaagctaaccgtacattcctgggataaatcccacctggttatcctttttatatatttctgaattttatttgccggtattttcttgaggatttttatgtctatattcataagagatattagtctctagttttcttgtgatgtctttgtctgattttgatagtagggtaatactggcctcagaataagttgggaggttttcactgtcatgacttttataacctaattataagtaattcttgccaggtacggtggctcatgcatgtaatcccagcactttgggaggctgaggtgggtggatcacctaaggtcaggagttcgagaccagcctggccaacatggcaaaaccccatctctattaaaaatacaaaatttagccaggtgtggtggccgtgtgtgtaatcccagctacttgggaggctgaggcacgagaatcacttgaacccaggaggcagaggttgcagtgagccgagatcgtgccactgcactccagcctgggtgatagagcaagactctgtcaaaaaaagaaagaaagagagaggaaagaaagaaagagaatgagagaaagagagaaagaaagaaactcctatagtattccacaggtcacatagaccaaccctggtgcattgtgggaagggactaaaaagggtgtgaacaccaggagtaggatcactgggaactatctcagcagatggctgccatagccaccaactgactaacattcactgaacactcaccatgtgccagacattgtgctaagctcttcacttggcttatctccttgaatcttcccagcaaccttatgaggtaagtaggtgctgttattattgccatgttacagatgaagaaattgagatacagagattagattcaccaaactgcccaaactcccacagctattaactggtggaaccaggaatcaaactcagtagggtgtgcatataatatactttgggtggtggtggttgttgttgttgttgttgttgttgttgttgttgttgttgttttgagacagggtttcactctttcacccaggctggagtgcagtggcatgatctgcaacctctgcaacactgcaacctctgcctcctgggttcaagcgattctcctgcctcagtctcctaagtagctgggattacaggtgtgcaccaccatacccggctaatttttgtatttttagtagaataatttttgtatttttagtttcaccatgttggccaggctggtctcgaactcctgacctcaactgatccactacccttgccctcccaaagtgctgggattacaggcgtgagccaccgcgtctagctttttttttttttttttttttttttaagagacatggtcttgctctgttgcccaggctggagtgcagaggtgtcaccatagctcactgcaccttcaacctcctgggctcaagtgatcctcccacttaagcatcctgagtagctgggaccacaggcgcccaccaccaagtccggctaaattttaatttttttttgtagagatgggggtctcgctttgttgcccaggctgatccctaactcctggcctcaagcagtcctcccgccttggcctcccaaagtgttgggattacaggcgtgagccactgcgctcagtctgtgtatcctgattactaaattttggggtgtctccttaaattctgtgccagaagccagtgcctcactcgccctaccctaattccacccatcccggtgacccaatgtccccgttcaacctgcaccatggcgcttcccagccccgctcctagcgcctcctcccgcccctaggggtcgccgtcgcgccgtcattcccttccttcgatgcccgggcgagacgcgcaaaaggtgggaggaggagaggcccgcgtgtgtgcatgcgcatggcgcggactccctcatcctggtcagggagtggaggggttgggtctcaggcagctgttagcggagtcctcagtgtctcggtcgtttctccctgtcttggtgagggccaggggacaggtcggggcagtatttgggggaagcgagag

SEQ ID NO: 15905 - DNA, 2300 bp, Homo sapien
tcagagagtacgagccagggtttgagtgaagggcctgagcccagcacatgcatggtaggcactcaaagaataattgtcatgatcaggtcctttttacactgcttactagtggcctttaagcctcagtttcctcacagttgccttgagtgagtgtcaagtgttgtagacctctgcaaaattcataactgcttaagaatattaggtatgggtagagtaggcttggaaggaggattggtttgcagaatccctttcagagacctgtaatctaatttctcacattagggctaatactcctgggacccctctcctctccaattgcataaaacaggttctgaccagaacagcgaggcaggccagacctcagaagcagagggacgggcttaatctaacaggagtttatcccatgtcctgcatccactgtaccctgtgctgggtttagaagtagcttcactgtccaagcttgtgacccagtgcccaagcccgagatgggaaacacatttgttttggctgtgtgtgtgtgtgtgtgtgtgtgtgtgtgtgtgtgtgtgtgttttcaaacaagccaagatttttactttttgagttccattttgttgcccaggctggtctctgaaacttccaggctcaagcaatccccctgcctcagcctcccaaaatgctggaattacaggtgtgagctaccatgcccatttatttatttatttatttatttatttatttttgagacagaatctcactctgtcatccaggctggagtgcagtggtgcaattgtggctcactgtagcctcaacctcctgggctcaagtgatcctcccaccttaacctcccaaggagctgggactacaggcatacaccaccacacctggctaattttttgatttttaaaaaatgttttgtagagacggggtctcactgtgttgcccaggctggtcttgaactcctgagttcaagtgttcctctggtctcagcctcccaaaatgctgggattacagatgtgagccacctaacctggtctttttatttttttaaagagccaacatttaaataaggagatttcacatcacagtcgatttctggggcttggtttgttgttgttttttttgtttttttttttttttaattgagacaggatcttgccaggttgcagactggtcttgaactcctaggctcaaatgatcccctcctggccgggcacggtggctcacgcctgtaatcccagcactttgggaggcctaggtgggcggatcacgaggtcaggagatcgagaccttcctggctaacaaggtgaaatcctgtctctactaaaaatacaaaaaattagctggaaatggtggcaggcgcctatagttccagctactcaagaggctgaggcaagagaatggcatgaacccaggaggcagagcttgcagtgggcggagatcctgtcactgcaatccagcctgggtgacagagcaagactccgtttcaaaaaaaaaaagaaaagatcccctgccccggcccttccctcccccacccacctcggcttccgaaagtggtaggattacaggcgtcagtcaccacacccggcctgctttattatttatatcagaagatgctgcaacattggatttttatggcagcagttcgttgagtagtggctgtcctggacataggaacagggacactccctcttgcatccctgactcagcacgtttcatatgtgttacttgcctgtcccctgcagaaaagtacttgaggttacagtctccatcccaccccactgtgggtgagaaggacctttccatgcagtgaaggcacttttcccctttccttcaccccttcctgttcccttctctgccgttttccttcttctcccccagaactcctctgtgaaatacctggcctccttccctgagcctccctgtctccctgccaccccatctccactccgtgctatgacatcaccccgtaatttgaagctcctttccctatctgaagggaggcagagacagagtgcacaggctcaactaggcaaggcagacccttgcatgcctgggtcagaggtcagggtctctggcacacattcctcccagagcaactgtaggaagcaagccagtacagaggtactctaagcgctagacaggacggggtgggagtcggtaacatcgtctcctctgggctggccctgcttctgcttagctctgggcataagactgactccagtacagtcacagttatgtctctgagctcacccagtcctgggttccaggttcccagctctgagcctggcgagacacacacaggctggtgctgtgggatg

SEQ ID NO: 15906 - DNA, 2300 bp, Homo sapien
cttgcccctgcccagaaatgcaacaaagcaacccctgaactcaacatacaggtctgttctggggcccccaccaccctagcatcatccataatgatagttctcacgtgctgagaggacttttgaagggctcacacacccagggctcacacaatggtcccaagttcaaattctctggcccatctgccagaacacaggatccctcatggttccctctggaggttaggaatgccccgcctgcgcgctgccatggaactcctcacaggggcttgcctgatttctggtcccattcctctgggaagaggtagctgttgttctaggtgtgattaaccccatcactccctaggcctgtgaagggactgtgtcagctactgccagatctgcaggcagctgggtccacgctggatagctcccgccattccaaaactctcccttcagctggtcgacgttctgtctttgtaacttcaaagaacaaacctaagccctctcagctgactgggctctttgaaggcagtgatcacagatctagtgttctgattcttccagactggggctcctttgttaaaaacaatttttaaatttgttatttttttgagacactctctgtcgcccaggctggagtgcagtggcacgatcttcgctcactgcagcctccgcctcccggggttcaagtgagtctcctgcctcagcctcccgagtagctgggattacaggcgagagccaacacgcctagcattttttttttagtagagacagggtttcaatatgttggccaggctggtctcgaactcctggcctccagtgatccgctaaccttggcctcccaaagtgctgggattacaggcatgagccaccatgcccagcccagactggggttccttgacttagcaaagggttgggcaaaaagatgtggagaccccctcgccccaaccgaatcccatcattagctctaaaatcaacagccctaagggagcagaagggggtctgcttagagatcctggttccttccatttccttgaagtccgaaccaaagtcagagctgaagtttcagctaaaattgaagccagggctatttgcagaggctgccgccctagtgcgtccgctggtgctggcccaggttggagctttgcgctagggccctgccacactgcaggcagacgcaggggtgctgctgtgggccgcctagtggatgggcaggtgggagctgtggccgaaggtctggccacactcaccaccaagcatcaggtttccggactttgtgactgtgctggtgccgcagcagattccaactgtgcacaaaactcttactacaaacaaggcacttagaggccttctcacccatgtggagcgcaggtgctgcaacagggtggagccaaggctgagactcttgccgcagtcccctcagcggtaaggcttttagcggtgtgagcgcgctggtgctggatcaggttggagctgacgctgaaagtcttaccacactaggcacaggcatagggccgaagcgatggtcacactcggggcaggagtacggcttttcaccggtgtgtacccagtggtgcttaaccagatcagagccacatcggaagcttctgccataacccggacaacggtaaggcttgtcaccagaggggctgccttggtggtgaatgaagccggggaggcaggctgtggtcagtccacatttccggcactcgcaggttttggggcttgtagacggttgctcttggcaaaggcttcttcctccccagggctagagcctgaccattttccgggcgggcagctgccccgaccacaccaggaagggctgctcaggcggagccacctcgcaatccaggggtgacctgggggctccccgggacgcgaatgtcccgctcccccgccgccccgccccgtccggattctccctcgcctcttctggcgcggccgactgcgctgcgagtgaagaactccccgtttcctagatgccagctcctgagctcacgagcacgtccagagcggaggacactcgggacaccggggtccagctccggaaacggaaaattccacaagcccgtcactctaggaagcggcagcgaacgttctcggtaggtttaaccctcttcttcctctgaccgagcgagggctccccgtctgcggcgcggtcaggaccccgcactttcggcccggctcggggttctcggagtccgtcccaaggccgggccgcaccaccgctggggggcagcgaagcgagcctagaggagaaaaggcggtccccgccgagtgcacgccgggggcggggcacggcacgaaggctccgtggtcgg

SEQ ID NO: 15907 - DNA, 2300 bp, Homo sapien
gcagtgatcacagatctagtgttctgattcttccagactggggctcctttgttaaaaacaatttttaaatttgttatttttttgagacactctctgtcgcccaggctggagtgcagtggcacgatcttcgctcactgcagcctccgcctcccggggttcaagtgagtctcctgcctcagcctcccgagtagctgggattacaggcgagagccaacacgcctagcattttttttttagtagagacagggtttcaatatgttggccaggctggtctcgaactcctggcctccagtgatccgctaaccttggcctcccaaagtgctgggattacaggcatgagccaccatgcccagcccagactggggttccttgacttagcaaagggttgggcaaaaagatgtggagaccccctcgccccaaccgaatcccatcattagctctaaaatcaacagccctaagggagcagaagggggtctgcttagagatcctggttccttccatttccttgaagtccgaaccaaagtcagagctgaagtttcagctaaaattgaagccagggctatttgcagaggctgccgccctagtgcgtccgctggtgctggcccaggttggagctttgcgctagggccctgccacactgcaggcagacgcaggggtgctgctgtgggccgcctagtggatgggcaggtgggagctgtggccgaaggtctggccacactcaccaccaagcatcaggtttccggactttgtgactgtgctggtgccgcagcagattccaactgtgcacaaaactcttactacaaacaaggcacttagaggccttctcacccatgtggagcgcaggtgctgcaacagggtggagccaaggctgagactcttgccgcagtcccctcagcggtaaggcttttagcggtgtgagcgcgctggtgctggatcaggttggagctgacgctgaaagtcttaccacactaggcacaggcatagggccgaagcgatggtcacactcggggcaggagtacggcttttcaccggtgtgtacccagtggtgcttaaccagatcagagccacatcggaagcttctgccataacccggacaacggtaaggcttgtcaccagaggggctgccttggtggtgaatgaagccggggaggcaggctgtggtcagtccacatttccggcactcgcaggttttggggcttgtagacggttgctcttggcaaaggcttcttcctccccagggctagagcctgaccattttccgggcgggcagctgccccgaccacaccaggaagggctgctcaggcggagccacctcgcaatccaggggtgacctgggggctccccgggacgcgaatgtcccgctcccccgccgccccgccccgtccggattctccctcgcctcttctggcgcggccgactgcgctgcgagtgaagaactccccgtttcctagatgccagctcctgagctcacgagcacgtccagagcggaggacactcgggacaccggggtccagctccggaaacggaaaattccacaagcccgtcactctaggaagcggcagcgaacgttctcggtaggtttaaccctcttcttcctctgaccgagcgagggctccccgtctgcggcgcggtcaggaccccgcactttcggcccggctcggggttctcggagtccgtcccaaggccgggccgcaccaccgctggggggcagcgaagcgagcctagaggagaaaaggcggtccccgccgagtgcacgccgggggcggggcacggcacgaaggctccgtggtcggacttctgggctgttcggaggccctggcccacctggagggccctggaagagtttccagcgcttcccgaggtaggcgtgagaagctcgacgcggaccacatctccctcatgcaccgcccgcacgtcccaggatgcgctgcgattaaggtactgccgcgcctcgtgtgcaaggacagacttccggggtcgagaactacaacttccgacttgcatcactgcggtggcgctaaacagcgtcagcgaggcggtgcccgacgatttccctgtcttccagttccgctccctgggatcagcggcgagaagcggggcggagtctgaggcccgagccaagatggcggctgcgaagccaaccctcacggactcgctctcgttctgcctcgcgcagctcgcggcggcggccggggaggctctgggtggggaaaaggacccagcgaccaacgagacacccctgagccgcgcgctcctagccctccgcacgcgccacatcaaggcagcggggggaatcgagc

SEQ ID NO: 15908 - DNA, 2300 bp, Homo sapien
ctttcttttcagctttttttttttttttttttgagtcggaatctcactctgtcaccaggctggagtgcagtggcacaatctctgctcactgcaacctctgcctcccgagttcaagtgattctcctgcctcagcctcccgagtagctgggattacaggtgcctgccaccacacccagctaatttttgtatttttagtagagacggggttttgccaagttaaccaggctggtctccaactccagacctcaggtgatccgcccgcctcggcctcccagagtgttgggattacaggcgtgaaccactgagcctggcctttaaaatattatcattattatttgagatggagtctcgctctgttgctcaggctggagtgcagtggcacgatctcagctcactgcagcctccacctgccaggttcaagggattcttccgcctcagcctcccaagtagctgggactacaggtgcccaccaccatgtctggctaatttttttgtgtgtttttagtagagactgttttcaccatgttagccaggctggtctcgaactcctgacctcaggggatccacccacctcggccttccaaagtgttaggattacaggtgtgagccactgctccttgcctaattacctgtcttttttgttattgccatcctaataggtatgatgtggcatctcattgtagttttgatttgcatttctctggggactaatgatgttgaggatcttttcatgtaatcattggctatttatataacttctttgaactgtctattcaggtcgtttgcccattttttcttctttttcttttttattcttgacacagggtctcctctgttgctcaggagttcagtggcacaatctcagctcactgcagcctctgcctccaggtttcaagcaattctcctgtctcagcctcccaagtagctggaattacaggctcccaccaccacgcacagctaattttgtgtttttagtagagatggggttttgtcatgttggccaggctggtctcgaactcctgacctcaagtgacctgcccgccttgacctcccaaagtgctaggattataggtgtgagccaccatgcctgtctcgcatttttaaaaagctccccaggttgttccgatttgctgctgggttgatactcacattccagtgctcagatctgtccagaagagtggctgcagcacagttgtctgtccataactacctctatggcctctcgtttccacctcgtttctcagggtctcagtccagggaaggccttgccactttgtggctggagactgtgtcttgctttctgctctgagttcatcagtaacttgggaaagggctgtttcagagcaggcctgggccacctcagtgctgaggaagggctttgtcttgcaggctggctgggggttggttgcctgggagtgttttccccgaatttgcaaggggcttgcgcccgggttcgagtttacgtgtgtccatgaccaagtcttggagggaaggtcctagtgtagagtctgtgggtgggttcactgtgtctgtccccgtccctcagatttctttgtgtctggtatgtatgcctcttggggcctctatttatctgtcagggtctccgatgggagggtctccgaacctgaggtctaattgagccttagaatatcactcctgctaccaatccaaaaattccgtctgggacaagtctcccaggaatggcatgggtgggagggaggctcttgtctaggactcaggcgctagctttgagcggtgtctgtttgggggcctcagtccgtgtctgtaagtctccctagggagcggctctggggcttggtctggagaagccacttctctctggctctggcctcctggggctccctgcagctgaggccaaggctggggtgtggccgcctccgcggcaggccggcgggctgggctcgggtgggccggggcgctccctcctttccacgcccccacctcgggttcccccgttcatcgcccccccatccccatctcagcgggtcccggcttccttacatggtcacggccgggcttccagctcccggacgtcccccgccccccgcccccaccggacacggcccccgccctgttcgccccgcgccaccggcccgcgccccgccatggaggacctgggtgagtggggccggatccccgggtccgtggcccctcaccgctgcccagagctgcctccccgccgtcgctctcccgcatctccccatccctgtcttcttacttctgcttttcgcctctgcccgcgcctcctttccaactccacgtcccccttcctgcctctc

SEQ ID NO: 15909 - DNA, 2300 bp, Homo sapien
cttgacctcccaaagtgctaggattataggtgtgagccaccatgcctgtctcgcatttttaaaaagctccccaggttgttccgatttgctgctgggttgatactcacattccagtgctcagatctgtccagaagagtggctgcagcacagttgtctgtccataactacctctatggcctctcgtttccacctcgtttctcagggtctcagtccagggaaggccttgccactttgtggctggagactgtgtcttgctttctgctctgagttcatcagtaacttgggaaagggctgtttcagagcaggcctgggccacctcagtgctgaggaagggctttgtcttgcaggctggctgggggttggttgcctgggagtgttttccccgaatttgcaaggggcttgcgcccgggttcgagtttacgtgtgtccatgaccaagtcttggagggaaggtcctagtgtagagtctgtgggtgggttcactgtgtctgtccccgtccctcagatttctttgtgtctggtatgtatgcctcttggggcctctatttatctgtcagggtctccgatgggagggtctccgaacctgaggtctaattgagccttagaatatcactcctgctaccaatccaaaaattccgtctgggacaagtctcccaggaatggcatgggtgggagggaggctcttgtctaggactcaggcgctagctttgagcggtgtctgtttgggggcctcagtccgtgtctgtaagtctccctagggagcggctctggggcttggtctggagaagccacttctctctggctctggcctcctggggctccctgcagctgaggccaaggctggggtgtggccgcctccgcggcaggccggcgggctgggctcgggtgggccggggcgctccctcctttccacgcccccacctcgggttcccccgttcatcgcccccccatccccatctcagcgggtcccggcttccttacatggtcacggccgggcttccagctcccggacgtcccccgccccccgcccccaccggacacggcccccgccctgttcgccccgcgccaccggcccgcgccccgccatggaggacctgggtgagtggggccggatccccgggtccgtggcccctcaccgctgcccagagctgcctccccgccgtcgctctcccgcatctccccatccctgtcttcttacttctgcttttcgcctctgcccgcgcctcctttccaactccacgtcccccttcctgcctctcccttcctgcctttcctgggccggccgctccctcccttcttccctcgctgtgctcctccatcccaggctgcggcagatggaacgggaggtgcggcgcccgcgggcgcccgggcgcggggctctggggagggaggggttaaaggggcctcggcccggggaccgggaaagtagagggcacgggaaagtctggcatcaagttttggagaaaaaaagcgggcctgcctgcaccagagttttgggagaggaggagttaagggctcctgagcacagtgagggtcaggtccttgaggcaaggaagagaatagtaactcaggagtgcctaggcgcccgcgaaggcttcagggtttcacgcgggtgctcagagacgaagactgagggcaggacttctgggttctggaagtgaaagggctcaaaagacccggatctggggatgcagggatggagagaggtgtcttgtccggaagggggacccaggtatctcgtcctccctgcgaagcctggggctggaaggctgtgcgctccacgggagagaggggcttccggcccctggcggtagagggcgctgctcggtaggggtaactgacgctgtaccgcagataaacagccaatcagaaggcaggtcccagcgaagcgccagtgaggagcccagggcgggactcaggggcctgggagtggccaggctgggcggggcctgtgtaggtagagggaggagttaaccagcatggaagagagagcgtccaatcagaaagctgagggccaggcactgggccaatggagcaatttggaggggagccaaatttggcttgggtgaagagcccattttgactgcatcagagaagatggggagaataaaataatcaggaggctgggtttgtgcttggctccaagcgtgagcaactgggatattctggtcataaatattccttgctacccttcgagcagtgctctgcctggctctggccctgtgacctcttctcttaatactggcttctgtccttctccagtactgcccactgggaaccttatcttctgatctaaccgtg

SEQ ID NO: 15910 - DNA, 2300 bp, Homo sapien
cctccttctgctctcctgaagccaccttgctagatgggaactgagacatgatttcatctggagagaggagaggaggacgctacatatagggccatgctcaacgcaccctcacacttgaggctttaggtccctttaactgctactctgggaagtgtattcctcttagtctctgccccacccttccctcccctgcccctatcgcatcaaggcctctctcagtcaccctggtacctgtgatgttgaactgagtggcattaagttcctgaagcaaccgatctagctcacagagcccggtacccaagacaccgctggaagaggagaatggaggggccgccggggctgcaggctttggggaccgaggcttgcataccgtgctgggaagcagagtgggagcctgggttcaggggtggggaatccaagcctcctcacctgagactcagttggcccccatgccctggtttccaggcccctcacctgtacaggtggtccttgtcccccgaggctcctgaagactccccagaccctgtctacagagcggagacgcacaggtgggatgacaggcctgcactctgccccactgaggctgagatccccatagaccaggccgagcctggccctagtggctgccccagtccccaacatccgatctcacctgtggctggtggccataggatgggggaggggtgagaggctccgcagggcgctctttgggagcccctgaccttggcatgtgcgaggtggtagtctccaggtcagagagcagggcatctgcaggaagaggccatcagggagagagacaagggtcacggttagatcagaagataaggttcccagtgggcagtactggagaaggacagaagccagtattaagagaagaggtcacagggccagagccaggcagagcactgctcgaagggtagcaaggaatatttatgaccagaatatcccagttgctcacgcttggagccaagcacaaacccagcctcctgattattttattctccccatcttctctgatgcagtcaaaatgggctcttcacccaagccaaatttggctcccctccaaattgctccattggcccagtgcctggccctcagctttctgattggacgctctctcttccatgctggttaactcctccctctacctacacaggccccgcccagcctggccactcccaggcccctgagtcccgccctgggctcctcactggcgcttcgctgggacctgccttctgattggctgtttatctgcggtacagcgtcagttacccctaccgagcagcgccctctaccgccaggggccggaagcccctctctcccgtggagcgcacagccttccagccccaggcttcgcagggaggacgagatacctgggtcccccttccggacaagacacctctctccatccctgcatccccagatccgggtcttttgagccctttcacttccagaacccagaagtcctgccctcagtcttcgtctctgagcacccgcgtgaaaccctgaagccttcgcgggcgcctaggcactcctgagttactattctcttccttgcctcaaggacctgaccctcactgtgctcaggagcccttaactcctcctctcccaaaactctggtgcaggcaggcccgctttttttctccaaaacttgatgccagactttcccgtgccctctactttcccggtccccgggccgaggcccctttaacccctccctccccagagccccgcgcccgggcgcccgcgggcgccgcacctcccgttccatctgccgcagcctgggatggaggagcacagcgagggaagaagggagggagcggccggcccaggaaaggcaggaagggagaggcaggaagggggacgtggagttggaaaggaggcgcgggcagaggcgaaaagcagaagtaagaagacagggatggggagatgcgggagagcgacggcggggaggcagctctgggcagcggtgaggggccacggacccggggatccggccccactcacccaggtcctccatggcggggcgcgggccggtggcgcggggcgaacagggcgggggccgtgtccggtgggggcggggggcgggggacgtccgggagctggaagcccggccgtgaccatgtaaggaagccgggacccgctgagatggggatgggggggcgatgaacgggggaacccgaggtgggggcgtggaaaggagggagcgccccggcccacccgagcccagcccgccggcctgccgcggaggcggccacaccccagccttggcctcagctgcagggagccccaggaggcca

SEQ ID NO: 15911 - DNA, 2300 bp, Homo sapien
agaaagaaggccactgtggctggactggagccagcaatggggaggccaaagaggaaggagatgtcacatcatgaaggcctttgacggccgtggtgaagggaccttatctgaaatgtctgtaacacacacgtgtcctctgacacttggcactggatttctctcaggcactttaaactcatcaccctctgaagcagacactgtgggtgccccacccatatacctgcatggcccaccttggaagtcatatactgtgacagtttccagataccctgacttgcagctccttctggagtttcttgtctgaggctgttcttgggaggagggagtgtgctccgtgttctcagcaggcctgaagtgtgtggacatttctgcagcttttagccagtgacagacacaaatcagggaatagataccccaaccacctggcccctcaaggaacattgctatggggtgttcttcacagtgtctcagagtgtcctttttgggatgaggctccaactgctctttgtggtaacctgacaaatgacacacccttacgccaggcgtggtggctcacacctgtaatcccagcacttcgggaggctgaggcagtttggctcaggattttgagaccagcctgggcaacacagtgaaaccccatctgtataaaaaatacaaaaattagccaagtgttgtggcgtgcccgtagttccagctatttgggaagctgaggtgggaggatcccttgagcccaggaggtcgaggctgcagtgagctgtgatcacaccactgtactccagctttggtgacacagcaagaccctgtctcaaaacaaagaaacacatgctttgttggtttttctccttgtttcatttctcttccctacaccatcacagtccatactggaatcacctcctcaggaaagtcgttgcacacaaattctcatctcagggtctccttttagaggaatacaagctaaggaactccttcatccaaactctgtcatattacactcaaagcatttttctctgttccccatctccgggatgaccatcgctgccataatcaggcaggactttccttcgactgtctcctgacatccaagtctggtcaattcttctagaaaggtagacatacagatattaaccagcctctcccttcttgaatccagtcctgtgctgagaaatgagactccagggatgaatcagatcagtcctgctctttttaatttttatttatttattttttaagagatgaggtctcactccgctgcccaggctggtttcaaactcctgagctcaagtgagcctcctgctgcagcctcccaaagtgctaggattacaggcatgagcccccacacccagccagtcctactcttgaggagacactagtttgttgggaagacagacctggacccaggcaagggccacacagtgtgctcagaactacatcagaaatgtcagagaagtctttcttgaagaggcgacacaggctgggtactgaaagctgagtaggagttggccatttgggagacagggaagtgctctaaacagaagacacagtttgtgcaaggatttggtggggataaaatatctggtcaaaaaaagcaaaaagcaaaaatctgggctgggtaggttaaaggagtgggaaaggatttctgatttcctctagatttggtttggagaagcagggggaaggatgagcgggaattggggcatgaccaggattggaaatcaggctgaagagcttgtactaagagctatggagggttcctgaggagggcgagtgaccctgtcagacttggatttgaaaatgattcctctggattagttaaatccaggggtgctagcttagctaaggaagcgatgcatttttagggagtaaaagagtgattttgagcctggagcacaggggagagggcggatgctaaggcccaggaaagagtgctcttgaacttggaagggcccagctccccaagaccagccttcagccttgatatgacctgattcagctaaacaaagctggggagcgggaatgagacctgggggacttgtcggctcagtgcccctgaggtaaccattaatccttcccctgggggaatccaggggctggttcctggatggggcagatcctggggagaatggaggagcacacagaggcaggctcggcaccagagatgggggcccagaaggccctgattgacaatcctgctgacatcctagtcattgctgcatatttcctgctggtcattggcgttggcttgtgggtgagaagttggggggtgtgctgctggtggctgctggctttgggggcctggggga

SEQ ID NO: 15912 - DNA, 2300 bp, Homo sapien
ggccctagaagggtggggctcaagtggggtctctagagaaccctagagggcgtgagacctaggagaaaccactgcgagggttatgatgatggaggcagagcctgcaatgaatgtctccggggcaccagctacagtgctgggacctggaaaaatggagggaagctttgaggctagtagggcatggcctgggcaggaggtgggctggggacactgccctgggtcctgacctggcacttgcttctcccccaaggtggacatgttctccggagctgtattcatccagcaggctctgggctggaacatctatgcctccgtcatcgcgcttctgggcatcaccatgatttacacggtgacaggtgccagcaggggcttaggaaagggagtgggcctgggacactgctgccagctgtggccagggtttagggagctgccagaggaaagcaagctggagaggtctggaagggtggtgtggtccaagcaggagaaggaactaaatctttggagagcaaaggcttcctctctttccactgtctcttggattttgactggaagttcagagagaaagccatgctgggcttgagtgaggactttgagaaaaggaagatttagcagctcttgcctgccttgaacacctgggagagcacacctgacgagtctccaagatctctggcaaaacccagtatggttcatagggacctggggtggggcctgaggtcagatgcggaccagagtaggcagggcttggtgccaaggcccgcttgagggacccacctccagaaggaacggaactgagtataggaccttagacaatcatcctctcctacgatgacgcagaaaaaactggggccggctgggagcggctcacgcctgtaatcccagcactttgggaggccaaggcgggcggatcacgcggtcaggagtttgagaccagcctggccaacatggtgaaaccccgtctctactaaagatacaaaaaattagctggacgtggtggcccgcccctgtaatcccagctactcgggaggctgaggcaggagaattgcttgaaccgggcaggcggaagttgcagtgagctgagatccaccattgcactccagcctgggcgacagggcaagactccatctcaaaaacaaaaacaaaaacaaacaaaactggggcctagagggggctgctagtgggggtcctgcaagtaggcgcctggccctaaaactcagccacactctgcccgccaagccctgcttgttggtgcctgcgtgcatgagccccgagaacaggctatcgttttgaaatttattctccaggaaggggaactctttcaaattcccacaaagacgccttattgctaaggccagcctgtaacataaacagctgggctgtcccctgaccccggcctgttgcaggagggctggccgcgctgatgtacacggacacggtacagaccttcgtcattctggggggcgcctgcatcctcatgggttacggtaggggctcgcctaccagggaggggcgcggagggcatggtcgcggagctctcggcctgcgcgcggggccgttgcgcgtctccggtctgagggtcctaaggagggtcccctgacggccttgcccggcagccttccacgaggtgggcgggtattcgggtctcttcgacaaatacctgggagcagcgacttcgctgacggtgtccgaggatccagccgtgggaaacatctccagcttctgctatcgaccccggcccgactcctaccacctgctccggcaccccgtgaccggggatctgccgtggcccgcgctgctcctcggactcacaatcgtctcgggctggtactggtgcagcgaccaggtgcgggtatagggctgcgcctgcagtgaggccggggcggagccgagacgggcggagcctgagtccctccccgccttccccacaacggtctaaggcgcagtctgaggggcgggaacccctcgggttggtgctaaaccagacagaaggctccatctactccaagcgtgcagctgaacttggggcactcacgagccagaggcggggcacagagcggaacggggcgcggggcggggccgaggggaggcccgcaagcgggcagctgaacgcccctcccgtaggtcatcgtgcagcgctgcctggccgggaagagcctgacccacatcaaggcgggctgcatcctgtgtgggtacctgaagctgacgcccatgtttctcatggtcatgccaggcatgatcagccgcattctgtacccaggtaacatccctgccccgcccctttcctgtgccagcaaccgggcgcc

SEQ ID NO: 15913 - DNA, 2300 bp, Homo sapien
aaggcccagggaagtcccagaagtgtgagatggttttctttgacactgaagcaatttagaaactgctgttctgtgcattcctactttctggccttctcttccattgtttggctcaataatcttaacccaagctaatatttattaagcactaaccatgtgccaagtattttggttctgggaactctttaaattctcacagtgggcatgtgcagtaaatgctcatggttgccttagtacagatgaagaaataaagcatggagaggtcccatctccctgggggcccctggggaagtcccttctctcaggatgctcgggcttattccacccattgtctcttctgaacctaagtccacaggctgttaaggagcaagcaggaagcacagcacaggtccctcaccgcaggactcccagctccatgcctggtgtccctctcctgttctctcgctggtccccagacctccccctaaccccaagccatttttcccaagaccccagggcttcctcggtccacagagccagggacatatccgggactaacctgggaatgtgtcagtcccgcagcagactccagctttctgccagtgcagctttgctgtcactggatgtggccactggaaatgactcttcccacctgggagagaggagctcctgaactccccaggtccctgatccccagtttcctgccacacccacagcgtttattcccacagcatatgcccttcccaggagggctggttgagaagagctctccagtctcgggtcctctctatgccaggaccagctctccctgggagcccagtagtcaggggcaccaatccagactcctccctcatgatgagttgggggcaggtagcctggggtcccttcccctagagtgatctcaatccagccatcagagtgttctcctaacattgatacacaagggaagaggtgtgggtcttgttccttttcttcccgggtggttccttgacccctttgcaaatctatctgccagttactgcataccaaaggagcttggtgggaggggagcagtcaactttttaaaatcagtaaataaaagttattccagctcatgcctgttatcccagcactttgggaagctgaggtggggattgcttgagcccaggagttcaagatcagcctgggcaatatagcaagacccatctttaccaaaaaatgcagtaataattagcagaggcgtggtggtaggatcacttgagctcaggagtttgaggtggctgtgagttatgattgcaccactgcactccagcctgggtgacagagcgagaccctcgctctttaaaaaaaaaaaaaagtacacattagtgagtgcctgagtgtgggtctgttctggtgacttgcaagacaagatgtgttcaagggtattccgagggcacctacctgggcaaaaaagcaactgatacacatatgtatttagacagggtatcactgtgtctcccaggctggagtacagtggtgcaatcatggcttaatttttttttttttcttttttggagacagtcttgctctgttgcccaggctggagtgaagtggcgtgatctcagctcactgcaacctccacctcccaggctcaagcagttcagcctcctgagtagctgggagtagaggcacgcgccaccatacctggctagttttttgtatttttacaaaaatgcaatgggtctcaccgtgttgccgaagctggtcttgaactcctgagctcagggaatctgcccacctcggcctcccagattgctaggattacaggcgcgagccactatgccccaccaaatttttaatttttttgtagaaatagggtcccactatgttgcccaagctggtctcaagctcctggactcaagtgatctgcccacctcagcctcccaaagtgctggtactacaggtgtgagccacctcgagctggcatcttttaaatgacatttcacccaccaaaaactaaaaatttacccacattgcagtaaggagccctgggaggttgtggagcagggaggatgaggtgaaaggcactcgggcactcagtctggcctggaggggcaccttccaactccttctccctctgccattttccaggagacgctggtgaacctggcggggctcttggtcagcctcctgatgctccctctggtgtcaggttgccctgggtaagccggaagcagggtgggcaggagaaccccagctgggcctctgcccacttcagctacctcactctctcaccccagcttcagccttggatgtttcttcttcctcactgccctccacatctacgccaactaccgcgc

SEQ ID NO: 15914 - DNA, 2300 bp, Homo sapien
tttgtagagatggggtcttgctgtgttgcccaggctggtcttgaactcctggcctcaagcagtccctgggcccaaaccccctgtaatcccaaagtgctgggattataggcctgagccaccatacccagcctaaatccttttatttatttatcccataatagccatctgtgagccaactgcccagcctaagagctagaacaggttagcaataacctttgaatttccacttaagatttcctgcttttttgaatagttttaccaaataggtaaatattcctaagtgctatattgtttagttttaattttagagctttgcaaactgtgctgtatgtggtcttcatgagttattttcatgcaagagtttaatagtattcatctatgaatgaatgcctctgggtgaatatactagaatttatgtattctgtcagtcaacatttgcattattcccaggttttttgctgttatgaacaattctgcaaagaacatttcttgtccatgtctcctaggggacatattgaggaactgctatttgtaggcacttctgaccccattatgtagctatgactatccacaacttctagtaccagaccgagttcccaaaggcagtgactcagtgaattggccagttcagtgccagggtctgccaggccccacagctcccacacctcttccttgctccttacctgtgccttctttcccccagattcaactggcatgctgggccgcatcgtctttgcctggtggaaagggtgagtttgtcttcccggccagcaactctggcaactcttcccagtagtggtagtaatgatagtaatagtattgccattaattgtggctgtaagggttccatgagatgatctatgcaaagtgcttaatgcccgtggcatcgtacataatggctcagtaaacactagctaccattaacagctgtaactgtgccccctgagcctctgtatgttgtctctaatccttacagcaactctgtaggatgggattggatgtgtacatttcataaatgtgaaatatacctgcatgagggaagttacctgcccaaaccacacagcttataactagcgagatgggatttgaacctgaagcctgtgctttccatggtattgggcagttcactgggcagaaccctcaaccaggccatgtgttcaggatctcgttatgtgtgtctgatacctctcccaagaatattcccattccctccaggagatctcatactgagactcgggcctaatgctgcaaatcctgagctgggctggggctgcagtatctcctgccactgggaccctagagaagttgtttccaagtgtttgtgcacagggcagggagtcactgtctgacgaaaagggcaggtgaggtagccgtccacggtgttgtgtaacagaagtaccctaggcctggatgtcggagcccggctctcttagccttttccccaactctgcgtgtgatccagggaaatcatatcccctgtgagggctagttgtctgtaacatgcagggttacacactcaatgtgatgtttactagtccaaaacatgctcactgggtaccctcactctaaagcaagaagaagaacggagagaggcagaggaactcaggaagagcctccctccaaggacagacagaggctggggagcagccacaagacaatcagggtttttccttggtaaatcatgagttcataagcgggagacactaggtgatcagtcagtcactgaaggttctcccagctaatggtggcattttaggtagcagtgaccggctgtggggacagatgtctgtctgggggtgtgggttttcctgagctcttcagactttactgtggtccaagactccccacactgcccataggatgtgtttctccttaagtccaaattacaacaacctctcctccccaacaggagcaaactggactgcaatgccaagcagtggaggtgaggaggggcggggacgggggaggggagtcttccattatgaaagtctcctacctctgacctctaacctctgatccctccccaggctttttgcggacatcctcaatgacgtagccatgttccttgagattatggctcctgtatacccaatctgtttcaccatgaccgtctccaccagcaacctagccaaggtagctgcctgtgggggcacccatctgcctaaaacacctgccttggtagtgtgtgagtttacctgggctctgtgagtttacctgccacttcaagaagaataagaaagttcagatgtttctactcgaacccaaccatcctttctgaccctcctccagccagacagcat

SEQ ID NO: 15915 - DNA, 2300 bp, Homo sapien
gcaacacagagagaccccaacttaaatttttgttaaaaaatttcccttggccgggcacagtggctcatgcctgtaatcccagcactttgggaggcgaggcaagcagatgagttgaggccaggagttcaagaccagcctggccaacatggcaaaaccccgtctctactaaaaatacaaaaattagctgggtgtggtggtgaatgcttgtaaccccagctactccggagggtgaggcaggtgaatcacttgaacccaggaggtggaggttgcagtaagccaagactgtgccactgcactccagcctgggtgacagagggagactccatctcaaaaaaaaaagtttcccttgattccactgattagctcaattctccttctaaaagtcctcatattaaataacatgtacccctctacagcaattgaaatagttccaactttgcatttatttgtatgatttgatcaatatccttccctaatataagttccaaaagaccaagacccttgtttgtttttgctcactatcccaatgagcacataggtagcaacaggtatttgtagaagaaactggcaaaccattggtaaaaaagagataacaaacacggagttaatgacaactgcacggttcaagcgattttcttgcctccgcctcccggatagctgggattatggccacaccacccccacgcccagctaatttttgtatttttagtagagatggggtttcaacatgttggccaggctggtcttaaactcctgacctcaagtgatccacctggctcgacttcccaaagtgctggaattacaggcgtgagccaccacgcccagcccaaggatcacttttgaggccaggagtttgagagcagcctgggcaacatagggaggccctgcctctatttaaataaatatgtttttaaagtacttagtcttcaaaccttgttttatttttgtcctctattcaaaccagtacctgaatttagacaacattacagaaatgttgtgattaggccatttgtattttgaaacccgaaatttaaagaaaaaaaaaaagaaaagaaaagaagtgttcaagtttatctcagtcagagagagactgtgtttgtgtgagataaggcgaagtggggtagaagggccttccaggattaagtccacgaggaaggtgacggtttgggagaatctgaagtttcaaataaggagttgtcggttgggatcaaactgtggggatccaagaatgccaggctaagaaaccaggatattttattttctgataaaaagaggatgcttttttggcaaatttctgcttcggagtgaagatgctgcactagatgggaaggagaagaggagaaatggaaagaagaaaaggtgagttccaaggacagaaacactccctctttggactccccccaatttcatggactctctcccgcaaaaaaacacacaagaacttcctgccttgtttccttgttttgtgacatcattgcaatctcttgatttttttcatccctcggattccttagcatccttcaaaagtaatgttcctgcagtctcgcagaaggccgaaggatggagaatttctagtccaggccagggacactcagaagagagaaaaaaaaaagaacaaaaaaagacccaagcagcttcacagggcctcatctggtccaatttcttctcatgatgcattcattcactcataaatatcttttgagcacctactatgtgttgggtagatctagggataaaatcagggttaaaaatacagtcgctggtctcacagcaaaaaaggcacctgaggcccagagagggccactgacttgccaaaagtcacaagctaaaacttctgtggccgaaccgcgtctcgaacacaactggcggaggcccacggcgcctgcagcccagctgcagaatgctacaaagcaacgggggccggtgccggggcgtccgaagcagcgccgaggccggagagagcgacagtcagtttcctaactgcgcggcggacgccgaggccggcgcctgttcttgaaagatgtccctctgcagccgcggtagcccagccggaagtgccgcctgccacgtccaccgtgcggcaggggcggggctgggatccaaaagctcggcatggctgacgacgcgggtttggagaccccgctgtgttccgagcagttcggctccggggaggcacggggctgccgcgccgccgcggacgggagcctgcagtgggaggtcgggggctggcgctggtgggggctctccagggccttcacggtcaaacctgaaggacgagatgcgggcgaagtgggggcttc

SEQ ID NO: 15916 - DNA, 2300 bp, Homo sapien
tgtaagataataaatttatttatttatttatttatttagagacaaggtctcactctgtcacccaggctggagtgcagtggcgtgatcttcgctcactgcggcctcttcctcctgggttcaagcgattctcctgcctcagcctcccaagtagctgggattacaggtgcatgccaccatgtctggctaatttttgtatttttagtagagagggggtttcgccatgttagccaggatggtctcgaactcctgacctcaagtgatctgcctgccttgacctcccaaagtgctgggatcacagatgggagccaccgtgcctggccggtaacacatactttccaccctatataaatgaaaacatgttcacatggaaacctgtacacaaatgtttatagcaactctattcacacttgccccaaagtacaaacaatccagatgtccttccgtggctgaatgaacaaactacagtgcatccatacaatgcaatgtgtccactgacacttgtgacaacttggatggagctcaagaacatcatgctgaccaaaaaaagtcagtctcaaaggttacatactgtatgattccatttatatgacatcctgaaaaaggcttaactgtagtgatgaacagataagtggttgccagaagttatgggtgagggtaggggtggctacaaaagggtaacgtgaaggagtggtttttgggtgacagaaacattctgtatcttaactgcgtttgtagttacacaaatctgttataaaattaataaactaggccagatgcggtagctcacacctgtaatcccagcactttgggaggccaaggtgggtcgatcacttgaggtcaggagttcgagactagcctggccaacatggtgaaaccccatctctactaaaatacaaaaattagctaggcgtggtgatgcacgcctgtaatcccagctacttgggaggctgaggcaggagaatcgcctgaacctgggaggtaaagtttgcagtgagctgagatcgcatcactgcactccagcctgggccacagagggagactccctctcaaaaaaaaaaaatttaatatactgtacaccaaaaggaagtcagttttgctgtatattgattaaaaaatgctacaaccaaaaaggcaaatcaacaaagctttatgagtgtataggcacctatgaatgttgggttttgaatggaaaaaaaaagtgacaggaaatatacaatgtttaatgctggttactttggagggggcaaaaatgattcagtttttcagtgtacgtttttgtattgttttaattatttcaattagtatatagtgattttgaaatttgagaaacatctactgaaaatggaaaatatctggaaaaatatttaaaaagaggaaaaagagtatttctgctttattgggtacctgttgacagggtagtaaacaagacaaatccatctccattcttttttttcttttgagatggagtctcgccctgtcacccaggctggagtgctgtggtgtgatcttggctcactgcaacctctgcctcctgggttcaagcgattttcgtgcctcagcctcccaagtagctgagactacaggtgcccgccaccacgcccggctatttatctccattcttatggagcacagcgtggtggagttcagtccacacgcttacaggtggcttatctgcaaaatgtgtctaaaaagaaattttataggataaatattttgtacatgtttgaaacagtgcttggcacaaatgaataaatgtaatgcaagctgctattaatacatcatctccgaattgggagaatcattgcgatcacatcgttgtgattacacaaaagcctctgtcatgtaatagggctcagtaaacgtcaatttccatagcatttcgagcctggatactgaaatatggggcaaaaagcaggaacatgcccctggtttggctcttgccttcttgcatttcctgggtttcctcatttatcttttttttttttttttttggccttgttatctttctaccttcagggaagcctctcccttcttctcctccctagaatgacctatcaccctccttcaggacctagatgcagggcgtttctatcttaggctgacacttgactccttgcctacatctatagcttggcacagagagattcacgcaccctcaagagtgtgggtgagacatatacagcctgttagacctgaaggtgagcccaacctgggaaaatcgtgacctcagagcagggcaggatgtgaaaggttttggaaaggagatagccctgcagggcaggagggatttttaaggggag

SEQ ID NO: 15917 - DNA, 2300 bp, Homo sapien
atacaacaaacttccttccttctaaatgcaaccattcttggctttgtgttcacctaagcactgcaaactcaactggctttagtcatgctattatatttaagttcacatatcaattgagaaaaaaagggacctcaagtttttgattcaactatcatggtgttctcaacttggtataattttttatattagatttataaagtattttcacctgaatttagtaattggaatttttaaaacttttggtatctttcagatatgttttctcatgatactccagtcctcttgagaaagaagcacatagaagcatcattccaaaaagtgatattggatggatatgggagctatggctctcagaatttacacttaaggaaagagtgggaaagtgagggtaagtgtgacagtcacaacggatgttgtgatggacatacaaaatgtagcacaactacctataacaaaaacatcactgctacaagaggtcaaaaacatgaaaaaactcaatctatgtcagttactttttctaatccatgtgtttctgtaactaaatatcgacatcaattttgaaacataccttttctttgaaaggaaatttggaaaatctgaatagtgacttagtccatgtttcaaataatcatataagccaattaaaacatagaactggagtaaatgttcagtcaaatatttctgaaaaggagagatttaaaaatgaagaggtgatttctaaatatgatcaatttgatgggtcctttgttaaaagtttgtttcaccaacaaataacacctcgttctgcttgtgatcaatatagaaaggtcttcattcattcatcattgattaatcaatgtcagggaatagataatttgggaaaacatcacacatatgataaaattttgacagcctttaggcaggactataccctaaataattagcagtatatttgtgttgcagagaaaaatcagtacaataaatctgatacaacattaagacaaggcataagccccagaagacatcagaaaactcattttctacagaaacattacaaatgtaaaaaatgtgagaaagtctcacataaatgcaccaaccatgtccatcagagtatccatagtcaagagaaggctgccaaatgtaacaattgtgtagaaacttttatccagtcatcaaaacatactcagcctcagagaatccatattggagaaaagtcacacagatgtaataacggtgagaaaatccttagtaaattgtcaagtctaagaaaacataaaataatccataatgaagagaaaccttacaaatgtaaagaatatgaaaaagcctttaaccatcgttcacaccttactcaacatcaaataattcatactggagagaaaccatacaaatgtaaagaatgtggcaaagccttcaattctagttcatattttactagacatcagagaattcacactggagaaaaactttacaaatgtaaagtgggtagcaaatgttttacttattcttcaaatcttcttgtgcatcagagaattcatactggagagaaaccttacaaatgtaaagaatgtggtaaatcatttaaaatgtcttcagcccttactcagcacgagagaattcatgctggagagaaaccctacaaatgtaaggaatgcagcaaagcctttaactgtaggtcatacctaactaaacatcggagaattcataccggagaaaaactttacaaatgtaaatcacatagcaaatctttttctcattcctcaagtcttattgtccaccagagaattcatactggagaaaaaccctataaatgcaaagaatgtggcaaagccttttatcgtaattcacgccttactcgacatcgaagtagtcataccggagagaaaccctacaaacgtaaggaatgcagcaaagcctttaactgtaggtcatacctaactaaacatcagagaattcatactagagaaaaactttacaaatgtaaatcatgtggtaaatctttttcctgttcctcaagtctttttgtccaccagagaattcatactggagaaaaaccctataaatgcaaagaatgtggcaaagcctttatttatagttcatgccttactcgacattgaataattcatactggagagaaaccctacaaatgtaaagaatgtggcaagttatttaatcgatgctcgaccctttctcaacgtaagagaattcatactagagaatctctatagttgtggtaaatgtggaaagagttttatccaaaatttagaacttaaaaatcaccatagagtttatagggaaacagactttacagactgaataaa

SEQ ID NO: 15918 - DNA, 2300 bp, Homo sapien
ttcccaagttaatctaaatgtttgcaagacatttcagaagcattctctggtggggattactcctaattgtgaataatcctactagaaggatgagcatctcaaaagaacctttattctattgcagaagagtcagtcttcaggatctcaaaggcctagggaagctgcttgagttgtgaggtctatggaggtacatgggctttggagtcaggcaaagttgatccagagtcccagtccagccacttagtagctgtagtgctttggacatgttccttgacttggaacagttatataaaccttgctgtaagaaaaggcagaatgatactgactgcaaaatggctctggtgtccatgccctttggaatatgcttttacagctgctccaacatagaggcagaatctgtttcctgacgcttggatctgggctggccttatttgctctgggcaatagaaagctatcaatatggcaatgtgacagtttggggtctagggacataaggccttgaatgcttctgctttttcttttagaaccctgccatctccatgagaacaagcacatgttagcctgctggaggatgagatcccactggggaggaaaaccaaggtgccccagctgacacccagaagcagagccacttagtcaaccagcagctgaccacacacgcctgaaggagcccagctgagaccagaagaatggcccagttgagtccagcctaaatgactgaccatcccaatcatgagctaataaggtttagggtggtttttaatgcagcaatagctaactgatacatacacctgcagtcaggttgccaggattcaaatgacaggttggtcactacttgttgttacctggcaaacagaaggcactgtataaggtattgatttgcttttccctttatttaaagtggggcctcttgttggatagggataaattatacagaaatgcatgttgacatgcttggtgcttaaactcacacagtccccacaccataggaggaaacagcccgccatagcctaaccatcagggccaagggcaaattgcaaaataaaaaaaatttgcttttattccctccacatccaaactttggaggtcaaggctgtagacagatctgaagtcaggggtttcctcctgaagcctgacactcttcattcactgtctgacctttggaaggctgagggagccctgcccagaagcaggtgggcagcagtggtcgacctgtggacacctcctgactgcagccctggctctctcactgggcactgcctctcccacccttgggcatgaggaaagagatgggcaggatgagggtgttcgctctcgtctggcaggaaagggggtccaggccctcgatttccctgaggttagacgcgcaagtgccctcagatctgctcttcaatgcggaagccactgcccacgtggggctgctgagctctttggatagagctggttggaactgagatgtgctagaagtttaaatacagagtgactttacaagatttagtaccccaaacttaagaagcattctctggtggtcttcattaataatttcatattgctcacatatttgagtgataatattttggatatatcgggttaaggtattaccatcaattttacctgttttcctttcatgatgccactaggctactgtaaatgacacatgcggctcaattttattcctattggacatttctgacttagaggactccctccattttcaaatctcatgctgcctccacaagggaccagaggccatgaaggttatgaaatctgaaattttaaaagaatcgttattatataattttcaattttacatattacctatattactcataaattgatataatcttatgagcaaagttaaataccaatgtccggagcagccccaggtcccagcacagggagtcagccctgcctgaaaagggctgcagacaatcattcattcaggcctcattcagccacacctgtgatcgcatctcctgtcactcgggggtaagggggcgggacctggagccctatccattcagcggcgccgttgtcgagcctgtccaatcaggcgcgcagccgaaaaagggggcgcacttcctgtgttctgggctggccttttcctctcccaggtgcgcttccctgcttgatctgtgtaccctgctctttctccttcattccgcagcctcctttgccctgtgacctgcaggtactggacggtccctagagaggataccgggacgctcctgaagccgcgagatggtgagtctgcggggctgagcttcccgagacgcggcaggggtcggctgggaaccggg

SEQ ID NO: 15919 - DNA, 2300 bp, Homo sapien
tcacaatttctcccttcctccaaaacaatgaccattaaaatcccatgaaactcaatgggggcgttaaatttggcagccctagaaagttgtcaggccacccctgcatgaaggctgccccaggagagcagggtgaggctgcagaggcctagcgcacaaaaagcaggaggccttttgtgggctccccaaggcctgtgtgtgcttcagaagcaactggcaggaggttctttgcaatcaaggattcttgcccttagcaagccagggtgtgttgtgtgtgtgtttgtgtgtgtgtgtaggtgcgcacgtgcacacgtgtgtattgaaaccaaactctagcttatgtgtccatagtggaatttgaaaatggaagcctaaagttgaaaattaaaattatccatgaagtttccttgccaactatttactaagctgggtgggttgttccagggtgcagggccctggtaacaccctcctctctcctgttcctgacagagccctgcacaatgcacaaggcccacggtgatgagtgccacatttgagactgctcaggagcctggacccagctgatgcagctccttgtccttcctgagcgtcttcactgacagtggcctgagaggtgtggaggcattggggccagagattgggcagggggcagaggggcagggaacaaggaggccagaggctgacgaagggggcttaaggccaggcctttctacctggaggggcctgggcctgaggaacccagaccagggccacagttagaggcagctggccctgggtgcttgtgtgctgaccaccagccttgggtctcacagacggcaggagcagaaagacttggagatggaccccaccgactgcacaccacccaagtacatcctgctagggaccctggaacagccactgtgtcccctgcaaccccagaacggtgactaaaaggtgggactccagggaggagcaaggaagagggtccccgggtgggtggagggccacacaccaggaggcctggcccattcatgcttggccattcctgcagcccctgaaagtgctcaccgtgagcggctggtacctgtcccctgggaactgcaagatgcacaggaccttgtgtacctgtttgtgatcacagccgaggaccagcgaggtagcattaccacatccacacagggcttttaccataactggtgagtccctgccagcctaccaggggcacccactcagggaccaccctcttcttgtaggtctccagcctgtcacttcaaccccaagcccaccagcccccgcttcctaagcaattcgcaggggagctgctctgccagatctgactgccttttacagaacattgtgccctgcgtcaggggaaggggagtgcctttgccccgtctgctcctgccccgcttcatgtcacacaggggtctgggatgatttggctagcccaaactcagtgcttctgcccaaagaaattgtccccgggcccccagtgcccaagtctccctctagggagctgtgaaccagctctggctagagcagccgtgaagcagcgcccatgtgcttctgactcgcctttcagggcagcatctcagggccaggagaacccagagcaggtgagggcctcgatgaagaaggagcctgtggcagcgtcctgagattggtgggtggccccatctgcctttcccctgcctgccttgaggtccagtaccacccattcgagagggggccacctcattccaggtgtgcagctggatggcccctgtgacggagtacactgtggactgcagtgtggagaggcatctgcacctcaaggctgggctgtgaggagcacattcctgcataggggcctgtagcctggcccggtcctcagtgggaacccccttccttcctgggtgccaggtggggttctgtgcacttccctgaggctccccacaggtctgttcattggggagtctggggctgtctgtggggagagaggagaagggacttcccagagcaggttgcagtgcacaggctgagcccatgtctccctccctggtccctctgcagccccagtactggaacgaggagctgcagatgatgagggacctacccaacaagaaccaacctgagcagctgcttcaagaaaaagccatgttcaaggtgcctgaatcccctggtaagtgagtgacagcctcacagcctcaggcccacctggctcctgctggaaggttttcttgtgctcgggagagaagtgagggaagccggcagtcccagccctgtcaggtgccctgaaggcccgtcaggtttgccctgcaaggccttctagcattctgcttcct

SEQ ID NO: 15920 - DNA, 2300 bp, Homo sapien
cagctcatttgcgtggttgacgttatggctgctggttttactgccacaactcccaggcccaacctggcttaatgtctaagttttaagccaaaaaagatggggagcagagctttgtggcagggctgggggttggggtccactttagttttgtggcaggatgaaggctgcagtggttttattaatcatgattggcctggccgtagctccaggctgagagggacaggtttgtcagtggtggtcccccagatgtccctgtgcccagccctggcctgtctgccctcaggcccagcaggaggcgctaccacaggctctgactggcgtccctactccctgtaccccagatggacagaaccttcgggtctacagtcggaatatatcattctccccattttaacctgagctgcctgacacacggagggtgtgctgggtaaggggcctagggagccagggttgaatcatggatcctggggaaaggttgcagacacaggaagggttgtcacctctctgtggagccctgctgcttaccacacagcaccttctgcagagactagctctgagggtggcaggggaccccacaggccatggccactccctctctgcacctgtccgtgcctgctgtggaagcctggactgggggaggagattgctaccctgtgagcctgagggagccacgtccagctgtgacctctacctggggctttacagagagttgtttatgggtaacagacaccttgtttcagagggaatgggcatgagctggcaagtgaagcacccccacagcttatcaggaactttttctcatttttaaaccatcatgtcttcatttcacattggaataaagtgaggttttggaacctgctgccccagtctctggattgtgagggctgttgtcaaacaggttactaggagaggaatatgtataaattagctcaaattcaaggttatgcttgtaatgtcacctgagtgggaagtaagagggtggagtcacaggcactcagctgggatttacctggcctcgtcactagactaatgggattgtggcacaggtgaacatcccgtcattggagaagaaaggctggattgaaggccaggtgggggaggggtgctaggctgtggggtcaggccctgggcatgctggacctgttaggtcactgaacatctgactgggcacctgcccagatttgtcccttcagttgaggtgggattggcagcactccccagaaggcgtgcagtgccgggagagtggaggagggtctgacgtttgctatcctgtggtaggttttagagctaactagatgcttgtggagagctaatgacatgggaagaaggcagcccaccttgatggaccggagggttagagcctgcgatgtgagaagcgggtgtgtggaggtggcctgtctacaagagggcaagtttaaggcccattgcagtggcactatctcagctcactgcagctggtggctgccaggccatccctctccagagcagggaggccctcagccttatgtataattgaatgccttttgggatgcttggatagtcctttatgtcttggaaattcagaaaagaaaaaaaaaattacaatcctcctgtctgttagtttccctgagccaactggataaaagatgtccctgaccccaagattttaagtgacacccaagggaagccaccgttaccttggctgttgaagcctcctgcatgctccccaaaaaccccagcagtttcctctgcagtcccacagttatgtcctgagcagtggggtaccgtgtgatgagaggtgctaaggatgggatgagggtctttcctgtgttattagaacggttaaaaagttgttttaaaggtgcccaaatgccctccttcttaaacttaattagctaataagatgccttatacaagcaaaaccaggtacgggaaagcaagtgcatttcaagtccaagctcaccccttaaattagctgtaataccctcagcaggtggccccacctcaatgagcctgtctcccattcaaaaagcagaacgagtgagagggcggggcctggagctttacccaatcagtggcgtcggagtggaaatcctccaatcgggagtagccggagagcaggggcggcttccgggatttggcggtggcctttgttggctgcagtaagagctcagtctcttcaccaggggctcccagtccttccatctgggaggccaaggcggcttcgcgttctgagaatagacagaacctctgttactctgtgaccggcaggcaccgggagatccgtagctcagacgccaggacatcccggaagctgggaa

SEQ ID NO: 15921 - DNA, 2300 bp, Homo sapien
caaaatcctcatgcttgtcattgtcggtttttgatggaagaagccaaaaatctgtttttaagttttttttttttaatttaagacggattcttgcactgtcacccaggctggaatgcaatgttgcagtctcagctcactgcaacctctgcctcccaagttcaagcaattctcctgcctcagactgctgaatagctgggattacaggcgcctgccaccacgcccggctaattttttgtatttctagtagagatggggtttcgccatgttggtcaagatggtcttgaagccctgatctcaggtgatccaccagcctcggcctcccaaattgtggggattacaggcctgagccaccgtgcctggcccccaaaatctgtttttgttgatccttcttgtctaagatctccttacctgttaagtgggaagaatgcattttttaaaaaagtttcctagaataatttggaaattaatccgctagctgttctatcaattccacaagaatcagaaagatttctaggatgaatggaagcatttctacaattccttcatgcctgtgataatgtataagatgtagctgattaaattatcttattcttctcaaaagtattaaacatagggctttaacctactctggacatataaagtacctaatggagaccgtgatgtgtggtgacaggaaacatctggtctctgagaatgacgaaaagaccatattctttcatgaagtcaggggaggagcggtcaaggaaaggtatcttgatgaccttaggttttcatattagaacaaaaatcaaggacttcagtcgttttctgaagtaaattatttggtaatatttactctgtcttcaaaaatgttctgaagccattcttaggctcaatactcatcttagtaacacttaattcagtgaataattttccctacctcgagttttccttttacataacagacttatattttaatatacctaacaattctgacattgaaataattttttttttgagatggagtctttctctgtcacccatgctggagtacagtggtgggatctcagctcactgcagcctccgcctccggggttcaagcaattctcctgcctcagcctcccaagtagctgggaccacaggtgcatgcaccaccatgcccagctaatttttgtatttttagtagagatggagtttcatcatgttggccaggctggtctcgaactcctgacctcaaatgatttgcccaccttggcctcccaaagtgctgggattatagatgagagccatggtgcccagcctgaaataatttcatttgatatttttgtattcataaacaaatactaaatttatctgtaattcatgacaacctgtttctcctttgcactgttttatctcctactcatgtcccttgaccccttgcttagcaacagtcatttctgtatccttcttggttaagatgagaaagaatcttcttttttaatttcagcatgaaatcatttaagcattcaataaatatcatttggtcttgtatgattattcttttaggattatactaaatcagtgcatctatattctacttggatttctgaatcattataggtgatatttgctcatgaaataagcacttagatttaaatgagaaattgccacaatcaaaaatgaagaaaaaactacatccaggtttaaagaaagcgacaatatatacaacatgaaatgtgtgaagcattaaaaaaatactatgtccaagggtgagacacacagtgattaaacacattgtccaattttgattctgcctcttacaaagcagttactttagaaaattcattaagcttccttgtgtaagatcttcttacctgtaaaatggaaatagtaaagcacttataccacagaattattgtaaaagttacatgcaaaacactaatatagtactcctctcatggggatgcatatgttcttctttttagagcaaaactcttatttaaaaaacagggtctaataagaaaatgtctaagttggaaacaatggtaagtgtacaatagtggattttatttgcaaaagtgaaactttatgtttccacacagggttctctcactttgaatgtaattatcagtcactgaaaaatgacaaatggcctccaaggattttgcaataggcatgatcttattatctcagatcatggtcggattcctggggaatttctttcttctctaccactatagtttcctttgtttcaccagaggtatgttacagtccacagatctgattctcaagcacctgaccatagccaactccttggttatactctctaaaggaatccc

SEQ ID NO: 15922 - DNA, 2300 bp, Homo sapien
gtggcagaaaaaaatgtcttctcagcagatatacctttgtatctcttgctttcagagtaaaagattgtttcagtcacagtagtttgagttaatctgtattgaaaatcatcaacagcttacaaatactgaaaggggacaaaaataatttgcagacacattgagtccattataagtgctttcaaatctctcctataagaaatgaaaaatagaatgttaggccttgatttcttaaactcagccttcagccattttcccaaattattctacatgtttccaagacatttcagaagcattctctggtggggattatttccaattgtgaagagtactagaaggatgagaatcaaaaggaatctttcttctatcgcaaaagagtcaatctccaggatttcaaaggcctagggaagctgcttgagttgtgaggtccatggaggtgcatgggctttggagtcaggcagagttgatcctgagttccagcccagccccttagtaggccctaaggactcccgtggtgctgtcacaagcagtgctgcctttgggagcccctaacctcctgtcttttctcccttcagtgtgggaaaggggtttggtcagccagtggtgtcagcagccctgtcccacacccgttgtctacacctaatctggtggcagggaggccacagagtgcagcgactagaactgggtgagagggtgagaggcagccatgccccaggccaagacaagtgcatggaatcctgactgtcagcaatcagggatgtttctgctttggggagggaagcatttgttccacacgtctcactgaataaggcacagagcctgatctgtcccaagtgggagtttaaccaagctagatggcggccgagggccctggcccagtttgacacccacctcctctcccaccttctactcagccagaagactaggagaatctactcagccggaagactacgaggtgctgcagcgccactagctccaagactccagaaaaacaggaatagggcattctggcaggtcaaagcagacagaatacttgagctcaggagttggcgaactgactattaacctgtagccccagttacttgggaggctaaggtgggaggatcgcttgagctcaggagatggagaccagcctgggcaacatggtgaaacctcatctctacaaaaaatacaaaaatcagccgggcatggtggcatgtgcctgtagtcccagctactcaggaggctgaggtgggaagattgcttgagccccggaggctgcagtgagccatgactgcaccactgcaccagcctgggcaatagagtgagaccctgtctcaaaacaaaagcaaaaaccagaggtagggctgaggagtccgtggccacagagcctgagccagcacggcccagaggaactgagctcccagccctgtcgctgccaaggacccttcttccctgagcttgaagggattgagaaggagagacagacggacagtcagcggccccgttaccagtgatgcagactccaggagatgcgggcagagttgtagattagaagaataggccagcccctcttccacgttccaccacggcccgcaacatcctcctgggaccccagcctgcatgcccctataagatgcttttgcactggttcagtctatgtatcatgcgagggcctaattgaaaacacgtgaatgaagtgtacggccttctgttcccagctgaggggccccctcccacggtggcgttagcagtggggtacagtgcggtaagagaggtgctaagggacgggatgagggtctttcttgctttaaaggtgtctaaatatacttcttcttaaacttaattagctaataagatgtcttatacaagcagaaccaggtaagggaaagagcaagtgtatttcaagtcgcagctcaccccttaattagctgtaatacccgcagcaggcggccccacctcaatgagccagtctccctttcaaaaaaaaaaaaaaaaaaggcactaataatgagggggcggggcatggagctttatccaatcaggggcgctggagtggaaaccgtccaatcaggagtgaagccggagagcaggggcggcttccgggatttggcgggggccttcgtcggctccagttagagctcgggtctcctcgccacagctccgagtctttcgttctgggaggcccaggcggcttcgcgttctgagaataaacagaacctctgttgctctgcgacttgcaggcactgggagattcgtagctaagacgccagggcatcccggaagctgggaaatggtgagtgtgcggggtcgggggtccccag

SEQ ID NO: 15923 - DNA, 2300 bp, Homo sapien
acctgtatgaaggtgaggtgacctggtcacgtgacagtgaggtgacctgggggatgtgtaaggttacctgggggtatgtgtgaggtgaacttgggctcatgtgaggtgacccagggtgcatgtgtggtggcctgggtgcgtgtgaggttacctagacatgcatgaggtgacacggggaactcatgaggtgacttgggcatgtatgatgtgacctaaggcatgtgtgaggtgacctgggggacgtgtgaggtgacctgtgggacgtgggaggtgacctgggggatgcgtgaggtgacctgggggatgtgtgaggtgacctgtgggaatgtgtgaggtgacctgtgggacgtgtgaggtgacctgtggttcgtgtaaggtgatgtggggaatgtgtgaggtgacctgtgggacgtgtgaggtgacctgtaggacgtgtgaggtgacctgggggatgtgtgaggtgacctgggggacatgtgaggtgacctgtgggacgtgtgaggtgacgtggcggatgtgtgaggtgacgtggggaatgtgtgaggtgacctgggggacgtgtgaggtgacgtggggaacgtgtgaggtgacctgggggacgtgtgaggtgacctgggggatgtgtgaggtgacctgtgggacgtgtgaggtgacctggggaatgtgtgaggtgacctgggggatgtgtgaggtgacctgtaggacgtgtgaggtgacctgggggatgtgtgaggtgacctgtgggacgtgtgaggtgacctggggaatgtgtgaggtgacctgtggcacgtgtgaggtgacctgtaggacatgtgaggtgacctgggggatgtgtgaggtgacctgggggacgtgtgaggtgacgtggcggatgtgtgaggtgacgtggggaatgtgtgaggtgacctgggggacatgtgacgtgacatggggaatgtgtgaggtgacctgtgggacatgtgaggtgacctggggaatgtgtgaggtgatgtgggtgcgtttgagatgacgtgggggatgtgtgagcttagcaggagtgtgtgtgaggtgacatggggaatatgtgaggtgacctgcctgatgtgtgaggtgacctgagcacatgtaaggtcacctaaggcgcatctgaggtgacatgggggacgtgtgaggtgacctggggaacgtgtgaggtgacctgtgggacatgtgaagtgacctggggaatgtgtgaggtgacctgtgggacatgtgaggtgacctggggaatgtgtgaggtgatgtgggtgcgtttgaggtgacgtgggggatgtgtgagcttagcaggagtgtgtgtgaggtaacatggggaatatgtgaggtgacctgcctgatgtgtgaggtgacctgagcacatgtgaggtcacctaaggcgcatctgaggtgacatggaggatgtgcgaggtgaccttgggtgagtgtgaggttacctgtgggatgtgtgaggtgaattgggacttgtgtgaggttacctgggaaatgtttgaggtgacctgcgggatgtgtaaggtgacattggggatgtgtgaggtgactcagggcacatgtgaggtgaccttggggatgtgcaaggtcacactgtgtgagtgtgaggtcatgtgggatatttcaaactttgtaaggaaagcctgcaacaatatatggctctagaagcttcacactccaacactgttaatgcgcacatcctcaaggaactctaaatgtttccaggttagcttaaatgccatggagtgacacctgccccaggtacactcatatatgcatcctgggtctccctatcaacccctatcctcaaattttcagttcatgtttgctccatgatatcaactctgatatgctgaggtttttttttttttatctgtagttgttcaggtttgctgtttcactctcattactctgggctcagtcctctcctcaggtgtcccacttcagagcttgctatgtaataggagacatgcaaataggaccctcccttttctgatgaaaagcagcccagccctgaccctgcagccgtgggagagaagccccagccctgggattctcaggtgtttctattgggtcaacagcaataaacaaattaccatggaatttgggctgagctgggtctttcttgctgctattttaaaaggtaattcatggagaactaaggatattgagtgtgaggggacatgagtgacagaacagtggctatgtgtggcagtttctgaccaggatgtctctgtgtttgcaggtgtgcagtgtgaggtgcagctggtggagtctgggggaggcttggtccagcc

SEQ ID NO: 15924 - DNA, 2300 bp, Homo sapien
gtctcgatctcctgacctcatgatccacccgcctcggcctcccaaagtgctgggattacaggcgtgagccaccgcgcccggcctgtagctttgtcttgtaataggctatatttcatgtggcagcctcggcctcagtttagctaacactatggcttcatttctctctacaagaactcatttctttcaagatttccacgttcctgaaaggaaaataaacctttgggaccaccaaatcactaagcccaagggaagtcaagctgaaaactgtttggggtaaatccacctccattatttcactaaaatgatagctactacggtttttaaaagctacagacctccttcaaaatttgaccacaagtaaaatccttgtgggccaaagacagacagagtcatttctctgctcatgtaagtcaaatgcatatctgattgctccctttgctctattatttcactaagccagattaaggcctacgtgactattcctgtaaattgtgcattcagttaaaggctaatcagaaactcaaataatgcaaccatttctctcaaacctacctatgatctagaagccctctccccacttcaagttgtcctgcctttctgaactaaatcaatgtacatcttatatacatatattgattaatgtctcatgcctccctaaattgtataaaaccaagctgtgcccacaagcttgggcacacatcatcaggactccctgaggcggtgtcacaggcatgtccttaatcttggaaaatgaacttcctaaatctattgagattagtctcagatactctttggtttacaggtttgttttttgtttcataacttcaattatttgacatgctaaagaaaatttgccaaatagcacattctcttgtttacgtgttattgttgttgcaaaaataatatattttatatataatttatcatctatgtacattaccaaattgagtagcagatttattagtaagacccaaagtaatgaaaagtttgaataccaattagcaacttagaaaaacaaattatgctacatttgtttgctgaaatgctacctattatttattaaaaaataaacaatacaacataaaaggtttaattctcggtatttctactgagaaaaataagccaaatagataagagtacatactatattgtttcattcttataaattctagagaataaaaactagtctaaagaaatatgaaaacatcagtacttttataaagaaatggtagaagaaaagaggagaaaaacaaaattatgtctgtaaaagagcaagaggaattctgaggtgagttgacttgtcaccttcttgaaaatagagattttctttatcaaagtttactgttatgcaggttaaatatgtgaattttatcatctgtcaattaaaactcataaaatgtattacaagtaaacaagtgaaattttagacaaaaaagggatgataagaaggaacaaatgaatacattaaatatcagatacaccaaaaatttatctgcctgatgcctagatgtttccgtatttttaggtaaatgcagcaaaatcacacaggttctcgtggcaggaagtggattctgcaaaccacactaggcccatttagctctgtccaatagttggttaagagagcaattgaggccagctgtgaggagcataggcccaggtactaggactcactcatgccagatataagcccttagacacatacatagcccctccatgtgtgggttcacttttacatctgtaaacgaagaaaccactgagtgctaaataacatcatttatacacataggtaaaaataattaaaaatatgatagttgttaaatgtttatcgcacaacaatttcacattaagacagcattttcccaaacacaatcattgtcatcaaaatcccccaggacgctctcatctactctgggccctgccctctcctcaggagtcccaccccatagcttgctatatagtaggtgacatgcaaatagagccctccctctcctgatgaaaaccagcccagccctgaccctgcagctctgggagtggagccccagccttgggattcccaggtgtttccattcagtgatcaggactgaacacacaggaatcaccatggagtttgtgctgagctgggttttccttgttgctatattaaaaggtgattcatggagaactagagatattgagtgtgaatgggcatgaatgagagaaacagtgggtatgtgatgtgtggcaatttctgacctttgtgtctctctgtttgcaggtgtccagtgtgaggttcagctggtgcagtctgggggaggcttggt

SEQ ID NO: 15925 - DNA, 2300 bp, Homo sapien
gatgaaagtgtggcagtgcacagactctatctgaggaggagaacatagggaaactgaaagacaatggcagagaaaaagacaaggacagtaggaaaatctgaagcctctgacataaattttttgaagaaaaggtcttggcaaatccattgacctcagattcttttatcatggggcattttcagggttcctagctgagaaaaaatattcatgcacttcccaagtctccacttgtattctgtttgccttagatcgctaagagaaaaaagccataaacctaggcctagtgtctgtgtatgaggcgcttttataggctagaaaatagtaagaaaggagaatatgtgttattggaatagcatatacaaaggtgtctttattctgaatgtatctgtacctgcagatattctcagatgcaacattcaactgcaggagcccaacgaagaaactaggcattccccaaatcctacaagtttttgtattcattatgtgtccactgattcaggaaatgtgaagcttcagaaaagggactcccttctgagtcatagaatcttttctgtgggtatccctcagtaggtttagtgaggctaatcaattgttaaaagacatggtgttggcagcatatggtgtcactggcagagaattctaaaccaggacacagccacttcatgctgggctagagactctgaaggaaaatatctgtgagctccgacagaaacctcattgcaaggcaagagcctgggtgaaagggggcacttgggagccaccaagcacaggttccagccctggagcaggtgcacagctggggaggaagtttcctctcagggcctgggttttcctttgtcaggaaaaaacaatctaaaataactgttcaaaaagtcgctgacgtgctttaggtattctatcacatcaaaaccattcatataacttaaggcactgagaactattttttgaagtgggtttctagaactataatatcttagtagtgagaatatgaaggatgggcatgtttttactaattctatgggtacagattagttgaagaaacttcattcctatgaataagaaattcagatttcagtgttaagtaatgttgcttacattgtgtgagtgacagggcagtagtggatctgagagtgtggcaggtgcacagaccaagtgagtcagaaatcaatatggaaaggtgagggtctgtggatatgaactgaaagtatgtaaatacttgacaaaatactaataaatggagttcaaaaataacccaaaattgttctaaacacaaattccttgacaattactttgggagtagagagttcataatggactccaaactcctgctttatcttcttctgattcccatttctgtgagatgagaaaatcagctctaattatgcatcacagggcaaatctgtaaaccaacagtgttcaatagaattgaagatcctgggggatcaggacatgagtcaggtgctggagacagtgtctcaggagcacccagtagatctcagaggtccctcctggacactcatgtgggacataagcgtcactttctcagagtcgccaatgagctgtgctggtgcctgatgagtccaggaaaagaccaaggcacctgctcagtgtgatggagagtgatggttccaaaaatgatccaggtggtctctatgctaatcaaatataggcttacagtgaggagcctgttctatacgggcttattcttcagtgaaaggatgtctgtccacaaatgtttgtaaatggagcagggcatgcatttcctcaagcaggattaggacttcgaccatcttcatctcactcttgtaaggctgatgtgtcatttatcttccctttcttatcacggattgggctttgagttaagaaaggctttgtcttatgaatatgcaaatatactgatatccactgaggtaaatatgttctgtgccctgagagaatcccctgagagcacatctcaccatgggctggacctgcaagatcctcttcttggtggcagcagccacaggtaaggggttcccaggtcccagtaatgaggaggggattgagtccagtcaagggggctttcatccatcctgtgtcctccccacaggtgcccacttcctggtgcagctggtgcagtctggggctgaggtgaagaagcctggggcctcagtgaaggtctcctgcaaggcttctggatacaccttcacctactgctacttgcactgggtgcgatgggtccctggacaagggcttgagtggacaggattttagttatttgagatatttttcatacaacatttattctgcaagcaaatttc

SEQ ID NO: 15926 - DNA, 2300 bp, Homo sapien
cttttacttggtgattgtttgtggggtgaaggggcttggacacagggggatgttctccaaccttcggaccgagcctccttcttagctatgggtggtgagagtggctctgaagcatggtcttccaagtgttcctgttccttcccttctccaagtcagagtgtctcttcccagccacagtggtttttcgtcagtgtcctcagcttctgacccactgtccttaccccacagactcaggacttcattcctcaggaaagagatgggaggtgattctgggtagagtttccttggtgtcctctgtttccttgtgttctagttgattctaccagtgcctgaaggacacaagatttaataaatgtctcccacatatcgtgaagggggattcagcattgaacacagctgctattcttcctccccagtcaacaccacaggacagcaggtgggtgacttgtctggggatttccccaattctgtaggaaaagcctgcaagtgccgggagtttcacactctcacacccttagcacatacatcctcaacaactcatgaaacatttccaggttagctttttcctatcttcaatactatacaacgagtggcacctgctccaggtactctaataaatggaccctagttctctctgcaggcccctatttctcagatttcagggtttttttctctgtgacatcaactcagatatgttgaagcgttcatttttcgtagttgttcaagtttcttattaatgaggtcagaagaagatcattttctcaatttttttacattcccatgcttagtatttgctttctaaataaaattcagaaacgaagacaaaatatcaaatatccactatttggtgcattgttaaacaatttgagaaatattcatatactgaaatacaatgaacaattgaaatcaaggcatgcctcagtcacataagaatgtgaggacattatcaaataattgtgctgagtgtaggaagctaaagaattcacagtaaatctcctgtgatttcatttgtataaattgtagaaaatgcaactattctaaattaacatggagaagatctgaatttttctgagaaaagtgtggtgagagtaacaagatggtgaaataaaattacagggaagtgagagaaaaaattagaggttaatttaattgctaatagcatgattgaagtgctgattcaaaggctgcacacatataccaacattttccaaattgtacactataaatttgaattcactatggattgaatttttgaataaagcagtaacaaaaaatgagtatattggctgaggaagaggaagagatgaatattgacacttgaataatcacggactcctgaaaatacacacatgtgaacactgattgcatatttcaggtaaacactagaaaaagcaaagtcacataaagttgttatgacaggtgggacatcctgaaaacctcactaggcatgtcccacatcgccctggagctgtctcaggggagcagtctcctccagtgtttagaggcacagacacaggtaatagggctaactctggccagatgtgtgatattggacacattgcacaactgctctgttatgtatgtaattcatcttctctacaaatgtaacattgacacttgcactgaatatattctgcaaatgtgtaaacattaaataagatgatgactgctaattgatcatcaaggcacaatcacataatctgaagttatattttcctgagagataggattacctccagtgttttctgggatgctctcatcttctctgggcactgccctctcctcagctgtcccaccacagagcttgctatatagtaggagacatgcaaatagggccctccgtctgctgataaaaaccagcccagccctgaccctgcagctctgggagaagagccccagccccagaattcccaggaatttccatctggtgatcagcactgaacacagaggactcaccatggagtttgggctgaactgggttttccttgttgctattataaaaggtgatttatggcgaactagagacattgagaggacgtgagtgagataagcagtgaatatatgtggcagtttctgaccaggttgtctctgtgtttgcaagtgcccagtgtgaggtgcagctggtggagtctggaggaggcttggtacagcctggggggtccctgagactctcctgtgcagcctctggattcaccttcagtaaccactacacgagctgggtccgccaggctccagggaagggactggagtgggtttcatacagtagtggtaatagtggttacacaaactacgcagactct

SEQ ID NO: 15927 - DNA, 2300 bp, Homo sapien
gcggagcagaggtgggcccactggtgccagaatccaatggtgtaaacctagtgaaaaactcattttgttaatgcagatgtattaaacttggattggaaactgtctctactaaaaatgcaaaaaaagtatttaagtggtgcagattaaatataagcaagattgtggagatatttaaaacacaaaattaaaaatacagtagatacactgttgcaaattactgctatttgaattatagatcattttcttattgcctagaaacaatacatagctaaaattccctaactacttttactacacatacttagaaggttttaaaaatacctgtagtctcagctattcagcagggcaaggcaggagaatcacttgaaggagttttagaccagcctgggcaacgtagtgagggcagggcccatctcttaaaaaaaaaaaaaacaaaaaaaaaaaaaaaagaaaaatgcggaaatgtttcttgaactaccttaaaagccttcttgcacttctcactttgaattagtttgaattaatttacaaactgcaatatattttaaaggagcttattgtagaaaataaaataagttgataaaaaaataaggatttatctttagggatttgtctttagggacttgttaccaagcatgtctattttccctcccgcagcttctccaaacaggctggtgtacagggagcaacaccggagctggtgcatgctggggtttgtgcggagcatcgctctcacgccgcaggtgtgcggcgccctcagctccccgcagtggatcacgctgctcatgaaggtcatgaaagggcacgcacccttccctgccgcctcgctgcagaggcaggtaacgtgctgccaggcaaaaccagttccctgagagaggcatccatgtactgaagttccctgcccttagagtcgggcctttattcagtaaggagtgcagaaagggtctagaagtaacagggtagattttctggaggcaaggggcagtggtccttgataattggtaagttgctaacctttagtttacctgcttttaagtggtaaatcctgcaactacttgctcatctgcttcacagaatttgtagcataattgtcttaagaattaaactaaaaataattcttttttaattaaacacatgcatctgtaatgttgcttttttctaaagtccctgacaatcctaatcactaatcaacttgagtgtaattacctggctgtaaaataacgaatctcaaaattttcacatgattatttgcattatgagaacagaaaataaagagaggctgggcacagtggctcatgcctgtaatcccagcactttgggaggccgaggcaggtggatcatgaggtcaggagtttgagaccagcctggccaacatagtgaaatcctgtctctactaaaaatccaagaaaaatgagccgggcttggtggtgggtgcctgtaatcccagctactcaggaagctaaggcaaggagaatcgcttgaacctgggaggtggaggttgtagtgagccgagaccgtgccactgcactccagcccgggtgacagtgcgagactctgtctcaaaaaaaaaaaaaaaaaaaaaagaaagaaaagagaaagtaacaatctgtagtttcttaatcagatttttaatgcttgtcattttaagttttcttttatcagatcttagctgtgcatttgttgcaagcagtccttcggtcatgggacaagaccaaaagggcgagggacatgaaatgcctggtggagaagctgtttgacttcttggggagcttgctcactacctgctcctctgacgtgccattactcagaggtgggtggccgtctcccttccccatgccctggtgaagagcggcacagtgccatcactcagaggtgggtggctgtctcccttccctgtgccctggtgaattgtggcacagtgccatcactcagaggtcggtggccatctcccttccctgtgtcctggtgaagagcagtgcagcagcttctccccttgtttcctcctcagagtccatgccgaggtggcgcagggtgtgcccgcaggccttgctgactgccacccatagcagcacactggtggaggtggtggtggcactgctgtgcacgctgcactccctgactcagtggaatgggctcatcaacaagtacatcaactcccagctccgctccatcacccacagctttgcgggaaggccttctgaaggggtgagtttgtgttctcagaattaatttagttgaacagtaaacttgtagggattgggcagctccgtgagtgtccctggtcgagctcactgtttggt

SEQ ID NO: 15928 - DNA, 2300 bp, Homo sapien
tagcataaattgcctggccagaccactgccacaaggtcctgggtgtcaggtataccaaaaaacttatcaggcaggatgttccaaggcctcagagctcagctcctagaagaagaaggaccaatcctgaagggacagaccttccttgggaatttgcagtgtttgagcaaccccggcctgctatgttagctctttactgcccaggtgtattgtcatgttgcttattttttatattatatgctgaggagatttagaccaaaaattttaaaagagataaaatatagggaggaaattccacatatcacaatgaattcaattaattcagttacacactaacagaaccactgaactggaccatggtggacaagccaggaactgtgggccaaattccacctcttgcttgctttgtgttgcccgtggactaagacctttttttttttttttttttgcagtttgaaattgttttttaaaaattaaaagaagtatattatttttgacacatgaaaattacatgaagctaaaattgtagcaccataaagttttacgggagcacagccacacctgttgctttatctgtggttactttttgtgctacagcagcagagttgagtatttccaacagactgcgtggcctgaaagactcaaatgttcactctctggcacttgaggaagagcttgctggctgctgggcttcccctgcttcggggcttctccccttgtcacgctctcactttgtcattttgttctgccatggtgatcatttcactcttgttgtttgagccttgcaatttataatgttgttcagatgtttatttgaatgaaatatttgtctttcatgtaagtctaagtatttcctaatttaaaattaatgtttaagtgtatgattttttatagtgaatgatgttttaaaacacagttcctaagaagccagaatctacggctgatgaagaaaaaattggaaacgaagagagtgatttagaagaagcctgcattttgcctcatagtccaataaatgtggacaagagacccattgcaattaaatcacccaaggtgcagtgttttctgtgattctgaggttagctgaatagaatcatagcatgtagcaaaggaatccacagtcttgtacctccgtacctgagcatccggagggagggacgggcggttgttagaaatacggccccagtgatggttcatgaacttgacttatgatgtcctggtcagagctgtagctggagaagggtttccttttatttttggtactagattgtatcattaattattcaccattcattccttaaatatattctttgttccagaaacagtgctgggccctgtggctattaatatgaaccacaacttaacttcgtatgccaagctagcctgttccaacatatattagtatagagataagttcacttatatttatagcatagttttaaaaccatgtattaattactaaatttaacatattttaaccaatttaaacctatgagcattatttatattttacttgaataacttttagagcacagtttaatattaaatagggtagactaatgatgaaaattgttttcctttgttaggacaaatggcagccactgttgagtactgttacaggggttcacagatacaagtggttgaagcagaatgttcaggatctttatccgcagtctccactcctcagtacaattgctgaatttgcccttaaggaagagccagtggatgtggaaaaaatgagatagtgcctactaaaacagataacatttgatgagaaatgcttctctgcagtgggtaatatacataacacttaactgtatatgcattgatattttgcagttggagagagcagaggttcgcctggaagggatagatacaattttgaaattgtatctggtgagcaagaatttcttacttccatctgtgcagtaagcgatgttttgtggatggcaaagacttattcctgaaggaatcgatatagggtaaaacgttagcatatttttttcctaactaaggaagctgtggcaacagaatgttgttctgtaacagttagaagtctggcagtgtcccgagtcaaattctttatctttatttgaaagggaacctcttactgattgtttaaaggatgttgatttgatcccaccttttaatcggatgctgctggaagtcacctttggcaagctgtatgcttggactgttcagaacattctaaatgttctgatggatgccagtgccaaatttaaagagcttggtgagtcaacaattgcatcaatgttattttatagtttgcctttaattatgtgttg

SEQ ID NO: 15929 - DNA, 2300 bp, Homo sapien
gtaaaattgcaaaaaacaaaaaggacttttactttggagagaattatgcacgtcactcagttgctctaacaagtgctaccgtcatgggagcaagaacagtgaccttgtctttcctgagctgccgcttcctttgctcctgtcacatgcactctcacgatgaggggctcattccttgtgccttatggttcaggcactgatgagaaataaaaaagagaaagataacttaatattagtccctcccaaaacttactgggtaattctctcatcctaaatcccctactcatcgtgtaggcttttagcactgctgcttaccagtatgctaaaggtgcagacttaggatcagaagtttgatgaactcaaacaaaaagaccacaatgcatatgggtgctaatcccagtgaaatggagtggcagtaaacaccttcaaccaaagagaaaacagatcacaaataaacaaataatgacacaactcaagaaactagaggaggaagaacttatcccaacgttcccagataataaaattagtaaaaaaaatcggagcagaaatgaatacactgaagattagaaaaacaatagaaaatgtagaaaaattgtaagagcttgttttatgaaaacatgaagttgacatatctttagctagactaagaaataaatgcttaaataaataaaatcagaattaaagggaatacattacaactggtaaaacagaaataaaaaaaggtcataagactgctatgtacacagactcctatgtacaatgatatcccaccaaatgggataagggagaagacatgaatatatttctagacaagtaccacccaccaagactgaagcataaagaaatagaaaatatgaatagatcagtaatgggtaaggagtttagatctgatgactttgttgctgaattctactaaacatttaaaaagaaccaaatctttgaaaaaattgaaggaggaggaatacttccaaactcattttatgaagccagcattacactgatacaaaaaccagagatggacattacaagaaaaacaattacaggccaatatccctgatgaacatagatgaaaaatcatccacaacgtagttgcaaatgaaattcaaaagcactttaaaaggatcatttattatgatcaagttggatttattcctgggatgcaataatattttaatatgtggaaatcaataaatgccatactccttatttacacaacaaaaagattaaaaatcatgacttttttatgcatgcctaaaattattttgacaaaatttaaaatccattccaaataaaatctataacaaattaggtatagaaagaatatacctcaaaataaagagatatgttctttataagctataggacaatcccatggttaacattattgtcaatggtgaaattttggaattatttttaagatttattataagaaaaagatgcccactctcactacttctttcaacaccgtattggaaatcctgctcagaatctaagacaagagaaaaaagagcatttaaataagaaacaacaagttcttctattcatggagattaacgctcaggtttttgcagattagatttaacagcatgaaatctggtaccatccaggaatcaaaggatataggactttagggcatcaattattaagaggctataggaaagcagaaatgctcctggatgtttccattgtccacacacaaaatttcaacagaccagccccaggaagtaaaggcacattcctgactactgttagttgatgagcttttcaccaaaagcagagatgtgagacctggcaggtttcaaagacccctcaagtgctccataccttgaaattcacttccacaaagctagaacaccatctgttcctgagggatcaggttatcgtctgtttcttttaggcactggccagtcaggctttagtggacacgaagccacagatttttagtgtaaaatgcctaatctatcataatctttaggtagatatttggaggcctgcacacttaaatgggttggtgaaatgtcataccagacacatggctgggaattgggtttttctcctccgctcttagcagcacctttgtaacccagtgattacccccctcatggctccacggccacatccgcaaaaagggtactggtgaacgtgacattttcacgaagccacagcccatggtcactccctgcaaagctctgaacttgcgcattcccaggccaggccgtggttgtctttccaaggcggctcagcttgtgctttgcttggagagagcggagggcagcagcacagtgacagcgtctgggacctca

SEQ ID NO: 15930 - DNA, 2300 bp, Homo sapien
ttatgaaaacatgaagttgacatatctttagctagactaagaaataaatgcttaaataaataaaatcagaattaaagggaatacattacaactggtaaaacagaaataaaaaaaggtcataagactgctatgtacacagactcctatgtacaatgatatcccaccaaatgggataagggagaagacatgaatatatttctagacaagtaccacccaccaagactgaagcataaagaaatagaaaatatgaatagatcagtaatgggtaaggagtttagatctgatgactttgttgctgaattctactaaacatttaaaaagaaccaaatctttgaaaaaattgaaggaggaggaatacttccaaactcattttatgaagccagcattacactgatacaaaaaccagagatggacattacaagaaaaacaattacaggccaatatccctgatgaacatagatgaaaaatcatccacaacgtagttgcaaatgaaattcaaaagcactttaaaaggatcatttattatgatcaagttggatttattcctgggatgcaataatattttaatatgtggaaatcaataaatgccatactccttatttacacaacaaaaagattaaaaatcatgacttttttatgcatgcctaaaattattttgacaaaatttaaaatccattccaaataaaatctataacaaattaggtatagaaagaatatacctcaaaataaagagatatgttctttataagctataggacaatcccatggttaacattattgtcaatggtgaaattttggaattatttttaagatttattataagaaaaagatgcccactctcactacttctttcaacaccgtattggaaatcctgctcagaatctaagacaagagaaaaaagagcatttaaataagaaacaacaagttcttctattcatggagattaacgctcaggtttttgcagattagatttaacagcatgaaatctggtaccatccaggaatcaaaggatataggactttagggcatcaattattaagaggctataggaaagcagaaatgctcctggatgtttccattgtccacacacaaaatttcaacagaccagccccaggaagtaaaggcacattcctgactactgttagttgatgagcttttcaccaaaagcagagatgtgagacctggcaggtttcaaagacccctcaagtgctccataccttgaaattcacttccacaaagctagaacaccatctgttcctgagggatcaggttatcgtctgtttcttttaggcactggccagtcaggctttagtggacacgaagccacagatttttagtgtaaaatgcctaatctatcataatctttaggtagatatttggaggcctgcacacttaaatgggttggtgaaatgtcataccagacacatggctgggaattgggtttttctcctccgctcttagcagcacctttgtaacccagtgattacccccctcatggctccacggccacatccgcaaaaagggtactggtgaacgtgacattttcacgaagccacagcccatggtcactccctgcaaagctctgaacttgcgcattcccaggccaggccgtggttgtctttccaaggcggctcagcttgtgctttgcttggagagagcggagggcagcagcacagtgacagcgtctgggacctcagaccagtttccacagccacttatgaaagcagacggctccatgggctggaggaggtgggacgctctggaaagaactcgggtgcgagtgggaaagaaaatcgagctgagcagcgggaagtcgaagtcgcgtgagtgaggaccagacactctcgatttaggcaaaggcggggtgcacttcccaacaacacatcctcctcactggcgagaccaggcctgcccttcaagttcctctcctgatttaatccccttggcgagggtttggcatgaaatcaatggccagcaagcttggtaaacgaagccgcctacaccgccctccccctccctgcacggccgcgccccgcctccgctcctgtctcaatctgggattgtcctcctgtagccccaccatccaccgtggggaacggtggagagactacaactcccagtatgcaccgcgatgcgcgcctcaccctgcatctcccagcccgcagccagctggcatcctagaccctctgccctgcgaccaacagccgggagcggaccagacaccagaactcccggaacggttgaagacggttccgctccctgtcccgcctttcgcagcccagcagtttcgccctgcggag

SEQ ID NO: 15931 - DNA, 2300 bp, Homo sapien
gagagacacccagtttagacctctgctctctttaccacactctcctcccacattagcagtaaccactatcttacacattgtttattttacttgtattatatatttattctttcctagaatatcagcttcaagtgggcagaattatttgttttgttttagtcattgcagcacctcctagaacatctgctacacagggcaagattaatacataataaatcactgggctcaaattcacacaactatacacagtgcttttccatgaacctcatcataggcccacataaacttgatttgcacaaaatgagtttttcttaactcgatcctatgtggcagggtggtgtcttctgaactccaaacaaattcctaaaggttagcttactcaaatgaattgaaaatgtaagtccacacaaaaacctgcacaaaaaagtttacagtaatattaattgtagttttcacaaaacttggaagcaaccaagatcatgtattcaccaaagtcagtggtacaaaattattatacaaaaatcaattatacttctatacacttgcaacgaaatatctaataatgcagttgaggcaaaaacaaatccatttacaatagcaattaaataataaatacatagaaataaatttttaaaaatgtgaaagaaacttgtaatctgaaaactacaaaccttatcgaaagaggttgaagatctaaataaatgagaaaccattccatgtttatgaatcagtaggtttaatacattatgatgacaataactccccaaacagtctacatccagtacaattagattcagtacaattagaattcaaggtgactaccatgtaaaaactgaagcattgatgctgaaattcatataaaattaaaagggactaagaatatctttaaaaatctttaaaaagatgccaaataagaggactcacaaattacaacttcaaaatttgcctcaaagcaaccttaatcaagatggtgtagtaatgacacaaggaaagtcatttagatcaacgaagtacaactgagagcccagagagagtaaaatcagcaaaatggcaagaatgtacagctccaaacacctgctcctccacagaaacagggaaaaacaagcagaactgtcagaaacgatgttgtaaaacctgttgaaaaccatcaagttgtacagcaaccatgtaaatacaaaatcaagaaaaacaatgaagaacaggagaaaagcctcgtggactttttacacgtccttgcccaaatccttcccttactcgatggcagtcttaaaaacaacatcctgagttgccagtatgggcctctgctcagtggttccagagggaaaagaggaggtcttacttgcaaagtattgtgttgttacattaaaatctgtattagggctatccaaaggtctgaaacaaggctctcttttttctctaagtcagaaaaaaatcagtttaaaaaattggcacgagttacttgggagtattttaaggaaactgaaagccagcagccccctggagaacagattacagatgacacatgcaataggtcacataaagccaagaataaaaagctaacgtgagattttgttttgttttacaaattaggctattaaaaagcacccaggtatgctggcaaattgacaaagcactctgtgcataaccacgaaaaacacattttcttaaagacccaagaagaccctcattttcagcactggctgaccttcaggctcagctcagcagaaagtgaagactgaagcaaagttttcaacagtatgcatgtgtgttaaaggaatgccccagcccagagccatccacaaaaactggaagaatccgtcagtttgtctttgtctcagttttgtcatatagacctttgtgacacacagatctatatacaatgaaaactacaaatttctaatgaaagagccatgaaagatcacagaagatcttaataaatagaaagacatttaatgtgcatgaacataaaatctcaatattgtcaagatataatttctccccaatttgagttataggcaagagagtcacatcatctgggtgattggccaaacatatgtcacaatcccttccattgacagctcccaaaaaaggagttacatcacctaggtgctcagctctgagatgtgtcacaacattgcccaatacaggcagggcacaggcgggagagtcacatttcctgggtgcttggcccagtggtatgtcacatttccttatgtaggaagggcacacgtagcaaaagagagtcacattacctaggtactgtgctagagctatcagtctctgtgtcattcaatgtgaga

SEQ ID NO: 15932 - DNA, 2300 bp, Homo sapien
aagtgctgggattacccacatgagacactgtgcccagccctggtgtatttagtgtttttcataattttagaatgtatgtcttctacttacattaaaaaatagttaactataaaacagcctcaggtaggtccttcaggaagtattctggaagaagaaggcattcttatcacaggagatgacatctccatgcgtgtaattgcccaggcgggagtgcagtggcacgatctcggctcactgcaacctccacctcctgggttcaagtgattctcctgtgtcagtctcctgagtagctgggattacaggtgcacaccaccatgcctggctaagttttgtatttttagtagacatgagtgtttcactacgttggccaggatggtcttgaattcccgacctcaaatgatcttcctgccttggcctcccaaagtgctgggattgcaggtgtgagacaccatgaccggcaaaattttttaagatacatttcagtaagctaaggtgaatttattgaagaaaagctttaaaaatttttggtgtagcctaagcatatggtgtttataaagtctacagtagtgtacagtaaggtcctatgccttcacactcactgactcatccacagcatcttccagtcctgcaagctcatttcatggtaagtgccctatacaggagtaccattttaaaatctcttatactctattcttactgtattttctctatgttcaggtacacaagtacttacattgtgttacaactgcttatggtatattcagtaaagtatcaggctgtaagggtgtgtagcctaggagcaataggctacgccatacagcctaggtgtgtagtaggctatacaaggtttgggtaaatgcactttgctgtttgcacaatgctgcagtcacctaaggaggcatttctcagaaccatcccatgattaagagaggcatgatcatatagtcatcatcaccctgaaagctcagtcaaccctctgcagtgctactgccacactccccttttgcacatgtagaaatcaaggatctttggctcctctgagtgactagttcaaggtttctcagtttccaagagatggaggtgggacttgaattgagatttccctttcttgagaacctgtggtccttaaccattaaaaccacttaagaggtcttctctcttgatcactacctactaagtgctaggcgcggtgctgaggcgttctcttgattattatattgagtctttagatttaggagaaacaggctgagcgtgctggctcacgcctgtaatctcagcactttgggaggctgaggtgggaggatcacgaggtcaggagatggagactatcctggctaacaccgtgaaaccctgtctctactaaaaatacaaaaattagcaggcgtggtggcaggcgcctgtattctcagctgctcgggagactgaggcaggagaatggcgtgaacccaggaggcggagcttgcagtgagccgagatcgcgccacagcactccagcctgggtgacagagcgagactgtctcaaaaaaaaaaaaaaaaaaaaaaagatttaggagaaacaagtcccgaagccctgaccctaacacgcaagggttagtggagatgtgggacttgaactcagcttctccgttgactctggctgtctccctgacgcaggcatgtgctcgcacacctccacggtggcgatcccgcccccttagtagcgtccttagctcggtacttcttgcggggaagttcctcttggcccagaccctcttcctaggccccgcgtggtgggggaagcgaaaggggcagtgtggggaagtggctgaggggttgggtccggggtggtctgcagagaggcaggcggcggtgcggagcggggaaccacgcactcacccgccgagtccgacgggcccggcaggggtgggcaaggcattgggaacagccgccagctctagagggcgtgaggcggggcgcacggggagggggtgcggctaacgcgcgcgtgcgcggttcatgtgtgggcccgcgggggcgcgcgcgcggttagcgggcagcgagggtcacctgggcggtgcgcagcacggcgggaacatggcgcgcggaaccggcgcgcgcgcctagctggcgggaccgttagatcgaggcggatgcggcccggaccccgtggatatggagcaatcgccgccgctggcgccggagcccacccaagggccaaccaccacaaggagctgaaggcggcgggagcccgagtcgccgccggcgtcggtgccggtgagtgcgtgaggggctcgggccgggagactttctttgtgaaactc

SEQ ID NO: 15933 - DNA, 2300 bp, Homo sapien
ggattggaggggagggtaggaccccttaaaagaaaggccctagaaattgtccctaccccttcacacccccacaagttccctttgtcatcttccacccaggacctgtcagaatcctgcccttccttctgtctccagatcaaagtcctccaggaaatgcagctgcttcagtgacaagagataatcgtcatcttctgactgaggaggaatttggggtttggttccagtgcatgaagctgcacagtcagaataaaagatgagggcctagcagattagcaaagactaggagaagactctatcttgtggccagcttcagagaacctggggccatagctccctggtcaacattaggcctgctgcatggggaccctgggcaggcagtgggaagcctgaggtgtggctcctggtagcctcacagctgccactattttctgaagctcctcctacttgttttgtcagacgggcccctattccagcaggccagcaacaccctcaagaccaagaacaggccatggtgaatctcagggccattgagtgcctgggctggcaggggcagagtgcctcagggctcagtgacatttggcctgagtgttggctttgggagtcagacagctgcactgggctcccagcttcaccatgaccagtaatgtgtctggggccggggcctcactgctctaaaacttgagacaccatagtgataaattttacacacccttctaactgctttttcttttttatctgtctttctctataatcaccatgtactactgatctctgtttatttaaattaataagcatgttatacagtgtgtattattcttcctcgtgacttctttactacattgtatgattccactcatatgaggtacttacagtagttccattcatagaaactcaaagtagaagagtagttcctagaggccaaaaggaaggtaacgggaacagagtttgagttttgcaaaatgaacaaatttccctatgaatgtggatgatggttgtagaacaatgtgagtatgattaattcctctgtcctgcacttttaaaaattgttaaaatggttaattttatgtatattttaccacaatgtaaaaaaggacttttttaaatgaacaaactgtagatatctgtaacagcataaatatcacaaatataatattgcattaaaaaattgatgtaaaagtatccatactgtgtaattttttatattacactcaaaaatcaaaactgaggttctggcttccactaatgatgaagtagctaactgaactaacactctcacacagaaaaatgatgaatcctgggtaaattattatatatcattatagaaacatttctatatacaatacatacatgaaatatgtgtatataaaaactgaatgcatattttggctatgacttccataggagagataagtattgaagatagaatccagcccatttaacaccatcttttaaaaacaacactcttcacagggacaaaacagaatccagtctttttaatccagtcttgtatacagtctccagggcacaatttccaattcaagggatgcgtgaagacacgtgaaaatgtaataaatacacaagataaaaagcaggcagtagccatctccaagatgtccaagatgtaaacggcagacaagaatttgaaggcagctattataaacacgctcatgagggcaaaggaaaatattctcataaatgaatagatgtgaaacatcagcagagaaaaaatagccatataaaaaatgagaaataaaaataataattttgagcttttctatagttcagaaacagagacatagcaatataatttatccaatctgaggagaggaaaaaaaaaagaagtttaaagaaaatgaacagagccttacagacctgtgggatgactgagtctgagaaaaggtgagagatagaaaaaatcaaatggagtataaaagtaaatcaacaaaatttaaagaaaataaacacagccttagagacccatggaattattgagcctgaggagaggagagagacagaagaattagatgggttggaaaaataaatcaataactaacagctgcaaacttgcaaaaattgttcaaaaacctatttttttttttttaatctaaagatccacgaatcccccacaaaagtacaaataaaaccataccaaggccatattgcaatttaggaaagcagcaggcaggactttcaattgacttgatatgatttatcatttttactatttgtaagaatggaaataagttcttagagttttggtcttggagaaagtctgacgttaaggacaaacgacagttatt

SEQ ID NO: 15934 - DNA, 2300 bp, Homo sapien
tttatgaaaacatgaagttggcatatctttagctagactaagaaataaatgcttaaataaataaaatcagaattaaagggaatacattacaactggtaaaacagaaataaaaaaaggtcataagactgctatgtacacagactcctatgtacaatgatatcccaccaaatgggataagggagaagacatgaatacatttctagacaagtaccacccaccaagactgaagcataaagaaatagaaaatatgaatagatcagtaatgggtaaggagtttagatctgatgactttgttgctgaattttactaaacatttaaaaagaaccaaatctttgaaaaaattgaaggaggaggaatacttccaaactcattttatgaagccagcattacactgatacaaaaaccagagatggacattacaagaaaaacaattacaggccaatatccctgatgaacatagatgaaaaatcatccgcaacgtagttgcaaatgaaattcaaaagcactttaaaaggatcatttattatgatcaagttggatttattcctgggatgcaataatattttaatatgtggaaatcaataaatgccatactccttatttacacaacaaaaagattaaaaatcatgacttttttatgcatgcctaaaattattttgacaaaatttaaaatccattccaaataaaatctataacaaattaggtatagaaagaatatacctcaaaataaagagatatgttctttataagctataggacaatcccatggttaacattattgtcaatggtgaaattttggaattgtttttaagatttattataagaaaaagatgcccactctcactacttctttcaacaccgtattggaaatcctgctcagaatctaagacaagagaaaaaagagcatttaaataagaaacaacaagttcttctattcatggagattaacgctcaggtttttgcagattagatttaacagcatgaaatctggtaccatccaggaatcaaaggatataggactttagggcatcaattattaagaggctataggaaagcagaaatgctcctggatgtttccattgtccacacacaaaatttcaacagaccagccccaggaagtaaaggcacattcctgactactgttagttgatgagcttttcaccaaaagcagagatgtgagacctggcaggtttcaaagacccctcaagtgctccataccttgaaattcacttccacaaagctagaacaccatctgttcctgagggatcaggttatcgtctgtttcttttaggcactggtcagtcaggctttagtggacacgaagccacagatttttagtgtaaaatgcctaatctatcataatctttaggtagatatttggaggcctgcacacttaaatgggttggtgaaatgtcataccagacacatggctgggaattgggtttttctcctccgctcttagcagcacctttgtaacccagtgattacccccctcatggctccacggccacatccgcaaaaagggtactggtgaacgtgacattttcacgaagccacagcccatggtcactccctgcaaagctctgaacttgcgcattcccaggccaggccgtggttgtctttccaaggcggctcagcttgtgctttgcttggagagagcggagggcagcagcacagtgacagcgtctgggacctcagaccagtttccacagccacttatgaaagcagacggctccatgggctggaggaggtgggacgctctggaaagaactcgggtgcgagtgggaaagaaaatcgagctgagcagctggaagtcgaagtcgcgtgagtgaggaccagacactctcgatttaggcaaaggcggggtgcacttcccaacaacacatcctcctcactggcgagaccaggcctgcccttcaagttcctctcctgatttaatccccttggcgagggtttggcatgaaatcaatggccagcaagcttggtaaacgaagccgcctacaccgccctccccctccctgcacggccgcgccccgcctccgctcctgtctcaatctgggattgtcctcctgtagccccaccatccaccgtggggaacggtggagagactacaactcccagtatgcaccgcgatgcgcgcctcaccctgcatctcccagcccgcagccagctggcatcctagaccctctgccctgcgaccaacagccgggagcggaccagacaccagaactcccggaacggttgaagacggttccgctccctgtcccgcctttcgcagcccagcagtttcgccctgcgga

SEQ ID NO: 15935 - DNA, 2300 bp, Homo sapien
gtaaaattgcaaaaaacaaaaaggacttttactttggagagaattatgcacgtcactcagttgctctaacaagtgctaccgtcatgggagcaagaacagtgaccttgtctttcctgagctgccgcttcctttgctcctgtcacatgcactctcacgatgaggggctcattccttgtgccttatggttcaggcactgatgagaaataaaaaagagaaagataacttaatattagtccctcccaaaacttactgggtaattctctcatcctaaatcccctactcatcgtgtaggcttttagcactgctgcttaccagtatgctaaaggtgcagacttaggatcagaagtttgatgaactcaaacaaaaagaccacaatgcatatgggtgctaatcccagtgaaatggagtggcagtaaacaccttcaaccaaagagaaaacagatcacaaataaacaaataatgacacaactcaagaaactagaggaggaagaacttatcccaacgttcccagataataaaattagtaaaaaaaatcggagcagaaatgaatacactgaagattagaaaaacaatagaaaatgtagaaaaattgtaagagcttgttttatgaaaacatgaagttggcatatctttagctagactaagaaataaatgcttaaataaataaaatcagaattaaagggaatacattacaactggtaaaacagaaataaaaaaaggtcataagactgctatgtacacagactcctatgtacaatgatatcccaccaaatgggataagggagaagacatgaatacatttctagacaagtaccacccaccaagactgaagcataaagaaatagaaaatatgaatagatcagtaatgggtaaggagtttagatctgatgactttgttgctgaattttactaaacatttaaaaagaaccaaatctttgaaaaaattgaaggaggaggaatacttccaaactcattttatgaagccagcattacactgatacaaaaaccagagatggacattacaagaaaaacaattacaggccaatatccctgatgaacatagatgaaaaatcatccgcaacgtagttgcaaatgaaattcaaaagcactttaaaaggatcatttattatgatcaagttggatttattcctgggatgcaataatattttaatatgtggaaatcaataaatgccatactccttatttacacaacaaaaagattaaaaatcatgacttttttatgcatgcctaaaattattttgacaaaatttaaaatccattccaaataaaatctataacaaattaggtatagaaagaatatacctcaaaataaagagatatgttctttataagctataggacaatcccatggttaacattattgtcaatggtgaaattttggaattgtttttaagatttattataagaaaaagatgcccactctcactacttctttcaacaccgtattggaaatcctgctcagaatctaagacaagagaaaaaagagcatttaaataagaaacaacaagttcttctattcatggagattaacgctcaggtttttgcagattagatttaacagcatgaaatctggtaccatccaggaatcaaaggatataggactttagggcatcaattattaagaggctataggaaagcagaaatgctcctggatgtttccattgtccacacacaaaatttcaacagaccagccccaggaagtaaaggcacattcctgactactgttagttgatgagcttttcaccaaaagcagagatgtgagacctggcaggtttcaaagacccctcaagtgctccataccttgaaattcacttccacaaagctagaacaccatctgttcctgagggatcaggttatcgtctgtttcttttaggcactggtcagtcaggctttagtggacacgaagccacagatttttagtgtaaaatgcctaatctatcataatctttaggtagatatttggaggcctgcacacttaaatgggttggtgaaatgtcataccagacacatggctgggaattgggtttttctcctccgctcttagcagcacctttgtaacccagtgattacccccctcatggctccacggccacatccgcaaaaagggtactggtgaacgtgacattttcacgaagccacagcccatggtcactccctgcaaagctctgaacttgcgcattcccaggccaggccgtggttgtctttccaaggcggctcagcttgtgctttgcttggagagagcggagggcagcagcacagtgacagcgtctgggacctca

SEQ ID NO: 15936 - DNA, 2300 bp, Homo sapien
gaggaggatagctcagaagataattcgggaacggaggaaaaagagaagtaagaatgtaaaaggacagaagatactattaaagcatgtgcttcaccctgcctcgctggacctgtgatttcagagtgaagtttctctactgttgattccatgtgacatttctacctgctgccatcatttttatgtatagttatgattaaatacggaaatctctcctattttttcaaccgatcagacaatgaggcagtttaggaattgagtgtggtatgatttgattactagtaaattgatgttgaaaatgtaaataatctttgctaaattgatgggaacaaggacgtatttttattttattagttatcctggtaatgagatataatgggaacatttaaacttattgccattcttctaaagaaatgttttttgtttggaaatattgagtattctgatacatggagaattataaagggaagctgaaagagttactgacattttcctggaagtagctgtgtaagagtacagaaaattgtagcaccataaagttttacgggagcacagccacacctgttgctttatctgtggttactttttgtgctacagcagcagagttgagtatttccaacagactgcgtggcctgaaagactcaaatgttcactctctggcacttgaggaagagcttgctggctgctgggcttcccctgcttcggggcttctccccttgtcacactctcactttgtcattttgttctgccatggtgatcatttcactcttgttgtttgagccttgcaatttataatgttgttcagatgtttatttgaatgaaatatttgtctttcatgtaaatctaagtatttcctaatttaaaattaatatttaagtgtatgattttttatagtgaatgatgttttaaaacacagttcctaagaagccagaatctacggctgatgaagaaaaaattggaaacgaagagagtgatttagaagaagcctgcattttgcctcatagtccaataaatgtggacaagagacccattgcaattaaatcacccaaggtgcagtgttttctgtgattctgaggttagctgaatagaatcatagcatgtagcaaaggaatccacagtcttgtacctctgtacctgagcatccggagggagggacgggcggttgttagaaatacggccccagtgatggttcatgaacttgacttatgatgtcctggtcagagctgtagctggagaagggtttccttttatttttggtactagattgtatcattaattattcaccattcattccttaaatatattctttgttccagaaacagtgctgggccctgtggctattaatatgaaccacaacttaacttcgtatgccaagctagcctgttccaacatatattagtatagagataagttcacttatatttatagcatagttttaaaaccatgtattaattactaaatttaacatattttaaccaatttaaacctatgagcattatttatattttacttgaataacttttagagcacagtttaatattaaatagggtagactaatgatgaaaattgttttcctttgttaggacaaatggcagccactgttgagtactgttacaggggttcacagatacaagtggttgaagcagaatgttcaggatctttatccgcagtctccactcctcagtacaattgctgaatttgcccttaaagaagagccagtggatgtggaaaaaatgagatagtgcctactaaaacagataacatttgatgagaaatgcttctctgcagtgggtaatatacataacacttaactgtatatgcattgatattttgcagttcgagagagcagaggttcgcctggaagggatagatacaattttgaaattgtatctggcgagcaagaatttcttacttccatctgtgcagtaagcgatgttttgtggatggcaaagacttattcctgaaggaatcgatatagggtaaaacgttagcatatttttttcttaactaaggaagctgtggcaacagaatgttgttctgtaacagttagaagtctggcagtgtcccgagtcaaattctttatctttatttgaaagggaacctcttactgattgtttaaaggatgttgatttgatcccaccttttaatcggatgctgctggaagtcacctttggcaagctgtatgcttggactgttcagaacattctaaatgttctgatggatgccagtgccaaatttaaagagcttggtgagtcaacaattgcatcaatgttattttatagtttgcctttaattatgtgttg

SEQ ID NO: 15937 - DNA, 2300 bp, Homo sapien
gggagtaatggagtcctggagccaggcggagcagaggtgggcccactggtgccagaatccaatggtgtaaacctagtgaaaaactcattttgttaatgcagatgtattaaacttggattggaaactgtctctactaaaaatgcaaaaaaagtatttaagtggtgcagattaaatataagcaagattgtggagatatttaaaacacaaaattaaaaatgcagttgcaaattactgctatttgaattatagatcattttcttattgcctagaaacaatacatagctaaaattccctaactacttttactacacatacttagaaggttttaaaaatacctgtagtctcagctattcagcagggcaaggcaggagaatcacttgaaggagttttagaccagcctgggcaacgtagtgagggcagggcccatctcttaaaaaaaaaaaaaaaaaaatgcggaaatgtttcttgaactaccttaaaagccttcttgcacttctcactttgaattagtttgaattaatttacaaactgcaatatattttaaaggagcttattgtagaaaataaaataagttgataaaaaaataaggatttatctttagggatttgtctttagggacttgttaccaagcatgtctattttcccttccgcagcttctccaaacaggctggtgtacagggagcaacaccggagctggtgcatgctggggtttgtgcggagcatcgctctcacgccgcaggtgtgcagcgccctcagctccccgcagtggatcacgctgctcatgaaggtcatgaaagggcacacacccttcactgccgcctcgctgcagaggcaggtaacgtgctgccaggcaaaaccagttccctgagagaggcatccatgtactgaagttccctgcccttagagtcgggcctttattcagtaaggagtgcagaaagggtctagaagtaacagggtagattttctggaggcaaggggcagtggtccttgataattggtaagttgctaacctttagtttacctgcttttaagtggtaaatcctgcaactacttgctcatctgcttcacagaatttgtagcataattgtcttaagaattaaactaaaaataattcttttttaattaaacacatgcatctgtaatgttgcttttttctaaagtccctgacaatcctaatcactaatcaacttgagtgtaattacctggctgtaaaataacgaatctcaaaattttcacatgattatttgcattatgagaacagaaaataaagagaggctgggcgcagtggctcatgcctgtaatcccagcactttgggaggccgaggcaggtggatcatgaggtcaggagtttgaaaccagcctggccaacatagtgaaatcctgtctctactaaaaatccaagaaaaatgagccgggcttggtggtgggtgcctgtaatcccagctactcaggaagctaaggcaaggagaatcgcttgaacctgggaggtggaggttgtagtgagccgagaccgtgccactgcactccagcccgggtgacagtgtgagactctgtctcaaaaaaaaaaaaaaaaaaaaaagaaagaaagaaaagagaaagtaacagtctgtagtttcttaatcagatttttaatgcttgtcattttaaattttcttttatcagatcttagctgtgcatttgttgcaagcagtccttccgtcatgggacaagaccaaaagggcgagggacatgaaatgcccggtggagaagctgtttgacttcttggggagcttgctcagtacctgctcctctgacgtgccattactcagaggtgggtggccgtctcccttccccatgccctggtgaagagcggcacagtgccatcactcagaggtgggtggctgtctcccttccttgtgccctggtgaattgtggcacagtgccatcactcagaggtcggtggccgtctcccttccctgtgtcctggtgaagagcagtgcagcagcttctccccttgtttcctcctcagagtccatgccgaggtggcgcagggtgcgcccgcaggccttgctgactgccacccatagcagcacactggtggaggtggtggtggcactgctgtgcacgctgcactccctgactcagtggaatgggctcatcaacaagtacatcaactcccagctccgctccatcacccacagctttgtgggaaggccttctgaaggggtgagtttgtgttctcagaattaatttagttgaacagtaaacttgtagggattgggcagctccgtgagtgtccctggtcgagctcactgtttggt

SEQ ID NO: 15938 - DNA, 2300 bp, Homo sapien
tcaggctggggagtcacctgaacaaagaagacaatgtccagagctgtgggacatggccagctccctgggggacaaggtccccagagcagcatgtgggaagagggggcagacagtgtggcagccgcatcttgcctgcctctgcctggcccagttccactcttcacctgctcagccccgacctctctccagaagaggaggggggcccggccctgatccaatatcccgctccctgcctgggcctcccatgcgtgcactgcccacacactcacacagctctcactccccacatgctccatgcctcctgtccccactgaggagagctcctagaggctcgcccgctccccactgacatgcatccctgcagacaaacgaggcgcccagagagcttccccactgcacttgccagggctgccggggcccagccttgcccctagcttcctctggcgggagctatggctcggaggagaatggggacctctgaacatacctgcccgcaagggggaccggaggtgctcggagtgggcttgtgagggaggtggtgccgcagtccccgctgagcagcctggccccccagatcgtgtacttcactgctacattcccctacgtggtcctggtcgtgctgcttgtgcttggagtgctgctgcctggcgccctggacagcatcatttactatctcaagcctgactggtcaaagctggggtcccctcaggtgaggtggaggtggggaggctgcagcagggtgttgtgggggagccctgcaggcccctcatgcctgcactctccagccctcctctaggtatggatagatgtggggacccagattttcttttcttatgccattggcctgggggccctcacagccctgggcagctacaaccgcttcaacaacaactgctacaagtaagcactgctgccctgccacccgtgccctgtcccgccctgccctgcccagcagcctaacccatccactctggcccctccacccctccaggacgccatcatcctggctgtcatcaacagtgggaccagcttctttgctggcttcgtggtcttctccatcctgggcttcatggctgcagagcagggcatgcacatctccaaggtggcagagtcaggtagggccctacccccagccccgcctccagagcagcaactgccacccagatgcatgatgtacaagaacacgcaatagaaatgctgaaaagtgatgaggattcaaacagaacttctcagattgtgggcctgtgggggcaggtcctgggatttttcaatgttgacagagacaggacctcccagcccctgctgcatgacccagggttgacagcacctcagaggcaggcgtgggcatgggcgtgagtgttgcaggcagggctcagggtgcgcgcagggcacgacatcggctgcaaggtctagagcctgcacctttcccacagggccgggcctggccttcatcgcctacccacaggctgtcacactgatgccagtggccccactctgggctgccctgttcttcttcatgctgttgctgcttggtctcgacaaccagatttgcatggggctctgggacagggagccaggagaggggcggagtgagggctgcgggcaaggaaaggggtggagggtggtgcggggctcggcctgagctagcctggccacagtttgtaggtgtggagggcttcatcaccggcctcctcaacctcctcccagcctcctactacttctgtttccaaagggagatctctgtggccctctgttgtgccctccgctttgtcattgatctctccatggtgactgatgtgagtggggtggggggtctgcctgtgacctctggtggccgtctgccatcctccctgactgggctctgtcccccagggtgggatgtatgtcttccagctgtttgactactactcagccagtggcaccaccctgctctggcaggccttttgggagtgcgtggtggtggtctgggtgtatggtaggtcatggctgagggctgggctggggcatggtggcggggaaggcaggtctccagcttggccctcccgcctcgccttgccacaggagctgaccgcttcacggacgacattgcctgtatgatcgggtaccgaccttgcccctggatgaaatggtgctggtccttcttcaccccgctggtttgcatggtaagggctgggggaggtggggcggggtggggggggcggggcggggtgggggccccattaaccacggcattctggtctgtagggcatcttcatcttcaacgttgtgtactacaagccgctggtctacaaaaacaccaa

SEQ ID NO: 15939 - DNA, 2300 bp, Homo sapien
accatggcggttccaggaggtccaagcctccacctggccacccagtagctccagtcctcagcagctggtggtggtggtggtggggagggggggagtttctagtagcctgaggtagtgttggagacagttgcccccgtagtgggcaacctcagtacgtcgctccacctgtctgtgccccagcgtccttggggacagtaatagtaggacctacctagagagccaagtgtgctgggcaggtcccatccccagcccggctatgcctggcctgtccttgccttgtggagctgcctatgccccctctagtccctgcttccccaaattcactgtgcggcctgaacatctcctccaggctcccccctcgagactgggatgccatcacgtggccccaggcctggtgctcaggacaggaaaagatttctcaagtgggagccagctgggaaaagggggcagtccctgaggctggccaagggctgctcacctttgaacaagggacagatgttccagacattgatgctgccggccttcatgaactggcccagcgagatctccaagaagaaaatggggattcctccgaccagggctatcaggatgcagggaataaggaacacacctgggggtggaggcacagggtggactcagggtggcccccagccaggctgcccaggcccagcgggccagcccagactccaaaggccccatcacaacttcccactgggtgagtcagtgtaggggtggccactgactcgggccccacgtagggtcttgaggggctgggttcagtgtgttgaagaggtgctacagtagcccctgggccattgaagtcctattccctgggtggcagagaggcgctaggcccacagggcttccacccccacggtcacttggggtgatggccatggaggacacgcacgctcagacacgcagcctgtccctagtgccgcaattccctgtttcaggcagcacagtgagggcatgtgcgtgtgtgcatgtgcgccaaggctgggtgatcaggcctgaggggctcatccaaaggcagggagcgcgactgtcctgcacttggacgcttgcctgcaagtgtgaggtccaaggcagagggcgggtgggtcacagtcccctgctggtgggatggccacgtgcaaggacagagggatacaggtgcgggaagaggggccaggccggccttagcaagcccagggagtcaggctctacaggagataggcagggcatggcacaggccctggccagcaggctggggtgggggtggcaaaagggcagggagagctgggtgccactacccccttctcctctctgggcctcctacccttgccctggctgggctcgctccactactcagaggccgagcttggctgcaacttgcctgactccaggtcccagcatccttctcctaactttgggcaaaggcctttgctctggacctctgtttcccacccatcactgggtcacttcggcttccagaaaccccagtgctgttttgtagtcacaggacacacgcgtgcccatcgctcttgctaagctgggcccagacaggcgggcgggcatgggacgtgcatgcagtgtttccagtggcggcgccaggcgggccaggccacaggcttcccaagcctggctcaggtacccagtgttccagccccgggccagaggggaggagcgggagggctgcgaggggaggggagggcagggagaggaacagagtggcccattgtgtgtgtgtgtgttcgtgtgtgtgcacacgtggggggcccacacaatgtgccgcttgtgtgcccgacccgcaggggcagccagggctccttacctcgaggagaccccaaggcgcaggcctgctttcccacctcggcggccaatcgctccttccagcccaggagtctggggggcagcctcgcgggcatcgccggcccccgcccctcaccctgccaggcacatgactgcgagaggggtggaggcggacggcccagccaccgagcagcagcggtggaccaggggcggccccgaccccgcgtgcccaggggccaaccgctgcccggacttcacccctccgcggcggctccgggggttgggggtcgggcgtcaggggccggcggcctgctgggggagggggccgcggggggcgggggagctcacctccgccattcttgtagcacaggtaggggaagcgccacacgttgcccaggcccacggcgaagcccacacacgacatgatgaagtccatctggcgcgtccaggtctatcgcgcgcggcggcacggccaggccgccgccgggtgtccccaggcccgcggg

SEQ ID NO: 15940 - DNA, 2300 bp, Homo sapien
tgcaagtgtgaggtccaaggcagagggcgggtgggtcacagtcccctgctggtgggatggccacgtgcaaggacagagggatacaggtgcgggaagaggggccaggccggccttagcaagcccagggagtcaggctctacaggagataggcagggcatggcacaggccctggccagcaggctggggtgggggtggcaaaagggcagggagagctgggtgccactacccccttctcctctctgggcctcctacccttgccctggctgggctcgctccactactcagaggccgagcttggctgcaacttgcctgactccaggtcccagcatccttctcctaactttgggcaaaggcctttgctctggacctctgtttcccacccatcactgggtcacttcggcttccagaaaccccagtgctgttttgtagtcacaggacacacgcgtgcccatcgctcttgctaagctgggcccagacaggcgggcgggcatgggacgtgcatgcagtgtttccagtggcggcgccaggcgggccaggccacaggcttcccaagcctggctcaggtacccagtgttccagccccgggccagaggggaggagcgggagggctgcgaggggaggggagggcagggagaggaacagagtggcccattgtgtgtgtgtgtgttcgtgtgtgtgcacacgtggggggcccacacaatgtgccgcttgtgtgcccgacccgcaggggcagccagggctccttacctcgaggagaccccaaggcgcaggcctgctttcccacctcggcggccaatcgctccttccagcccaggagtctggggggcagcctcgcgggcatcgccggcccccgcccctcaccctgccaggcacatgactgcgagaggggtggaggcggacggcccagccaccgagcagcagcggtggaccaggggcggccccgaccccgcgtgcccaggggccaaccgctgcccggacttcacccctccgcggcggctccgggggttgggggtcgggcgtcaggggccggcggcctgctgggggagggggccgcggggggcgggggagctcacctccgccattcttgtagcacaggtaggggaagcgccacacgttgcccaggcccacggcgaagcccacacacgacatgatgaagtccatctggcgcgtccaggtctatcgcgcgcggcggcacggccaggccgccgccgggtgtccccaggcccgcggggccgtcgcccttggcccgggccccgtcgggcccgggcgcgatgagggggcccttcttctggtcgccggacacgctacagatgccgttctcggcgctcttcttcgccatggcccctgcgggcctcacggccgggctggggtcgcggcaccctgcggggggctgcggtcaggcgcggggcaccggcggcaccggggagggccccgagggcgcgggccggccgggggccggggggcggccgggccgggggacggggcggcgggagagcggcggggtgcgggtcacaggcggcgcagtcagaagcagtccacgaagcacttgaaagtgagcctgaagaatctcctgtgtgtcaggggcccgggggcgcgcgggcgtcggcggggcccggccaggcgtccgcggcagcggttccggaggctcttgcccgcggctcgggcggtggcggctgccacggctcctcggccgacccgaggctcagcctagcggggcgcgggcgatatcggcgctcgcagtctgcaagcggcggctggagcaggggcctgtggcccgcgcccccggccccgaccggggcccgcggcggctgcccggctcacccgagactccggtggcggcggcggcggctcaggcgcgcctcgccctctccttctgggcggcggcggctgcagccgctctcggggccgcggcgggctcagcgactcgccaccgcgttccgactgttcctctcttcccggttcccggccggcagccgcttaaaaaccgactccggggtgatgtcactatcgccccacccccacggctggccggcccccctctccctcccgccctgctcgtcacagtccgcccaccttgtccctgccctcctcccggggaggagtcgccgctccagcgggaggcaggatggttgctacctggggcggccgccagctcctcccgcagtgctccgggccgcccctcaccccagggtcgcccgctcctagtgtggcccaggcttcccggcctgcccctcccagccctaggaagacgtcccccgggccccctcagccctccgcctccccttctctccctttctccc

SEQ ID NO: 15941 - DNA, 2300 bp, Homo sapien
cccccaaccacacacaccccttgaggctcctcctccaagcctgggtagggacactgcccctccctcacccaggaagctcagtctggcttgggccagaactgcttttcttcctaaagctggagggatggccgagggcttagcttaacgggatgagccatctggggactgcagtgtccacgatcagatcagggagcttgaagttgaggggggcacactttacctcccaggccaggagaatgaccacttccttccccaccccacccccaggctactcttgccctagaaaattctaaccaagctgctcagctggtggcggagaggcagcccaacaagctggctcttgctgggtaggcctgggggtcctggggagaggaacacggggtgggtggggggcgggcagccaggacctcagacctgaggcctttggggaagggtctgtgcacccgccaggcaccagggggcagccttgccttattcccgctccagtcccctcaagtccgaagcccctacccactctcatgccaggcaggggtgggggccaccggggtcatttacccgggccccttctctgccttggtgacaaagtggagccttgctcatcagtcaggcaggctcccctctggccactgtggagacacagaggcctgtcacctgaagagctggtcccagcctccagcttccagggtagccgggaagctctagcccccagtgggcagcggtggacagagctcaaggaaggagcgagcaccgggaggagacggctgcagcctgccaggagcggggagaaagggagagaaggggaggcggagggctgagggggcccgggggacgtcttcctagggctgggaggggcaggccgggaagcctgggccacactaggagcgggcgaccctggggtgaggggcggcccggagcactgcgggaggagctggcggccgccccaggtagcaaccatcctgcctcccgctggagcggcgactcctccccgggaggagggcagggacaaggtgggcggactgtgacgagcagggcgggagggagaggggggccggccagccgtgggggtggggcgatagtgacatcaccccggagtcggtttttaagcggctgccggccgggaaccgggaagagaggaacagtcggaacgcggtggcgagtcgctgagcccgccgcggccccgagagcggctgcagccgccgccgcccagaaggagagggcgaggcgcgcctgagccgccgccgccgccaccggagtctcgggtgagccgggcagccgccgcgggccccggtcggggccgggggcgcgggccacaggcccctgctccagccgccgcttgcagactgcgagcgccgatatcgcccgcgccccgctaggctgagcctcgggtcggccgaggagccgtggcagccgccaccgcccgagccgcgggcaagagcctccggaaccgctgccgcggacgcctggccgggccccgccgacgcccgcgcgcccccgggcccctgacacacaggagattcttcaggctcactttcaagtgcttcgtggactgcttctgactgcgccgcctgtgacccgcaccccgccgctctcccgccgccccgtcccccggcccggccgccccccggcccccggccggcccgcgccctcggggccctccccggtgccgccggtgccccgcgcctgaccgcagccccccgcagggtgccgcgaccccagcccggccgtgaggcccgcaggggccatggcgaagaagagcgccgagaacggcatctgtagcgtgtccggcgaccagaagaagggccccctcatcgcgcccgggcccgacggggcccgggccaagggcgacggccccgcgggcctggggacacccggcggcggcctggccgtgccgccgcgcgcgatagacctggacgcgccagatggacttcatcatgtcgtgtgtgggcttcgccgtgggcctgggcaacgtgtggcgcttcccctacctgtgctacaagaatggcggaggtgagctcccccgccccccgcggccccctcccccagcaggccgccggcccctgacgcccgacccccaacccccggagccgccgcggaggggtgaagtccgggcagcggttggcccctgggcacgcggggtcggggccgcccctggtccaccgctgctgctcggtggctgggccgtccgcctccacccctctcgcagtcatgtgcctggcagggtgaggggcgggggccggcgatgcccgcgaggctgccccccagactcctgggctggaaggagcgattggccgccgaggtgg

SEQ ID NO: 15942 - DNA, 2300 bp, Homo sapien
cccagctactagggaggctgaggcaggagaatggcgtgaacccgggaggcggagcttgcagtgagccgagatcgcgccactgcactccagcctgggcgacagagcgagactccgtctcaaaaaaaaaaaaaaaaaaaacaattccatgatgtatacatgtatcatagcatgtgtgaagcgacctacctgtatgaaggtgaggtgacctggtcacgtgacagtgaggtgacctgggggatgtgtgaggtgacctgggggatgtgtaaggttacctgggggtatgtgtgaggtgaacttgggctcatgtgaggtgacccagggtgcatgtgtggtggcctgggtgcgtgtgaggttacctggacatgcatgaggtgacacggggatctcatgaggtgacttgggcatgtatgatgtgacctaaggcatgtgtgaggtgacctgtgggacgtgtgaggtgacctgtgggacgtgtgaggtgacctgggggatgtgtgaggtgacctgggggatgtgtgaggtgacctgtgggaatgtgtgaggtgacctgtgggacgtgtgaggtgacctgtgggacgtgtaaggtgacgtgggggatgtgtgaggtgacctgggggacgtgtgaggtgacctgtgggacgtgtgaggtgacgtggcggatgtgtgaggtgacgtggggaatgtgtgaggtgacctgggggacgtgtgacgtgacgtggggaatgtgtgaggtgacctggggaatgtgtgaggtgacctgggggatgtgtgaggtgacctgtgggacatgtgaggtgacctggggaatgtgtgaggtgatgtgggtgcgtttgaggtgacgtgggggatgtgtgagcttagcaggagtgtgtgtgaggtgacatggggaatatgtgaggtgacctgcctgatgtgtgaggtgacctgagcacatgtaaggtcacctaaggcgcatctgaggtgacatgggggacgtgtgaggtgacctggggaacgtgtgaggtgacctgtgggacatgtgaagtgacctggggaatgtgtgaggtgacctgtgggacatgtgaggtgacctggggaatgtgtgaggtgatgtgggtgcgtttgaggtgacgtgggggatgtgtgagcttagcaggagtgtgtgtgaggtaacatggggaatatgtgaggtgacctgcctgatgtgtgaggtgacctgagcacatgtgaggtcacctaaggcgcatctgaggtgacatggaggatgtgtgaggtaaccttgggtgagtgtgaggttacctgtgggatgtgtgaggtgaattggaacttgtgtgaggttacctgggaaatgtttgaggtgacctgcgggatgtgttaggtgacattggggatgtgtaaggtgactcagggcacatgtgaggtgaccttggggatgtgcaaggtcacactgtgtgagtgtgaggtcatgtgggatatttcaaactttgtaaggaaagcctgcaacaatatatggctctagaagcttcacactccaacactgttaatgcgcacatcctcaaggaactctaaatgtttccaggttagcttaaatgccatggagtgacacctgccccaggtacactcatatatgcatcctgggtctccctatcaacccctatcctcaaattttcagttcatgtttgctccatgatatcaactctgatatgctgaggttttttttttttttttttttttttatctgtagttgttcaggtttgctgtttcactctcattactctgggctcagtcctctcctcaggtgtcccacttcagagcttgctatgtaataggagacatgcaaataggaccctcccttttctgatgaaaagcagcccagccctgaccctgcagccgtgggagagaagccccagccctgggattctcaggtgtttctattgggtcaacagcaataaacaaattaccatggaatttgggctgagctgggtttttcttgctgctattttaaaaggtaattcatggagaactaaggatattgagtgtgaggggacatgagtgacagaacagtggctatgtgtggcagtttctgaccaggatgtctctgtgtttgcaggtgtgcagtgtgaagtgcagctggtggagtctgggggaggcttggtccagcctggggggtccctgagactctcctgtgcagcctctgtattcaccttcagtaacagtgacataaactgggtcctctaggctccaggaaaggggctggagtgggtctcgggtattagttggaatggcggtaagacgcactatgtggactccgtgaagggccaatt

SEQ ID NO: 15943 - DNA, 2300 bp, Homo sapien
tgcacagactctatctgaggaggagaacatagggaaactgaaagacaatggcagagaaaaagacaaggacagtaggaaaatctgaagcctctgacataaattttttgaagacaaggtcttggcaaatccattgacctcagattcttttatcatggggcattttcagggttcctagctgagaaaaaatattcatgcacttcccaagtctccacttgtattctgtttgccttagatcgctaagagaaaaaagccataaacctaggcctagtgtctgtgtaggaggtgcttttataggctagaaaatagtaagaaaggagaatatgtgttattggaatagcatatacaaaggtgtctttattctgaatgtatctgtacctgcagatattctcagatgcaacattcaactgcaggagcccaacgaagaaactaggcattccccaaatcctacaagtttttgtattcattatgtgtccactgattcaggaaatgtgaagcttcagaaaagggactcccttctgagtcatagaatcttttctgtgggtatccctcagtaggtttagtgaggttaatcaattgttaaaagacatggtgtcggcagcatatggtgtcactggcagagaattctaaaccaggacacagccacttcatgctgggctagagactctgaaggaaaatatctgtgagccccgacagaaacctcattgcaaggcaagagcctgggtgaaagggggcacttgggagccaccaagcacaggttccagccctggagcaggtgcacagctggggtggaagtttcctctcagggcctgggttttcctttgtcaggaaaaaacaatctaaaataactgttcaaaaagtcgctgacgtgctttaaatattctatcacatcaaaaccattcatataacttaaggcactgagaactattttttgaagtgggtttctagaactataatatcttagtagtgagaatatgaaggatgggcatgtttttactaattctatgggtacagattagttgaagaaacttcattcctatgaataagaaattcagatttcagtgttaagtaatgttgcttacattgtatgagtgacagggcagtagtggatctgagagtgtggcaggtgcacagaccaagtgagtcagaaatcaatatggaaaggtgagggtctgtggatatgaactgaaagtatgtaaatacttgacaaaatactaataagtggagttcaaaaataacccaaaattgttctaaacacaaattccttgacaattactttgggagtagagagttcataatggactccaaactcctgctttatcttcttctgattcccattttctgtgagatgagaaaatcagctctaattatgcatcacagggcaaatctgtaaaccaacagtgttcaatagaattgaagatcctgggggatcaggacatgagtcaggtgctggagacagtgtctcaggagcacccagtagatctcagaggtccctcctggacactcatgtgggacataagcgtcactttctcagagtcaccaatgagctgtgctggtgcctgatgggtccaggaaaagaccaaggcacctgctcagtgtgatggagagtgatggttccaaaaatgatccaggtggtctctatgctaatcaaatataggcttacagtgaggagcctgttctatacgggcttattcttcagtgaaaggatgtctgtccacaaatgtttgtaaatggagcagggcatgcatttcctcaagcaggattaggacttcgaccatcttcatctcactcttgtaaggctgatgtgtcatttatcttccctttcttatcacggattgggctttgagttaagaaaggctttgtcttatgaatatgcaaatatactgatatccactgaggtaaatattttctgtgccctgagataatcacctgagagaatcccctgagagtacatctcaccattggctggacctgcaagatcctcttcttggtggcagcagccacaggtaaggggttcccaggtcccagtaatgaggaggggattgagtccagtcaagggggctttcatccatcctgtgtcctccccacaggtgcccacttcctggtgcagctggtgcagtctggggctgaggtgaagaagcctggggcctcagtgaaggtctcctgccaggcttctggatacaccttcacctactgctacttgcactgggtgcgatgggcccctggacaagggcttgagtggacaggattttagttatttgagatatttttcatacaacatttattctgcaagcaaatttcag

SEQ ID NO: 15944 - DNA, 2300 bp, Homo sapien
agcatggtcttccaagtgttcctgttccttcccttctccaagtcagagtgtctcttcccagccacagtggtttttcgtcagtgtcctcagcttctgacccactgtccttaccccacagactcaggacttcattcctcaggaaagagatgggaggtgattctgggtagagtttccttggtgtcctctgtttccttgtgttctagttgattctaccagtgcctgaaggacacaagatttaataaatgtctcccacatatcgtgaagggggattcagcattgaacacagctgctattcttcctccccagtcaacaccacaggacagcaggtgggtgacttgtctgggatttccccaattctgtaggaaaagcctgcaagtgccgggagtttcacactctcacacccttagcacatacatcctcaacaactcatgaaacatttccaggttagctttttcctatcttcaatactatacaacgagtggcacctgctccaggtactctaataaatggaccctagttctctctgcaggcccctatttctcagatttcagggtttttttctctgtgacatcaactcagatatgttgaagcgttcatttttcgtagttgttcaagtttcttattaatgaggtcagaagaagatcattttctcaatttttttacattcccatgcttagtatttgctttctaaataaaattcagaaacgaagacaaaatatcaaatatccactatttggtgcattgttaaacaatttgagaaatattcatatactgaaatacaatgaacaattgaaatcaaggcatgcctcagtcacataagaatgtgaggacattatcaaataattgtgctgagtgtaggaagctaaagaattcacagtaaatctcctgtgatttcatttgtataaattgtagaaaatgcaactattctaaattaacatggagaagatctgaatttttctgagaaaagtgtggtgagagtaacaagatggtgaaataaaattacagggaagtgagagaaaaaaattagaggttaatttaattgctaatagcatgattgaagtgctgattcaaaggctgcacacatataccaacattttccaaattgtacactataaatttgaattcactatggattgaatttttgaataaagcagtaacaaaaaaatgagtatattggctgaggaagaggaagagatgaatattgacacttgaataatcacggactcctgaaaatacacacatgtgaacactgattgcatatttcaggtaaacactagaaaaagcaaagtcacataaagttgttatgacaggtgggacatcctgaaaacctcactaggcatgtcccacatcgccctggagctgtctcaggggagcagtctcctccagtgtttagaggcacagacacaggtaatagggctaactctggccagatgtgtgatattggacacattgcacaactgctctgttatgtatgtaattcatcttctctacaaatgtaacattgacacttgcactgaatatattctgcaaatgtgtaaacattaaataagatgatgactgctaattgatcatcaaggcacaatcacataatctgaagttatattttcctgagagataggattacctccaatgttttctgggatgctctcatcttctctgggcactgccctctcctcagctgtcccaccacagagcttgctatatagtaggagacatgcaaatagggccctctgtctgctgataaaaaccagcccagccctgaccctgcagctctgggagaagagccccagccccagaattcccaggaatttccatctggtgatcagcactgaacacagaggactcaccatggagtttgggctgaactgggttttccttgttgctattataaaaggtgatttatggcgaactagagacactgagaggacgtgagtgagataagcagtgaatatatgtggcagtttctgaccaggttgtctctgtgtttgcaggtgcccagtgtgaggtgcagctggtggagtctgggggaggcttggtacagcctggggggtccctgagactgtcctgtccagcctctggattcaccttcagtaaccactacatgagctgggtccgccaggctccagggaagggactggagtgggtttcatacattagtggtgatagtggttacacaaactacgcagactctgtgaagggccgattcaccatctccagggacaacgccaataactcaccgtatctgcaaatgaacagcctgagagctgaggacacggctgtgtattactgtgtgaaacaca

SEQ ID NO: 15945 - DNA, 2300 bp, Homo sapien
gctcacatggttttgggcattgtctctaactacattgcttccccgatagtttgacccattctaactaactccttttctctttaaaaaagcaaacttcatttgtatgacttgcaattgtaaacgacaccaattggccagttatcattcaaattctctgttacttaatcctgccttttcctgacatatgcaactttcgcctaaaaaattggacactttgttgcttactcattgtctttacacattttaaaatgttgctttgtgcccccaatccctaactacattttcaatgttttgcaagtggagtccatgtgttcttgatttacatgaagctcaaaataatggttatagtaactagtacttcataattaagcaaaaagctcttattgaaaaatgacagaactatacatagggatgagaacatggagagatatttcgtgagatcacaaagttatggtatggcagaagtagaacgctgagtagagactctgtgttcccaatcattatttctaccaccagctttctattttgatgttaataatgttcttatgtgggaaaccctacatatttgccaatgtttagttcattgacaaagaaatagaaagagcttcaagaacactctaatctttaaaaaataaaatacctataattggccatacgaaacaattggtacttgacatatactgagatcgttttattttgtgctagacaaatgaagtcatagaacagaatgtgctttaaatattatgaatagtgcttgcatgtgtgtgtgtctatagatgcatattaggccgctgaaaagttttattattctttccaggagagagactgccaacttttgaacctaactagaacaagtatattgcttcttcatatttttattaaggcaaagagagtctagttaaaaataattcaaattgtgttggaaatgctataaattgctgtgaagagagttgctggctgtggcttgtcagagcaaacatattgtacaaatcttaggggagaattagtgcttgtgcattaaaatcaaatcatcttgcagcacaccgagaaaaaggttagatttttaaaataatttcaaagtcatgaaaagagcaaatatgctccacaaagagcctagcaaccctcaatgaccaatgccccttttatatagtttggtatctgaattagaatcctagaatctacaaattcctctgggtgtgggtgctgcatcttgaggattttataacactgccatcaccaagctctcttttgatattcactttaaggagataatttatgggcaaccagagagcataaaccaaagtagatatctatctggatagctagatacatctccatatcattgacaggatacattctggccgagtgtgagtacaacctatggatgtggttggagagaacaagtgttccacctgaatagcagatcaggattatttcttctcatctgctgcaatggctcaatgtgttaaggagaggagcgagacagcaagaaccgcattcattcagtcatacagaccaaaaggaggaatgtcgcccagccctctaaactgacccagaacccagctcatgtctcaactgctacctctcctacttagaaagaagtaactcaaccaaagcagggctctggacaaatatatttttattgatcatatacaaatagatgaagatggacttggatgttaagaaaaataatactatacaaaatcgagagtagacagtcgcccctagacttaaattaagggtgtgtacattagatagtttaatccaatatatcaggtaaaaacttgaacaaaacttttggcctcttccttaaaattccaggatgcatgtcctccaagaagcagaatcaaaatataaataaaagactggcttaagatgaaaggaaaccttacaaacgaaaagaagccagatgagaggcacttaactgagaatgaaaagaaactgagtggacaaaataattatgagaagatgaaccttcaaatcagaaagagggcaaaaagcttatttgatactatgggaactcaaaagagagtgaacacaaatgtgaaaattccaggagtaaagaaaagtagcatagctaaattaagagcatgagaaaatgtatacaattttgagtaataacagaaatcaaaagtaactattgtatgttatattttagtagagcaacactgaagaagaatgaaaacaagaaataatattaaatatgaacatatggagaacagaataatatttttaaaatttttagtttctaagctaatctgaaattttaattttgttttcttatgtaataccagagttat

SEQ ID NO: 15946 - DNA, 2300 bp, Homo sapien
ggagtaatggagtcctggagccaggcggagcagaggtgggcccactggtgccagaatccaatggtgtaaacctagtgaaaaactcattttgttaatgcagatgtattaaacttggattggaaactgtctctactaaaaatgcaaaaaaagtatttaagtggtgcagattaaatataagcaagattgtggagatatttaaaacacaaaattaaaaatgcagttgcaaattactgctatttgaattatagatcattttcttattgcctagaaacaatacatagctaaaattccctaactacttttactacacatacttagaaggttttaaaaatacctgtagtctcagctattcagcagggcaaggcaggagaatcacttgaaggagttttagaccagcctgggcaacgtagtgagggcagggcccatctcttaaaaaaaaaaaaaaaaaaatgcggaaatgtttcttgaactaccttaaaagccttcttgcacttctcactttgaattagtttgaattaatttacaaactgcaatatattttaaaggagcttattgtagaaaataaaataagttgataaaaaaataaggatttatctttagggatttgtctttagggacttgttaccaagcatgtctattttcccttccgcagcttctccaaacaggctggtgtacagggagcaacaccggagctggtgcatgctggggtttgtgcggagcatcgctctcacgccgcaggtgtgcagcgccctcagctccccgcagtggatcacgctgctcatgaaggtcatgaaagggcacacacccttcactgccgcctcgctgcagaggcaggtaacgtgctgccaggcaaaaccagttccctgagagaggcatccatgtactgaagttccctgcccttagagtcgggcctttattcagtaaggagtgcagaaagggtctagaagtaacagggtagattttctggaggcaaggggcagtggtccttgataattggtaagttgctaacctttagtttacctgcttttaagtggtaaatcctgcaactacttgctcatctgcttcacagaatttgtagcataattgtcttaagaattaaactaaaaataattcttttttaattaaacacatgcatctgtaatgttgcttttttctaaagtccctgacaatcctaatcactaatcaacttgagtgtaattacctggctgtaaaataacgaatctcaaaattttcacatgattatttgcattatgagaacagaaaataaagagaggctgggcgcagtggctcatgcctgtaatcccagcactttgggaggccgaggcaggtggatcatgaggtcaggagtttgaaaccagcctggccaacatagtgaaatcctgtctctactaaaaatccaagaaaaatgagccgggcttggtggtgggtgcctgtaatcccagctactcaggaagctaaggcaaggagaatcgcttgaacctgggaggtggaggttgtagtgagccgagaccgtgccactgcactccagcccgggtgacagtgtgagactctgtctcaaaaaaaaaaaaaaaaaaaaaaagaaagaaagaaaagagaaagtaacagtctgtagtttcttaatcagatttttaatgcttgtcattttaaattttcttttatcagatcttagctgtgcatttgttgcaagcagtccttccgtcatgggacaagaccaaaagggcgagggacatgaaatgcccggtggagaagctgtttgacttcttggggagcttgctcagtacctgctcctctgacgtgccattactcagaggtgggtggccgtctcccttccccatgccctggtgaagagcggcacagtgccatcactcagaggtgggtggctgtctcccttccctgtgccctggtgaattgtggcacagtgccatcactcagaggtcggtggccgtctcccttccctgtgtcctggtgaagagcagtgcagcagcttctccccttgtttcctcctcagagtccatgccgaggtggcgcagggtgcgcccgcaggccttgctgactgccacccatagcagcacactggtggaggtggtggtggcactgctgtgcacgctgcactccctgactcagtggaatgggctcatcaacaagtacatcaactcccagctccgctccatcacccacagctttgtgggaaggccttctgaaggggtgagtttgtgttctcagaattaatttagttgaacagtaaacttgtagggattgggcagctccgtgagtgtccctggtcgagctcactgtttggt

SEQ ID NO: 15947 - DNA, 2300 bp, Homo sapien
gaggaggatagctcagaagataattcgggaacggaggaaaaagagaagtaagaatgtaaaaggacagaagatactattaaagcatgtgcttcaccctgcctcgctggacctgtgatttcagagtgaagtttctctactgttgattccatgtgacatttctacctgctgccatcatttttatgtatagttatgattaaatacggaaatctctcctattttttcaaccgatcagacaatgaggcagtttaggaattgagtgtggtatgatttgattactagtaaattgatgttgaaaatgtaaataatctttgctaaattgatgggaacaaggacgtatttttattttattagttatcctggtaatgagatataatgggaacatttaaacttattgccattcttctaaagaaatgttttttgtttggaaatattgagtattctgatacatggagaattataaagggaagctgaaagagttactgacattttcctggaagtagctgtgtaagagtacagaaaattgtagcaccataaagttttacgggagcacagccacacctgttgctttatctgtggttactttttgtgctacagcagcagagttgagtatttccaacagactgcgtggcctgaaagactcaaatgttcactctctggcacttgaggaagagcttgctggctgctgggcttcccctgcttcggggcttctccccttgtcacactctcactttgtcattttgttctgccatggtgatcatttcactcttgttgtttgagccttgcaatttataatgttgttcagatgtttatttgaatgaaatatttgtctttcatgtaaatctaagtatttcctaatttaaaattaatatttaagtgtatgattttttatagtgaatgatgttttaaaacacagttcctaagaagccagaatctacggctgatgaagaaaaaattggaaacgaagagagtgatttagaagaagcctgcattttgcctcatagtccaataaatgtggacaagagacccattgcaattaaatcacccaaggtgcagtgttttctgtgattctgaggttagctgaatagaatcatagcatgtagcaaaggaatccacagtcttgtacctctgtacctgagcatccggagggagggacgggcggttgttagaaatacggccccagtgatggttcatgaacttgacttatgatgtcctggtcagagctgtagctggagaagggtttccttttatttttggtactagattgtatcattaattattcaccattcattccttaaatatattctttgttccagaaacagtgctgggccctgtggctattaatatgaaccacaacttaacttcgtatgccaagctagcctgttccaacatatattagtatagagataagttcacttatatttatagcatagttttaaaaccatgtattaattactaaatttaacatattttaaccaatttaaacctatgagcattatttatattttacttgaataacttttagagcacagtttaatattaaatagggtagactaatgatgaaaattgttttcctttgttaggacaaatggcagccactgttgagtactgttacaggggttcacagatacaagtggttgaagcagaatgttcaggatctttatccgcagtctccactcctcagtacaattgctgaatttgcccttaaagaagagccagtggatgtggaaaaaatgagatagtgcctactaaaacagataacatttgatgagaaatgcttctctgcagtgggtaatatacataacacttaactgtatatgcattgatattttgcagttggagagagcagaggttcgcctggaagggatagatacaattttgaaattgtatctggcgagcaagaatttcttacttccatctgtgcagtaagcgatgttttgtggatggcaaagacttattcctgaaggaatcgatatagggtaaaacgttagcatatttttttcttaactaaggaagctgtggcaacagaatgttgttctgtaacagttagaagtctggcagtgtcccgagtcaaattctttatctttatttgaaagggaacctcttactgattgtttaaaggatgttgatttgatcccaccttttaatcggatgctgctggaagtcacctttggcaagctgtatgcttggactgttcagaacattctaaatgttctgatggatgccagtgccaaatttaaagagcttggtgagtcaacaattgcatcaatgttattttatagtttgcctttaattatgtgttg

SEQ ID NO: 15948 - DNA, 2300 bp, Homo sapien
tgtaaaattgcaaaaaacaaaaaggacttttactttggagagaattatgcacgtcactcagttgctctaacaagtgctaccgtcatgggagcaagaacagtgaccttgtctttcctgagctgccgcttcctttgctcctgtcacatgcactctcacgatgaggggctcattccttgtgccttatggttcaggcactgatgagaaataaaaaagagaaagataacttaatattagtccctcccaaaacttactgggtaattctctcatcctaaatcccctactcatcgtgtaggcttttagcactgctgcttaccagtatgctaaaggtgcagacttaggatcagaagtttgatgaactcaaacaaaaagaccacaatgcatatgggtgctaatcccagtgaaatggagtggcagtaaacaccttcaaccaaagagaaaacagatcacaaataaacaaataatgacacaactcaagaaactagaggaggaagaacttatcccaacgttcccagataataaaattagtaaaaaaaatcggagcagaaatgaatacactgaagattagaaaaacaatagaaaatgtagaaaaattgtaagagcttgttttatgaaaacatgaagttggcatatctttagctagactaagaaataaatgcttaaataaataaaatcagaattaaagggaatacattacaactggtaaaacagaaataaaaaaaggtcataagactgctatgtacacagactcctatgtacaatgatatcccaccaaatgggataagggagaagacatgaatacatttctagacaagtaccacccaccaagactgaagcataaagaaatagaaaatatgaatagatcagtaatgggtaaggagtttagatctgatgactttgttgctgaattttactaaacatttaaaaagaaccaaatctttgaaaaaattgaaggaggaggaatacttccaaactcattttatgaagccagcattacactgatacaaaaaccagagatggacattacaagaaaaacaattacaggccaatatccctgatgaacatagatgaaaaatcatccgcaacgtagttgcaaatgaaattcaaaagcactttaaaaggatcatttattatgatcaagttggatttattcctgggatgcaataatattttaatatgtggaaatcaataaatgccatactccttatttacacaacaaaaagattaaaaatcatgacttttttatgcatgcctaaaattattttgacaaaatttaaaatccattccaaataaaatctataacaaattaggtatagaaagaatatacctcaaaataaagagatatgttctttataagctataggacaatcccatggttaacattattgtcaatggtgaaattttggaattgtttttaagatttattataagaaaaagatgcccactctcactacttctttcaacaccgtattggaaatcctgctcagaatctaagacaagagaaaaaagagcatttaaataagaaacaacaagttcttctattcatggagattaacgctcaggtttttgcagattagatttaacagcatgaaatctgtaccatccaggaatcaaaggatataggactttagggcatcaattattaagaggctataggaaagcagaaatgctcctggatgtttccattgtccacacacaaaatttcaacagaccagccccaggaagtaaaggcacattcctgactactgttagttgatgagcttttcaccaaaagcagagatgtgagacctggcaggtttcaaagacccctcaagtgctccataccttgaaattcacttccacaaagctagaacaccatctgttcctgagggatcaggttatcgtctgtttcttttaggcactggccagtcaggctttagtggacacgaagccacagatttttagtgtaaaatgcctaatctatcataatctttaggtagatatttggaggcctgcacacttaaatgggttggtgaaatgtcataccagacacatggctgggaattgggtttttctcctccgctcttagcagcacctttgtaacccagtgattacccccctcatggctccacggccacatccgcaaaaagggtactggtgaacgtgacattttcacgaagccacagcccatggtcactccctgcaaagctctgaacttgcgcattcccaggccaggccgtggttgtctttccaaggcggctcagcttgtgctttgcttggagagagcggagggcagcagcacagtgacagcgtctgggacctca

SEQ ID NO: 15949 - DNA, 2300 bp, Homo sapien
ttttatgaaaacatgaagttggcatatctttagctagactaagaaataaatgcttaaataaataaaatcagaattaaagggaatacattacaactggtaaaacagaaataaaaaaaggtcataagactgctatgtacacagactcctatgtacaatgatatcccaccaaatgggataagggagaagacatgaatacatttctagacaagtaccacccaccaagactgaagcataaagaaatagaaaatatgaatagatcagtaatgggtaaggagtttagatctgatgactttgttgctgaattttactaaacatttaaaaagaaccaaatctttgaaaaaattgaaggaggaggaatacttccaaactcattttatgaagccagcattacactgatacaaaaaccagagatggacattacaagaaaaacaattacaggccaatatccctgatgaacatagatgaaaaatcatccgcaacgtagttgcaaatgaaattcaaaagcactttaaaaggatcatttattatgatcaagttggatttattcctgggatgcaataatattttaatatgtggaaatcaataaatgccatactccttatttacacaacaaaaagattaaaaatcatgacttttttatgcatgcctaaaattattttgacaaaatttaaaatccattccaaataaaatctataacaaattaggtatagaaagaatatacctcaaaataaagagatatgttctttataagctataggacaatcccatggttaacattattgtcaatggtgaaattttggaattgtttttaagatttattataagaaaaagatgcccactctcactacttctttcaacaccgtattggaaatcctgctcagaatctaagacaagagaaaaaagagcatttaaataagaaacaacaagttcttctattcatggagattaacgctcaggtttttgcagattagatttaacagcatgaaatctgtaccatccaggaatcaaaggatataggactttagggcatcaattattaagaggctataggaaagcagaaatgctcctggatgtttccattgtccacacacaaaatttcaacagaccagccccaggaagtaaaggcacattcctgactactgttagttgatgagcttttcaccaaaagcagagatgtgagacctggcaggtttcaaagacccctcaagtgctccataccttgaaattcacttccacaaagctagaacaccatctgttcctgagggatcaggttatcgtctgtttcttttaggcactggccagtcaggctttagtggacacgaagccacagatttttagtgtaaaatgcctaatctatcataatctttaggtagatatttggaggcctgcacacttaaatgggttggtgaaatgtcataccagacacatggctgggaattgggtttttctcctccgctcttagcagcacctttgtaacccagtgattacccccctcatggctccacggccacatccgcaaaaagggtactggtgaacgtgacattttcacgaagccacagcccatggtcactccctgcaaagctctgaacttgcgcattcccaggccaggccgtggttgtctttccaaggcggctcagcttgtgctttgcttggagagagcggagggcagcagcacagtgacagcgtctgggacctcagaccagtttccacagccacttatgaaagcagacggctccatgggctggaggaggtgggacgctctggaaagaactcgggtgcgagtgggaaagaaaatcgagctgagcagctggaagtcgaagtcgcgtgagtgaggaccagacactctcgatttaggcaaaggcggggtgcacttcccaacaacacatcctcctcactggcgagaccaggcctgcccttcaagttcctctcctgatttaatccccttggcgagggtttggcatgaaatcaatggccagcaagcttggtaaacgaagccgcctacaccgccctccccctccctgcacggccgcgccccgcctccgctcctgtctcaatctgggattgtcctcctgtagccccaccatccaccgtggggaacggtggagagactacaactcccagtatgcaccgcgatgcgcgcctcaccctgcatctcccagcccgcagccagctggcatcctagaccctctgccctgcgaccaacagccgggagcggaccagacaccagaactcccggaacggttgaagacggttccgctccctgtcccgcctttcgcagcccagcagtttcgccctgcgga

SEQ ID NO: 15950 - DNA, 2300 bp, Homo sapien
acatgggattggaggggagggtaggaccccttaaaagaaaggccctagaaattgtccctaccccttcacacccccacaagttccctttgtcatcttccacccaggacctgtcagaatcctgcccttccttctgtctccagatcaaagtcctccaggaaatgcagctgcttcagtgacaagagataatcgtcatcttctgactgaggaggaatttggggtttggttccagtgcatgaagctgcacagtcagaataaaagatgagggcctagcagattagcaaagactaggagaagactctatcttgtggccagcttcagagaacctggggccatagctccctggtcaacattaggcctgctgcatggggaccctgggcaggcagtgggaagcctgaggtgtggctcctggtagcctcacagctgccactattttctgaagctcctcctacttgttttgtcagacgggcccctattccagcaggccagcaacaccctcaagaccaagaacaggccatggtgaatctcagggccattgagtgcctgggctggcaggggcagagtgcctcagggctcagtgacatttggcctgagtgttggctttgggagtcagacagctgcactgggctcccagcttcaccatgaccagtaatgtgtctggggccggggcctcactgctctaaaacttgagacaccatagtgataaattttacacacccttctaactgctttttcttttttatctgtctttctctataatcaccatgtactactgatctctgtttatttaaattaataagcatgttatacagtgtgtattattcttcctcgtgacttctttactacattgtatgattccactcatatgaggtacttacagtagttccattcatagaaactcaaagtagaagagtagttcctagaggccaaaaggaaggtaacgggaacagagtttgagttttgcaaaatgaacaaatttccctatgaatgtggatgatggttgtagaacaatgtgagtatgattaattcctctgtcctgcacttttaaaaattgttaaaatggttaattttatgtatattttaccacaatgtaaaaaaggacttttttaaatgaacaaactgtagatatctgtaacagcataaatatcacaaatataatattgcattaaaaaattgatgtaaaagtatccatactgtgtaattttttatattacactcaaaaatcaaaactgaggttctggcttccactaatgatgaagtagctaactgaactaacactctcacacagaaaaatgatgaatcctgggtaaattattatatatcattatagaaacatttctatatacaatacatacatgaaatatgtgtatataaaaactgaatgcatattttggctatgacttccataggagagataagtattgaagatagaatccagcccatttaacaccatcttttaaaaacaacactcttcacagggacaaaacagaatccagtctttttaatccagtcttgtatacagtctccagggcacaatttccaattcaagggatgcgtgaagacacgtgaaaatgtaataaatacacaagataaaaagcaggcagtagccatctccaagatgtccaagatgtaaacggcagacaagaatttgaaggcagctattataaacacgctcatgagggcaaaggaaaatattctcataaatgaatagatgtgaaacatcagcagagaaaaaatagccatataaaaaatgagaaataaaaataataattttgagcttttctatagttcagaaacagagacatagcaatataatttatccaatctgaggagaggaaaaaaaaaagaagtttaaagaaaatgaacagagccttacagacctgtgggatgactgagtctgagaaaaggtgagagatagaaaaaatcaaatggagtataaaagtaaatcaacaaaatttaaagaaaataaacacagccttagagacccatggaattattgagcctgaggagagagacagaagaattagatgggttggaaaaataaatcaataactaacagctgcaaacttgcaaaaattgttcaaaaacctatttttttttttttaatctaaagatccacgaatcccccacaaaagtacaaataaaaccataccaaggccatattgcaatttaggaaagcagcaggcaggactttcaattgacttgatatgatttatcatttttactatttgtaagaatggaaataagttcttagagttttggtcttggagaaagtctgacgttaaggacaaacgacagttatt

SEQ ID NO: 15951 - DNA, 2300 bp, Homo sapien
tgtaaaattgcaaaaaacaaaaaggacttttactttggagagaattatgcacgtcactcagttgctctaacaagtgctaccgtcatgggagcaagaacagtgaccttgtgtttcctgagctgccgcttcctttgctcctgtcacatgcactctcacgatgaggggctcattccttgtgccttatggttcaggcactgatgagaaataaaaaagagaaagataacttaatattagtccctcccaaaacttactgggtaattctctcatcctaaatcccctactcatcgtgtaggcttttagcactgctgcttaccagtatgctaaaggtgcagacttaggatcagaagtttgatgaactcaaacaaaaagaccacaatgcatatgggtgctaatcccagtgaaatggagtggcagtaaacaccttcaaccaaagagaaaacagatcacaaataaacaaataatgacacaactcaagaaactagaggaggaagaacttatcccaacgttcccagataataaaattagtaaaaaaaatcggagcagaaatgaatacactgaagattagaaaaacaatagaaaatgtagaaaaattgtaagagcttgttttatgaaaacatgaagttggcatatctttagctagactaagaaataaatgcttaaataaataaaatcagaattaaagggaatacattacaactggtaaaacagaaataaaaaaaggtcataagactgctatgtacacagactcctatgtacaatgatatcccaccaaatgggataagggagaagacatgaatacatttctagacaagtaccacccaccaagactgaagcataaagaaatagaaaatatgaatagatcagtaatgggtaaggagtttagatctgatgactttgttgctgaattttactaaacatttaaaaagaaccaaatctttgaaaaaattgaaggaggaggaatacttccaaactcattttatgaagccagcattacactgatacaaaaaccagagatggacattacaagaaaaacaattacaggccaatatccctgatgaacatagatgaaaaatcatccgcaacgtagttgcaaatgaaattcaaaagcactttaaaaggatcatttattatgatcaagttggatttattcctgggatgcaataatattttaatatgtggaaatcaataaatgccatactccttatttacacaacaaaaagattaaaaatcatgacttttttatgcatgcctaaaattattttgacaaaatttaaaatccattccaaataaaatctataacaaattaggtatagaaagaatatacctcaaaataaagagatatgttctttataagctataggacaatcccatggttaacattattgtcaatggtgaaattttggaattgtttttaagatttattataagaaaaagatgcccactctcactacttctttcaacaccgtattggaaatcctgctcagaatctaagacaagagaaaaaagagcatttaaataagaaacaacaagttcttctattcatggagattaacgctcaggtttttgcagattagatttaacagcatgaaatctgtaccatccaggaatcaaaggatataggactttagggcatcaattattaagaggctataggaaagcagaaatgctcctggatgtttccattgtccacacacaaaatttcaacagaccagccccaggaagtaaaggcacattcctgactactgttagttgatgagcttttcaccaaaagcagagatgtgagacctggcaggtttcaaagacccctcaagtgctccataccttgaaattcacttccacaaagctagaacaccatctgttcctgagggatcaggttatcgtctgtttcttttaggcactggccagtcaggctttagtggacacgaagccacagatttttagtgtaaaatgcctaatctatcataatctttaggtagatatttggaggcctgcacacttaaatgggttggtgaaatgtcataccagacacatggctgggaattgggtttttctcctccgctcttagcagcacctttgtaacccagtgattacccccctcatggctccacggccacatccgcaaaaagggtactggtgaacgtgacattttcacgaagccacagcccatggtcactccctgcaaagctctgaacttgcgcattcccaggccaggccgtggttgtctttccaaggcggctcagcttgtgctttgcttggagagagcggagggcagcagcacagtgacagcgtctgggacctca

SEQ ID NO: 15952 - DNA, 2300 bp, Homo sapien; identical to SEQ ID NO: 15949

SEQ ID NO: 15953 - DNA, 2300 bp, Homo sapien; identical to SEQ ID NO: 15933

SEQ ID NO: 15954 - DNA, 2300 bp, Homo sapien
gcccccgtgaacactcttgggtctgacatgaagggaccatgtgagggaggggtggggtgggctgggtccctgcatggggatcgccaaggggtgatggccacgaaatgccagggacccaagattgtcattcacagagggtgaggtggggatgccagaggcgcctctgcctggaacaccctggcttctgtcctagcaggatgctggacgctggccacggtgagggtgatgcaggtgcttttcttgtggggtccctggcccacctcacacgtgagctctcagggaaatggacccccagaactcgtggagggcaggaccgctgggctctgggtctcaccgcagtgctgccgtccacgaggaccccccacttctccagcaaaggtgtgggtgtgcatgcccggccctggcacagcccagagcatctggggccgtggctagggaaggacggggtgcttggggaatgcagtgggtatggggatgtcggaggacactcaggctgtgcaggagcctcaccagggatgtgggtgggggacgctgtctttcgtttcacagccccagggaggcttctgatgtctcagccttgaaccctaattggggggctcctagtgtcagtgtgggaagctgagggtcccagtcagaggtgaacccctcacttctggcccctcactcccatgaccatgggctccagctcataggtgtgtgtgaggggtgtcctgaggtggtgtggggcagacatgctctcccagatgggctccccggagcttggggcagggtggggcctgcaggctgtggctcccagtgtcacttccctgcagcagccacagtcagactctccggccctgcacctgtcctgttgttggggaccctgacccttcgcagacccaggtgggggcatccgggaattcaggggagcacctggtgacagaggacaccttgggggcagcagccatttccctgggaggtgcggccagtctacccactgcctggagcccgcaccgtctctcctcaggggtcatgggaccaccctgtgcatccacctccttcacagccacagctgccagtagattaacggggcgtgtgtgctgctcttggggtggtcccggcccggcccggccctgccctccccaccaagtgcccagggccgccctgcccgcctgtgccctgccctgtagatgctgccacctccctttcctgggggagcattttgtcttgtgtgaggacggggtcattcccatggtcaccacctgtgaccctcccctgcttgcagagggaacagagctgggcctgggcttatccatgtcgggtgcccctgggggacctgggggctcgtggcctcccctgcacacagggctcctcctggcggggcctccgaaccccctcatttaggtgtcgctgcacgtggctcccaggtgtggacgtccccactctggcgagggctccttccttctggggtcgtttgtggaatgtggcctgggtccatggctctgggagggaacagcccaagggtggggacccctggctggggaggaggccccgcagagaggcccagactgtatcccgatgcatctggcgtggccgcggtccccctccagcgccgacgtttgtaaattctgaaaggagccatgctgtggctgagggagccaagcccgtgactgaaaaatcctccaaacattcattcaaaaatacaagtgtgatcgccagaaacgcttttgtacatttacacaaaacattcatacaggccatggcggaggctcctgtctaggactggcaaggcgcccgggagccgccggtcacccttgtgcctacacagaccctttccagaaagatgcaggccctggaactgaggccgagtcaagtcgggaatggcaagtgccggagggtgtcagtcagaacagtgtcagaacctgtcctgttcacgagcggccctacatgtcccccgggcacagagctctaggcaggtccagccacgaacccacagcggcaatcaacacgcttctgtgaataaataaaaatttatcattccatgcaaacacactcattttccacaaaagacaacagtttttacacaagcggcggtgtcccagtggtggccgtggcacgtgtggagcggccccgcagcggcgttctcatgggtggcgtcacagtggctccaggtcctcatccccgcatgcatactcgtacaggtccacggcgcccaggggtgagggcacctcgaagaagggcctctgggccagcggggactgcagcgcactcagcttctgctccacaggtctgagctcggcctcgaacctgcaacgagggga

SEQ ID NO: 15955 - DNA, 2300 bp, Homo sapien
gaagtgctgggattacccacatgagacactgtgcccagccctggtgtatttagtgtttttcataattttagaatgtatgtcttctacttacattaaaaaatagttaactataaaacagcctcaggtaggtccttcaggaagtattctggaagaagaaggcattcttatcacaggagatgacatctccatgcgtgtaattgcccaggcgggagtgcagtggcacgatctcggctcactgcaacctccacctcctgggttcaagtgattctcctgtgtcagtctcctgagtagctgggattacaggtgcacaccaccatgcctggctaagttttgtatttttagtagagatgagggtttcaccacgttggccaggatggtcttgaactcccgacctcaaatgatcttcctgccttggcctcccaaagtgctgggattgcaggtgtgagacaccatgaccggcaaaattttttaagatacatttcagtaagctaaggtgaatttattgaagaaaagctttaaaaatttttggtgtagcctaagcatatggtgtttataaagtctacagtagtgtacagtaaggtcctatgccttcacactcactgactcatccacagcatcttccagtcctgcaagctcatttcatggtaagtgccctatacaggagtaccattttaaaatctcttatactctattcttactgtattttctctatgttcaggtacacaagtacttacattgtgttacaactgcttatggtatattcagtaaagtatcaggctgtaagggtgtgtagcctaggagcaataggctacgccatacagcctaggtgtgtagtaggctatacaaggtttgggtaaatgcactttgctgtttgcacaatgctgcagtcacctaaggaggcatttctcagaaccatcccatgattaagagaggcatgatcatatagtcatcatcaccctgaaagctcagtctaccctctgcagtgctactgccacactccccttttgcacatgtagaaatcaaggatctttggctcctctgagtgacttgttcaaggtttctcagtttccaagagatggaggtgggacttgaattgagatttccctttcttgagaacctgtggtccttaaccattaaaaccacttaagaggtcttctctcttgatcactacctactaagtgctaggcgcggtgctgaggcgttctcttgattattatattgagtctttagatttaggagaaacaggctgagcgtgctggctcacgcctgtaatctcagcactttgggaggctgagatgggaggatcacgaggtcaggagatggagactatcctggctaacaccgtgaaaccctgtctctactaaaaatacaaaaattagcaggcgtggtggcaggcgcctgtattctcagctgctcgggagactgaggcaggagaatggcgtgaacccaggaggcggagcttgcagtgagccgagatcgcgccacagcactccagcctgggtgacagagcgagactgtctcaaaaaaaaaaaaaaaaaaaaaagatttaggagaaacaagtcccgaagccctgaccctaacacgcaagggttagtggagatgtgggacttgaactcagcttctccgttgactctggctgtctccctgacgcaggcatgtgctcgcacacctccaaggtggcgatcccgcccccttagtagcgtccttagctaggtacttcttgcggggaagttcctcttggcccagaccctcttcctaggccccgcgtggtgggggaagcgaaaggggcagtgtggggaagtggctgaggggttgggtccggggtggtctgcagagaggcaggcggcggtgcggagccgggaaccacgcactcacccgccgagtccgacgggcccggcaggggtgggcaaggcactgggaacagccgccagctctagagggcgtgaggcggggcgcacggggagggggtgcggctaacgcgcgcgtgcgcggttcatgtgtgggcccgcgggggcgcgcgcgtggttagcgggcagcgagggtcgcctgggcggtgcgcagcacggcgggaacatggcgcgcggaaccggcgcgcgcgcctagctggcgggaccgttagatcgaggcggatgcggcccggaccccgtggatatggagcagtcgccgccgctggcgccggagcccacccaagggccaaccaccgcaaggagctgaaggcggcgggagcccgagtcgccgccggcgtcggtgccggtgagtgcgtgaggggctggggcccggagactttctttgtgaaactc

SEQ ID NO: 15956 - DNA, 2300 bp, Homo sapien
ccgcccaggctggtctcaaactcctgacctcaaatgatctgcccgcctcagccacctgaagtgctgggattacccacatgagacactgtgcccagccctggtgtatttagtgtttttcataattttagaatgtatgtcttctacttacattaaaaaatagttaactataaaacagcctcaggtaggtccttcaggaagtattctggaagaagaaggcattcttatcacaggagatgacatctccatgcgtgtaattgcccaggcgggagtgcagtggcacaatctcggctcactgcaacctccgcctcctaggttcaagcgattctcctgcgtcagtctcctgagcagctgggattacaggtgcacaccaacatgcctggctaagttttgtatttttagtagagatgagggtttcaccacgttggccaggatggtcttgaactcctgacctcaaatgatctgcctgcctcggcctcccaaagtgctgggattacaggcgtgagacaccacgactggcaaaatttttaagatacatttcagtaagctaaggttaatttattgaagaaaagctttaaaaaaatttggtgtagcctaagcatatggtgtttatgaagtctacagtagtgtacagtaaggtcctatgccttcacaatcattgactcatccacagcatcttccagtcctgtaagctcctttcgtggtaagtgccctatacaggagtaccattttaaattctcttatgctctattcttactgtaccttctctatgttcaggtacacaagtacttacattgcgttacaactgcttatggtacattcagtaaagtatcaggctgtacaggtgtgtagcctaggagcaataggccatacagcctaggtgtttagtaggctatacaaggctatacaaggtttgtgttaatgcactttgctgtttgcacaatgctgcaatcacctaaggaggcatttctcagaaccatcccgtgattaagagaggcatgatcgtacagtcatcatctccctgaaagctcagtcaaccctgtgcagtgctactgccacactccccttttgcacatgtagaaatcaaggatctttggctcctctgagtgacttgttcaaggtttctcagtttccaagagatggaggcgggacttgaattgagatttccctttcttgagaacctgtggtccttaaccattaaaaccacttaagaggtcttctctcttgatcactacctactaagtgctaggcgcggtgctgaggcgttctcttgattatgatattgagtcttcagatttcggagaaacaggccgagcgcgctggctcacgcctgtaatctcagcactttgcgaggccaaggcgggaggatcacaaggtcaggagatggagaccatcctggctaacacggtgaaaccccacctctactaaaaatacaaaaatcagcaggtggtggcgggcgcctgtagtctcagctgctccggaggctgaggcaggagaatggcgtgaacccgggaggtggagcttgcagtgagccgagatcgcgccacagcactccagcctgggtgacagagcgagactgtctcaaaaaaaaaaaaaaaaaaaaaaaaaaagatttaggagaaacaagtcccgaagccctgaccctaacacgcaagggttagtggagatgtgggacttcaactcagcttctccgttgagtctggctgtctccgggacgcaggcacctgcttgcacacctccacggtggcgatcccgcccccttagtagcgtccttagctgggcacttcttgcagggaagctcctcttggcccagaccctcgtcctaggccccgcgtggtgggggaagcgaaaggggcagtgtggggaagtggccgaggggtcgggtccggggtggtctgcagagaggcaggcggcggtgccgagccgggaaccacgcgctcacccgcggagtcggacgggcccggcgggggtgggcgagacactgggaacagcggccagctccagagggcgcgaggcggggcgcgcggggagggagggggcgcggcgaacgcgcgcgtgcggggttcgtgtgtgggcccgcgggggcgcgcgtggctggggggcagtgagggtcgcctcggcggcgagcagcacagcgggaacatggcgcccggaactggcgagcgcgcctagctggcgggaccgttagctcgaggcggacgcggcccggacccggtggatgtggagcagtcgccgctgccggcgcccaagccgaccccagggccgacccccgcaaggagctgaaggaggtgggagccccagtc

SEQ ID NO: 15957 - DNA, 2300 bp, Homo sapien
atggtcttccaagtgttcctgttccttcccttctccaagtcagagtgtctcttcccagccacagtggtttttcatcagtgtcctcagcttctgacccactgtccttaccccacagactcaggacttcattcctcaggaaagagatgggaggtgattctgggtagagtttccttggtgtcctctgtttccttgtgttctagttgattctaccagtgcctgaaggacacaagatttaataaatgtctcccacatatcatgaagggggattcagcattgaacacagctgctattcttcctccccagtcaacaccacagtacagcaggtgggtgacttgtctgggtatttccccaattctgtaggaaaagcctgcaagtgccgggagtttcacactctcacacccttagcacacacatcctcaacaactcatgaaacatttccaggttagctttttcctatcttcaatactatacaacgagtggcacctgctccaggtactctaataaatggaccctagttctctctgcaggcccttatttctcagatttcagggtttttttctctgtgacatcaactcagatatgttgaagcgttcatttttcgtagttgttcaagtttcttattaatgaggtcagaagaagatcattttctcattttttttacattcccatgcttagtatttgctttctaaataaaattcagaaacgaagacaaaatatcaaatatccactatttggtgcattgttaaacaatttgagaaatattcatatactgaaatacaatgaacaattgaaatcaaggcatgcctcagtcacataagaatgtgaggacattatcaaataattgtgctgagtgtaggaagctaaagaattcacagtaaatctcctgtgatttcatttgtataaattgtagaaaatgcaactattctaaattaacatggagaagatctgaatttttctgagaaaagtgtggtgagagtaacaagatggtgaaataaaattacagagaagtgagagaaaaaattagaggttaatttaattgctaatagcatgattgaagtgctgattcaaaggctgtacacatataccaacattttccaaattgtacactataaatttgaattcactatggattgaatttttgaataaagcagtaacaaaaaatgagtatattggctgaggaagaggaagaaagagatgaatattgacacttgaataatcacggactcctgaaaatacacacatgtgaacactgattgcatatttcaggtaaacactagaaaaagcaaagtcacataaagttgttatgacaggtgggacatcctgaaaacctcactaggcatgtcccacatcgccctggagctgtctcaggggagcagtctcctccagtgtttagaggcacagacacaggtaatagggctaactctggccagatgtgtgatattggacacattgcacaactgctctgttatgtatgtaattcatcttctctacaaatgtaacattgacacttgcactgaatatattctgcaaatgtgtaaacattaaataagatgatgactgctaattgatcatcaaggcacaatcacataatctgaagttatattttcctgagagataggattacctccaatgttttctgggatgctctcatcttctctgggcactgccctctcctcagctgtcccaccacagagcttgctatatagtaggagacatgcaaatagggccctccgtctgctgataaaaaccagcccagccctgaccctgcaactctgggagaagagccccagccccagaattcccaggaatttccatctggtgatcagcactgaacacagaggactcaccatggagtttgggctgaactgggttttccttgttgctattataaaaggtgatttatggcgaactagagacactgagaggacgtgagtgagataagcagtgaatatatgtggcagtttctgaccaggttgtctctgtgtttgcaggtgcccagtgtgaggtgcagctggtggagtctgggggaggcttggtacagcctggggggtccctgagactgtcctgtccagactctggattcaccttcagtaaccactacatgagctgggtccgccaggctccagggaagggactggagtggatttcatacattagtggtgatagtggttacacaaactacgcagactctgtgaagggccgattcaccatctccagggacaacgccaataactcaccgtatctgcaaatgaacagcttgagagctgaggacacggctgtgtattactgtgtgaaacaca

SEQ ID NO: 15958 - DNA, 2300 bp, Homo sapien
gcttggacacagggggatgttctccaaccttctgaccgagcctccttcttagctatgggtggtgagagtggctctgaagcatggtcttccaagtgttcctgttccttcccttctccaagtcagagtgtctcttcccagccacagtggtttttcatcagtgtcctcagcttctgacccactgtccttaccccacagactcaggacttcattcctcaggaaagagatgggaggtgattctgggtagagtttccttggtgtcctctgtttccttgtgttctagttgattctaccagtgcctgaaggacacaagatttaataaatgtctcccacatatcatgaagggggattcagcattgaacacagctgctattcttcctccccagtcaacaccacagtacagcaggtgggtgacttgtctgggtatttccccaattctgtaggaaaagcctgcaagtgccgggagtttcacactctcacacccttagcacacacatcctcaacaactcatgaaacatttccaggttagctttttcctatcttcaatactatacaacgagtggcacctgctccaggtactctaataaatggaccctagttctctctgcaggcccttatttctcagatttcagggtttttttctctgtgacatcaactcagatatgttgaagcgttcatttttcgtagttgttcaagtttcttattaatgaggtcagaagaagatcattttctcattttttttacattcccatgcttagtatttgctttctaaataaaattcagaaacgaagacaaaatatcaaatatccactatttggtgcattgttaaacaatttgagaaatattcatatactgaaatacaatgaacaattgaaatcaaggcatgcctcagtcacataagaatgtgaggacattatcaaataattgtgctgagtgtaggaagctaaagaattcacagtaaatctcctgtgatttcatttgtataaattgtagaaaatgcaactattctaaattaacatggagaagatctgaatttttctgagaaaagtgtggtgagagtaacaagatggtgaaataaaattacagagaagtgagagaaaaaattagaggttaatttaattgctaatagcatgattgaagtgctgattcaaaggctgtacacatataccaacattttccaaattgtacactataaatttgaattcactatggattgaatttttgaataaagcagtaacaaaaaatgagtatattggctgaggaagaggaagaaagagatgaatattgacacttgaataatcacggactcctgaaaatacacacatgtgaacactgattgcatatttcaggtaaacactagaaaaagcaaagtcacataaagttgttatgacaggtgggacatcctgaaaacctcactaggcatgtcccacatcgccctggagctgtctcaggggagcagtctcctccagtgtttagaggcacagacacaggtaatagggctaactctggccagatgtgtgatattggacacattgcacaactgctctgttatgtatgtaattcatcttctctacaaatgtaacattgacacttgcactgaatatattctgcaaatgtgtaaacattaaataagatgatgactgctaattgatcatcaaggcacaatcacataatctgaagttatattttcctgagagataggattacctccaatgttttctgggatgctctcatcttctctgggcactgccctctcctcagctgtcccaccacagagcttgctatatagtaggagacatgcaaatagggccctccgtctgctgataaaaaccagcccagccctgaccctgcaactctgggagaagagccccagccccagaattcccaggaatttccatctggtgatcagcactgaacacagaggactcaccatggagtttgggctgaactgggttttccttgttgctattataaaaggtgatttatggcgaactagagacactgagaggacgtgagtgagataagcagtgaatatatgtggcagtttctgaccaggttgtctctgtgtttgcaggtgcccagtgtgaggtgcagctggtggagtctgggggaggcttggtacagcctggggggtccctgagactgtcctgtccagactctggattcaccttcagtaaccactacatgagctgggtccgccaggctccagggaagggactggagtggatttcatacattagtggtgatagtggttacacaaactacgcagactctgtgaagggccgattcaccatctccaggga

SEQ ID NO: 15959 - DNA, 2300 bp, Homo sapien
aactcatttctttcaagatttccacgttcctgaaaggaaaataaacctttgggaccaccaaatcactaagccgaagggaagtcaagctgaaaactgtttagggcaaatccatctccattatttcactaaaatgatagctactaaggtttttaaaagctacagacctccttcaaaatttgaccacaagtaaaatccttgtgggccaaagacagacagagtcatttctctgctcatgtaagtcaaatgcatatctgattgctccctttgctctattgtttcactaagccagattaaggcctacgtgactattcctgtaaattgtgcattcagttaaaggctaatcagaaactcaaataatgcaaccatttctctcaaacctacctatgatctagaagccctctccccacttcaagttgtcctgcctttctgaactaaatcaatgtacatcttatatacatatattgattaatgtctcatgcctccctaaattgtataaaaccaagctgtgcccacaagcttgggcacacatcatcaggactccctgaggcggtgtcacaggcatgtccttaatcttggaaaatgaacttcctaaatctattgagattagtctcagatactctttggtttacaggtttgttttttgtttcataacttcaattatttgacatgctaaagaaaatttgccaaatagcacattctcttgtttatgtgttattgttgttgcaaaaataatatattttatatataatttatcatctatgtacattaccaaattgagtagcagatttattagtaagacccaaagtaatgaaaagtttgaataccaattagcaacttagaaaaacaaattatgctacatttgtttgctgaaatgctacctattatttattaaaaaataaacaatacaacataaaaggtttaattctcagtatttctactgagaaaaataagccaaatagataagagtacatactatattatttcattcttataaattctagagaataaaaactagtctaaagaaatatgaaaacatcagtacttttataaagaaatggtagaagaaaagaggagaaaaacaaaaatatgtctgtaaaagagcaagaggaattctgaggtgagttgacttgtcaccttcttgaaaatagagattttctttatcaaagtttactattgtgcaggttaaatatgtgaattttatcatctgtcaattaaaactcataaaatgtattacaagtaaacaagtgaaattttagacaaaaaagggatgataagaaggaacaaatgaatacattaaatatcagatacaccaaaaatttatctgcctgatgcctagatgtttccgtatttttaggtaaatgcagcaaaatcacacaggttctcgtggcaggaagtggattctgcaaaccacactaggcccatttagctctgtccaatagttggttaagagagcaattgaggccagctgtgaggagcataggcccaggtactaggactcactcatgctagacataagcccttagacacatacatagcccctccatgtgtgggttcacttttacatctgtaaacaaagaaaccactgactgctaaataacatcatttatacacataggtaaaaataattaaaaatatgatagttgttaaatgtttatcgcacaacaatttcacattaagacagcattttcccaaacacaatcattgtcatcaaaatcccccaggacgctctcatctactctgggccctgccctttcctcaggagtcccaccccatagcttgctatatagtaggtgacatgcaaatagagccctccctctcctgatgaaaaccagcccagccctgaccctgcagctctgggagtggagcccctgggaaacacttgggattcccaggtgtttccattcagtgatcaggactgaacacacaggaatcaccatggagtttgtgctgagctgggttttccttgttgctatattaaagggtgattcatggagaactagagatattgagtgtgaatgggcatgaatgagagaaacagtgggtatgtgatgtgtggcaatttctgacctttgtgtctctctgtttgcaggtgtccagtgtgaggttcagctggtgcagtctgggggaggcttggtacagcctgggggtccctgagactctcctgtgcaggctctggattcaccttcagtagctatgctatgcactgggttcgccaggctccaggaaaaggtctggagtgggtatcagctattggtgctggtggtggcacatactatgcagactccgtgaagggccgattc

SEQ ID NO: 15960 - DNA, 2300 bp, Homo sapien
ctccagtgttccccatcagtgtcatcacctcccagatctgctgccctgccctgcagactaaagctctgattccataagaaagagagttgtgtctcaacagaacttcgtggcagtgacctctgttcccatctcaattcctgaggagttgcaccagtgcccctagggtactggttttggtggttcccctgcaaagtaatttttagttctgtagtggatataagggagtcgagtctgaatgcctttcaaaaatgggggctcttgttctctcccagacagacactttgggaaaggaagattttgtgactgccccttttttggggaaagggattcaagaggatagaaaagctcttcagtatgtggtcccttagaatttcaaactacaacaagctaaccatattcaatttcaagcaatcccatatatatttgtatttttatctttaacagcctatatttcatacgccagactctgccttaggtaatctcatatgctggctttgttactctctacaagaacttgcttcttgttaaatttaagatttttttttaacttcagttatcctaagcattcagaaatttgcaaaatttcatcttgactgtttatctgttattgttgatgtagttgtaagaaaaaaagaaaatatattcctcatttatgtacattttcaagttgagtagtagatttttagtactaccagagtaataaaataatttgaacattgttaagctgcttaacagaaaatcaaattatggtaaatttgttcaatggaatactacacaacatttataataaataattgtctgatacatgcaacaagaaggtaaaatatctaagtatttttgctgagtaaaataaaccagacaaatgagaagatttaccatataatttcatttatataaattctggaaaataaaaactgaacttaagcaatataacaacaaggtaaaatatctaagtattgatgttcaggaaaataaagcaaacaagaatatgtactatgttattccattttaataaattctgataaattaaattgaatctacagcaatataaagaagatcagaatttaccatttggggaaatggtagaagaagggaagaggaaaggaggaggaatatggaagaatgagagggaaattttgagaattttctggttcaccttgataactaggatggttacatcaggtttatcaattgtacactttaaatatgtgaagtttattatcagtaaactgaaatttataaaatttattaccagcaaacaaatgaaaacttgcacaagaagtaagtgatataaagatagaaaaaatactaaatttcagaaacacctaataatttatcttcgtgaaccctagttctcaccatatttttaggtgaatgctagaatgcagcaaaattacacatgttctcaatacagaaagtgggtttcacaagccacactaggcatgcccagctctgtcctggagttgggttagggagtaatatagggccagtggatgaggagcacaggcccagatactggggctcactaacctcaggtatgagctcttagatacatacaaagcccctccacgtatgggtttacttcaccatctgtaaatagagaaaccattgacctctaaaaatatgatttacacaaatatgtaaaaatgtaagagagtgattagtgcaaagtgtttatcacagcacaatttcctaataagacagcaagttttccaaacaccatcattgtcatcagattcttgcagggcatcattaccttatctgggcactgccctctgctcaggcgtcccaccccagagcttgctatatagtaggtgacataaaaatagggccctccgtctcctgatgaaaaccagcccagtcctgaccctgcagctctgggagaggagccccagccttgggattcccaagtattttcattcagtgatcaggactgaacagacaggaatcaccatggagtttgtgctgagctgagttttccttgctgctatttttaaaggtgacttatggagagctagagagattgagtgtgagtggacatgagtgagagaaacagtggatatgtgtggcagtttctgaccttagtgtctctgtgtttgcaggtgtccagtgtgaggtgcagctggtggagtctgccggaggccttggtacagcctggggggtcccttagactctcctgtgcagcctctggattcacttgcagtaacgcctggatgagctgggtccgccaggctccagggaaggggctggagtgggttggccgtattaaaagcaaagctaatggtgggacaacagactac

SEQ ID NO: 15961 - DNA, 2300 bp, Homo sapien
agataccatctcacaccagttagaatggtgaccattaaataggaaacaacagatgctggagaggatgtggagagatagtaacatttttacactgttggtgggagtgtaaataagttcatccattgtggaagacagtgtggcgattcctcaaggatctagaactagaaataccatttgacccagcaatcccattacttggtatgtaccccaaggattgtaagtcattctactacaaagacaaatgcacccgtgtgtttattgcggcactattcccaatagcaaagacttgaaaccaacccaaatgtccatcaataatagactggataaagcaaatgtggcacatatacaccatggaatactatgcagccataaaaaaggatgagttcatgtcctttgcagggacatggatgaagctgacaaccatcattctcagcaaactaacagaagaacagaaaaccagacaccgttgttttcactcgtaagtggtagttgaaccatgagaccacatggacacagggaggggaatatcacacactgaggcctgtcaggaggtaaagggctaggggagggatagcattaggagaaatacctaaggtagatggcaggttgatgggtgcagcaaacaaccatggcgtgtgtatacctatgtaacaaaactgcacattctgcacatgtaccccagaacgtaaagtataatttaaagaaaggattacatattccattaaatatctatgagaaatcagtgactcctgaatatatacatgaatacacgctgggtctacctgtatttttagggaaacactagaatacagcaaaataatgtcatgattttattaaaaatgggggtttatcaaaccacaccaggcatgtccagctctgtcctggagttggttcagggaacaggtgggtcctgtgtttagcagccatgacaacaagctcacagcgtcagttctagttgacacctcaaaaaggcgaagggatctcaactaaaatgtcatgtggatgtcacatctgtgggtgctgcatactccctcgatgtgaatatggaaaagttaattacctcttgaggggtctgttgagattagtgctggtctctaaggaacacccaaaatggctcgatagagccagaaagcagactggctcagggcttttgtgatggtttcgtggtgggtcagagtgaggcttcccactcacaggaaggggattgcacagtgtgaaacacccactggtgtcaaatgaggaagctcctgcgattcctaactagattcacattgtgtgataaaagacacacaatagacataacttcatggtcggatatcacaaaatgctgttaaaagatgtggtaaaaaggcaactttaaatttttagtcattggagtgtgtataacacaaaaatcattttcaatattttgttaacacatgcatgcaataggacaaaggtatgtgatgagggtaaaatctcgaaagtgtgaatcttccagctaccaagtcatagggtaataactgatgtgtgctgagggaggaaaccatcatgccatagtgctaatggtataacccttggtgaatagagttcaatattttattgaagttttcataatttttatttgaaggtgccatttttcaacatattcagatgcttgtgagtgccattgattctgtatcatatgaacaatggcaataccttccatgtttacataatattaaaaaccatgttaagactgaatatttggtgtaatggtgcatcacattattctagcttccatactagttgttttatttgtttgttttctcctttgttggcatttggtttcaaattcatatgtcaggtctctataatgtaggaatttatttaaaagtgtcttttttgtccattttgatggggcttctaggagacataagaacctcctctgcttgcaacacatttcaaaattacacactaatgtagaacatctgtatttaatcctggtttttagttaattgacaagctctaataagagaattaacttctccattctgggctgattttacatcaggtataggaatataccctaggtgaaagtttgtaccagtaatatgaattattaggtaataacctccacctttatgatttaggtgttattcatcaggaaatagtgttaaatcaggagtctcaatgaaagtattacttaagggatatacaaaatatgttgctaatctacataaaacagatgtgaacacactcttagtatccagccatgtttcctgtcaaccacacagtaactttgacttcacttgggacttgttctaattttcaaattagtt

SEQ ID NO: 15962 - DNA, 2300 bp, Homo sapien
tacaaaaattaactcaagatggatgaaagacttatcaagacctgaaaccataaaaatcccagaagaaaatctaggcaataccattcaggacataggcatgggcaaagacttcaagtctaaaacaccaaaagcaatggcaacaaaagctaatactgataaatgagatataattaaagtaaagtgcttctgcacagcaaaagaaactatcatcagagtgaacaggcaacctacagaatgggagaaaatttttgcaatctatccatctgacaaagggctaatatccagaatctacaacaaatttacaagaaaaaaaaacccatcaaaaagtaggtgaaggatacgaacagacatttctcgaaagaagacatttatgcagccaaaaaaacatgaaaaaatcctcctcatcactgatcactagagaaatgcaaatcaaaaccacagtgagataccatctcacaccagttagaatggtgaccattaaataggaaacaacagatgctggagaggatgtggagagatagtaacatttttacactgttggtgggagtgtaaataagttcatccattgtggaagacagtgtggcgattcctcaaggatctagaactagaaataccatttgacccagcaatcccattacttggtatgtaccccaaggattgtaagtcattctactacaaagacaaatgcacccgtgtgtttattgcggcactattcccaatagcaaagacttgaaaccaacccaaatgtccatcaataatagactggataaagcaaatgtggcacatatacaccatggaatactatgcagccataaaaaaggatgagttcatgtcctttgcagggacatggatgaagctgacaaccatcattctcagcaaactaacagaagaacagaaaaccagacaccgttgttttcactcgtaagtggtagttgaaccatgagaccacatggacacagggaggggaatatcacacactgaggcctgtcaggaggtaaagggctaggggagggatagcattaggagaaatacctaaggtagatggcaggttgatgggtgcagcaaacaaccatggcgtgtgtatacctatgtaacaaaactgcacattctgcacatgtaccccagaacgtaaagtataatttaaagaaaggattacatattccattaaatatctatgagaaatcagtgactcctgaatatatacatgaatacacgctgggtctacctgtatttttagggaaacactagaatacagcaaaataatgtcatgattttattaaaaatgggggtttatcaaaccacaccaggcatgtccagctctgtcctggagttggttcagggaacaggtgggtcctgtgtttagcagccatgacaacaagctcacagcgtcagttctagttgacacctcaaaaaggcgaagggatctcaactaaaatgtcatgtggatgtcacatctgtgggtgctgcatactccctcgatgtgaatatggaaaagttaattacctcttgaggggtctgttgagattagtgctggtctctaaggaacacccaaaatggctcgatagagccagaaagcagactggctcagggcttttgtgatggtttcgtggtgggtcagagtgaggcttcccactcacaggaaggggattgcacagtgtgaaacacccactggtgtcaaatgaggaagctcctgcgattcctaactagattcacattgtgtgataaaagacacacaatagacataacttcatggtcggatatcacaaaatgctgttaaaagatgtggtaaaaaggcaactttaaatttttagtcattggagtgtgtataacacaaaaatcattttcaatattttgttaacacatgcatgcaataggacaaaggtatgtgatgagggtaaaatctcgaaagtgtgaatcttccagctaccaagtcatagggtaataactgatgtgtgctgagggaggaaaccatcatgccatagtgctaatggtataacccttggtgaatagagttcaatattttattgaagttttcataatttttatttgaaggtgccatttttcaacatattcagatgcttgtgagtgccattgattctgtatcatatgaacaatggcaataccttccatgtttacataatattaaaaaccatgttaagactgaatatttggtgtaatggtgcatcacattattctagcttccatactagttgttttatttgtttgttttctcctttgttggcatttggtttcaaattcatatgtcaggtctctataatgtaggaatttatttaaaagtg

SEQ ID NO: 15963 - DNA, 2300 bp, Homo sapien
acaaaagttagccaggcgtggtgttgggcgcctgtaatcccagctactcgggaggctgaggcaggaaaattgtttgaacctgggaagcaaaggctgcagtgaccgagatcgcaccactgcactccagcctcggcgacagagtgagactcagtctcaaaaaaaaaaaaaaaaaagaaattacacatttgtgaggtgatggatattttaaatagcttgattaacaattccatgatgtatacatgtatcatagcatgtgtgaagcgacctacctgtatgaaggtgaggtgacctggtcacgtgacagtgaggtgacctgggggatgtgtgaggtgacctgggggatgtgtaaggttacctgggggtatgtgtgaggtgaacttgggctcatgtgaggtgacccagggtgcatgtgtggtggcctgggtgcgtgtgaggttacctggacatgcatgaggtgacatggggaactcatgaggtgacttgggcatgtatgatgtgacctaaggcatgtgtgaggtgacctgggggacgtgtgaggtgacctgtgggacgtgtgaggtgacctgggggatgtgtgaggtgacctgggggatgtgtgaggtgacctgtgggaatgtgtgaggtgacctgtgggacgtgtgaggtgacctgtgggacgtgtgaggtgacctgggggacgtgtgaggtgacctgggggatgtgtgaggtgacctgtgggacatgtgaggtgacgtggcagatgtgtgaggtgacgtggggaatgtgtgaggtgacctgggggacgtgtgacgtgacgtggggaatgtgtgaggtgacctggggaacgtgtgaggtgacctgggggatgtgtgaggtgacctgtgggacgtgtgaggtgacctggggaatgtgtgaggtgacctggggaacgtgtgaggtgacctgggggatgtgtgaggtgacctgtgggacatgtgaggtgacctggggaatgtgtgaggtgatgtgggtgcgtttgaggtgacgtgggggatgtgtgagcttagcaggagtgtgtgtgaggtgacatggggaatatgtgaggtgacctgcctgatgtgtgaggtgacctgagcacatgtaaggtcacctaaggcgcatctgaggtgacatgggggacgtgtgaggtgacctggggaacgtgtgaggtgacctgtgggacatgtgaagtgacctggggaatgtgtgaggtgacctgtgggacatgtgaggtgacctggggaatgtgtgaggtgatgtgggtgcgtttgaggtgacgtggggggatgtgtgagcttagcaggagtgtgtgtgaggtaacatggggaatatgtgaggtgacctgcctgatgtgtgaagtgacctgagcacatgtgaggtcacctaaggcgcatctgaggtgacatggaggatgtgcgaggtgaccttgggtgagtgtgaggttacctgtgggatgtgtgaggtgaattgggacttgtgtgaggttacctgggaaatgtttgaggtgacctgcgggatgtgtaaggtgacattggggatgtgtgaggtgactcagggcacatgtgaggtgaccttggggatgtgcaaggtcacactgtgtgagtgtgaggtcatgtgggatatttcaaactttgtaaggaaagcctgcaacaatatatggctctagaagcttcacactccaacactgttaatgcgcacatcctcaaggaactctaaatgtttccaggttagcttaaatgccatggagtgacacctgccccaggtacactcatatatgcatcctgggtctccctatcaacccctatcctcaaattttcagttcatgtttgctccatgatatcaactctgatatgctgaggttttttttttttttttttatctgtagttgttcaggtttgctgtttcactctcattactctgggctcagtcctctcctcaggtgtcccacttcagagcttgctatgtaataggagacatgcaaataggaccctcccttttctgatgaaaagcagcccagccctgaccctgcagccgtgggagagaagccccagccctgggattctcaggtgtttctattgggtcaacagcaataaacaaattaccatggaatttgggctgagctgggtttttcttgctgctattttaaaaggtaattcatggagaactaaggatattgagtgtgaggggacatgagtgacagaacagtggctatgtgtggcagtttctgaccaggatgtctctgtgtttgcaggtgtgcagtgtgaggtgcagctggtggagtctgggggaggcttggtccagcc

SEQ ID NO: 15964 - DNA, 2300 bp, Homo sapien
tcattatttcactgtagtgcattaaaatggtagactcacagaagtagaatagaatgttggttaccaggggctggaggggtggactagaaaaggagagattttggtcaaagtgtaaaatgttccagttagacagaaggagtaagttgcagtgttctaatgcacaagatggaaaatatggctatgaatgcattgtatatttcaaaatggctaaaaatgtaaatgttaaaatttttcccactaagaaattatacaggtcgggagtgggggctcacacctctaatcccagcactttcggaggccgaggtgggtggatcacaaggtcaggagttcaagaccagactggcgggggaggagccaagatggccgaataggaacagctccggtctacagctcccagcgtgagcgacgcagaagacggtgatttctgcatttccatctgaggtaccgggttcatctcactagggagtgccagacagtgggcgcaggccagtgtgtgtgcgcaccgtgcgcgagccgaagcagggcgaggcattgcctcacctgggaagcgcaaggggtcagggagttccctttctgagtcaaagaaaggggtgacggtcgcacctggaaaatcgggtcactcccacccgaatattgcgcttttcagaccggcttaagaaacggcgcaccacgagactatatcccacacctggctcggagggtcctacgcccacggaatctcgctgattgctagcacagcagtctgagatcaaactgcaaggcggcaacgaggctgggggaggggcgcccgccattgcccaggcttgcttaggtaaacaaagcagccgggaagctcgaactgggtggagcccaccacagctcaaggaggcctgcctgcctctgtaggctccacctctgggggcagggcacagacaaacaaaaagacagcagtaacctctgcagacttaagtgtccctgtctgacagctttgaagagagcagtggttctcccagcacgcagctggagatctgagaacgggcagacagactgcctcctcaagtgggtccctgactcctgacccccgagcagcctaactgggaggcaccccccagcaggggcacactgacacctcacacggcagggtattccaacagacctgcagctgagggtcctgtctgttagaaggaaaactaacaaccagaaaggacatctacaccgaaaacccatctgtacatcaccatcatcaaagaccaaaagtagataaaaccacaaagatggggaaaaaacagaacagaaaaactggaaactctaaaacgcagagcgcctctcctcctccaaaggaacgcagttcctcaccagcaacagaacaaagctggatggagaatgattttgacgagctgagagaagaaggcttcagacgatcaaattactctgagctacgggaggacattcaaaccaaaggcaaagaagttgaaaactttgaaaaaaatttagaagaatgtataactagaatatccaatacagagaagtgcttaaaggagctgatggagctgaaaaccaaggctcgagaactacgtgaagaatgcagaagcctcaggagccgatgcgatcaactggaagaaagggtatcagcaatggaagatgaaatgaatgaaatgaagcgagaagggaagtttagagaaaaaagaataaaaagaaatgagcaaagcctccaagaaatatgggactatgtgaaaagaccaaatctacgtctgattggtgtacctgaaagtgatgtggagaatggaaccaagttggaaaacactctgcaggatattatccaggagaacttccccaatctagcaaggcaggccaacgttcagattcaggaaatacagagaacgccacaaagatactcctcgagaagagcaactccaagacacataattgtcagattcaccaaagttgaaatgaaggaaaaaatgttaagggcagccagagagaaaggtcgggttaccctcaaagggaagcccatcagactaacagcggatctctcggcagaaaccctacaagccagaagagagtgggggccaatattcaacattcttaaagaaaagaattttcaacccagaatttcatatccagccaaactaagcttcataagtgaaggagaaataaaatactttatagacaagcaaatgttgagagattttgtcaccaccaggcctgccctaaaagagctcctgaaggaagcgctaaacatggaaaggaacaaccggtaccagccgctgcaaaatcatgccaaaatgtaaagaccatcgagactaggaagaaactgcatc

SEQ ID NO: 15965 - DNA, 2300 bp, Homo sapien
gtctggtgaatcagttcccttgtcttcataatcattgaagccaaccaagtttagaggataatggctctccttagaatatgctcatctacctgcagactctgccctactcacccttttccagggtcctgcagaccatcccctcatttccctaagtaccacagagtgggctctgcagctcctgctgccctctgtgtgttcagccctggggctcactagtgttttgatgatgaagtccaaatccccatgtgcttggaccctctgagaccaccctctaggaagatgccattgtgagtgagccctgaaaatcatgggctgtgttcagtttcattatcctggatgttctctatcataaaggaatattgacaaataaataccagagtttgtattgaatattcatgccaaaaaagtttttttttaaatttttcaaatgaaacaattttatctttcctggtttgaaaactacaatctaaatttaacaaataatgtaatacaatgtttgtcttattagttattcaatttattaaaaacagactgatatttaaagttaataccattgcacatttgagtgacatatttggcaagaacagcatttacattcagctttaacaaaacatgtatttaaatatatttgtctttttagtattggaataggcagacatacacgtagaagagcattattttctactacaacctcaaactgcaaacacagtttaaattcaattaagtaattaaaaaatatgaaacaaataggtgtgctattttggtgtttagatatacgttcacttttgcatgggcatatgtatgtgtctttgctgggctgttgtgtatgtatgtgtgtttgtagaaccatgaagttttcaaatacatcattaaatgacatattaatcttggccaggcatggtggctcaggcctgtaatcccagcactttgggagtcataggcaggcagatcacctgaggtcaagagttcaagaccagcctggccaacatggtaaaaccccgtctctactaaaaatacaaaaaatagccaggtattgtggcaagtgcctttagtcccagtgtgacagggaaatgtggggtcagaaatcccacacagagtttctactggtgtaccacctagtggagctgtaagaagaaagccactgccctccagaacccagaatggtagatccactgacagcttgcactatatttctggaaaaaccacatacactcaatgccagctcgtgaaagcagccaggagggagactgtgccctgcaaaagttttttaaaacttttcatttgaaaagttttaaaaaagttctgccacaggggcagaactgcccaagaccatgggaacccacctgttacatcaggtaacctagatttgagacatggagtcaaagaagattattttggaacatgaagatttgactgctcagctggatttcagacttgcatggggcctgtagtttggaccaatttctccatttggaatggctgtatttacacagtgcctgaactcccattctttctaggaagtaactgacttcgtttttatcttacaggctcacatggaagagacttgcctcatctcaaatgagaccttggactgtggacttttgagttaaggctcaaatgagttaagactttggcagactcttgaacaggcatgattggttttgaaatgcgacagcaatcatgactctagaggaccacatgtgaaatgcaacaagcaggagcagaagacaagtaattcattatttcactgtagtgcattaaaatggtagactcacagaagtagaatagaatgttggttaccaggggctggaggggtggactagaaaaggagagattttggtcaaagtgtaaaatgttccagttagacagaaggagtaagttgcagtgttctaatgcacaagatggaaaatatggctatgaatgcattgtatatttcaaaatggctaaaaatgtaaatgttaaaatttttcccactaagaaattatacaggtcgggagtgggggctcacacctctaatcccagcactttcggaggccgaggtgggtggatcacaaggtcaggagttcaagaccagactggcgggggaggagccaagatggccgaataggaacagctccggtctacagctcccagcgtgagcgacgcagaagacggtgatttctgcatttccatctgaggtaccgggttcatctcactagggagtgccagacagtgggcgcaggccagtgtgtgtgcgcaccgtgcgcgagccgaagcagggcgaggcattgcctcacctgggaagcgcaaggggtcaggga

SEQ ID NO: 15966 - DNA, 2300 bp, Homo sapien
cttcaaaagcttctaaagggaatgacttttccagaaccttatcctatgtgaaggaagacaaatctcccattccagattctctcccattcttccattattatatgaatgagtaaagttagccaaaaggggtaagatgtacgtaaatagtccagggaggccaaaaccacaaaagggagtaacagccaaaaatgagcttttcccctggagatgctttttcaaggtcacagcccagaagaggaagcctatcgaatctctaggtttccattggaagaacaggcagtgcttacctgcactgcacaatccattctaactaggatgatgactatggattaaagatgaaagtgtggcaatgcacagactctatctgaggagaatacagaaacactaagacaatgacagagggtgagacaaaggcagtacagcaatgtgaagcctctgacatcatgatttttaagaccaacatcttgtaaatgccatcatagatctcagcttcttttattatggggactttgctggtttcctagctgagaaagtgaaaataacaacctgcatgcacttcccaagtctccacctgtatcctgtttgctttaaatctctaggagaagaaagtcagataactgggcctagtgtcagcataggaggcacttcctaaaagctacatattaggaagaagggaaaatgtgtgttattggaatagtggatatggagtgggctttcatctgaatgtatctgcacctgctggtattctcagatgcaacattcaactgcaagagcccagtgaagaaacacggcactcccaaatctcctgtaagtttttgtcttcattttggttccactaatgaagtgaatctggagcttcagagaaggggctcctttctgtgtcattgaatccttgctctgggtctccttgcagagttcaataggtttagtaaggctaatcagttgtttcaagagatcgtgtcagtagcatatggtgtcactgaaggagtgtgataaaccaggacacagccatttcatgctgggctagagaagcttgggggaaatgatttgtaagtcccagcaggaacctctttgcaaggcagggtctgggctgttgggggcacagaccaggtgagttagatatcaatatgtaaagatgaggacctatggatattaattgaaaatacataaatacttcaaaaaattccaataaattgagtccaaaattaacccgaaattattcaaaacacaaattccttgacaaatattttgggagcaatgagttcataaagaatttgaaactaccgtttcagcttctgattcttattgttcctgagatgagaaaatcatctctaatcacacatcacagagcaaatctgtaaacaagagtgtttctattgaagatccggggggatctgaacaccaggcaggtgctggagacactgtttcaggagtgcccagcagatctcagaaggacctgctggtcactcacgtgggacatgagcagtaacttcctcagtcatcagtcagctgtgctggtgactgatggatccaggacagaaccacggcacctgctcagtgtcatggagagtgatggttccagaaattatccaggtggtctctgtgcttataaaatgtaggttcacagtgaggagcgtgtcctgagggggattgttcttctgtgaaaggacctctgttcatgaatgttcataaatggagcagggcatgcatttcctcaaacaggaatagggcttggaccatcagcatctcactcttgtaaatctgatgtgtcatttatcttccctttcttattattaaccaggctttcttctatgaaatgctatgtcatgaatatgcaaataacctgagatccactgaggtaaatttggatgtctgtgccctgagagcatcacccaacaaccacatccctcctctatagaagcccctgagaacacagctcctcaccatggactgtacctgggggatccacttcttggtggcagctgccacaggtaaggggctcccaagtaccagtgatgaggaggggattgagttcagtcaagggggcttttatcaactcctccattctcctcacaggtgtccattcccaggttcagctgttgcagcctggggctgaggtgaagaagcctgggtcctcagtgaaggtctcctgccaggcttccagatacaccttcaccaaatactttacacggtgggtgtgacaaagccctggacaagggcatagtggatgggatgaatcaacccttacaatgataacacacactatgcacagacgttctggggcagagtcaccattacca

SEQ ID NO: 15967 - DNA, 2300 bp, Homo sapien
cccccaaccacacacaccccttgaggctcctcctccaagcctgggtagggacactgcccctccctcacccaggaagctcagtctggcttgggccagaaccgcttttcttcctaaagctggagggatggccgagggcttagcttaacgggataagccatctggggactgcagtgtccacgatcagatcagggagcttgaagttgaggggggcacactttacctcccaggccaggagaatgaccacttccttccccaccccacccccaggctactcttgccctagaaaattctaaccaagctgctcagctggtggcggagaggcagcccaacaagctggctcttgctgggtaggcctgggggtcctggggagaggaacacggggtgggtggggggcgggcagccaggacctcagacctgaggcctttggggaagggtctgtgcacccgccaggcaccagggggcagccttgccttattcccgctccagtcccctcaagtccgaagcccctacccactctcatgccaggcaggggtgggggccaccggggtcatttacccgggccccttctctgccttggtgacaaagtggagccttgctcatcagtcaggcaggctcccctctggccactgtggagacacagaggcctgtcacctgaagagctggtcccagcctccagcttccagggtagccgggaagctctagcccccagtgggcagcggtggacagagctcaaggaaggagcgagcaccgggaggagacggctgcagcctgccaggagcggggagaaagggagagaaggggaggcggagggctgagggggcccgggggacgtcttcctagggctgggaggggcaggccgggaagcctgggccacactaggagcgggcgaccctggggtgaggggcggcccggagcactgcgggaggagctggcggccgccccaggtagcaaccatcctgcctcccgctggagcggcgactcctccccgggaggagggcagggacaaggtgggcggactgtgacgagcagggcgggagggagaggggggccggccagccgtgggggtggggcgatagtgacatcaccccggagtcggtttttaagcggctgccggccgggaaccgggaagagaggaacagtcggaacgcggtggcgagtcgctgagcccgccgcggccccgagagcggctgcagccgccgccgcccagaaggagagggcgaggcgcgcctgagccgccgccgccgccaccggagtctcgggtgagccgggcagccgccgcgggccccggccggggccgggggcgcgggccacaggcccctgctccagccgccgcttgcagactgcgagcgccgatatcgcccgtgccccgctaggctgagcctcgggtcggccgaggagccgtggcagccgccaccgcccgagccgcgggcaagagcctccggaaccgctgccgcggacgcctggccgggccccgccgacgcccgcgcgcccccgggcccctgacacacaggagattcttcaggctcactttcaagtgcttcgtggactgcttctgactgcgccgcctgtgacccgcaccccgccgctctcccgccgccccgtcccccggcccggccgccccccggcccccggccggcccgcgccctcggggccctccccggtgccgccggtgccccgcgcctgaccgcagccccccgcagggtgccgcgaccccagcccggccgtgaggcccgcaggggccatggcgaagaagagcgccgagaacggcatctgtagcgtgtccggcgaccagaagaagggccccctcatcgcgcccgggcccgacggggcccgggccaagggcgacggccccgcgggcctggggacacccggcggcggcctggccgtgccgccgcgcgcgatagacctggacgcgccagatggacttcatcatgtcgtgtgtgggcttcaccgtgggcctgggcaacgtgtggcgcttcccctacctgtgctacaagaatggcggaggtgagctcccccgccccccgcggccccctcccccagcaggccgccggcccctgacgcccgacccccaacccccggagccgccgcggaggggtgaagtccgggcagcggttggcccctgggcacgcggggtcggggccgcccctggtccaccgctgctgctcggtggctgggccgtccgcctccacccctctcgcagtcatgtgcctggcagggtgaggggcgggggccggcgatgcccgcgaggctgccccccagactcctgggctggaaggagcgattggccgccgaggtgg

SEQ ID NO: 15968 - DNA, 2300 bp, Homo sapien
tgcctgcaagtgtgaggtccaaggcagagggcgggtgggtcacagtcccctgctggtgggatggccacgtgcaaggacagagggatacaggtgcgggaagaggggccaggccggccttagcaagcccagggagtcaggctctacaggagataggcagggcatggcacaggccctggccagcaggctggggtgggggtggcaaaagggcagggagagctgggtgccactacccccttctcctctctgggcctcctacccttgccctggctgggctcgctccactactcagaggccgagcttggctgcaacttgcctgactccaggtcccagcatccttctcctaactttgggcaaaggcctttgctctggacctctgtttcccacccatcactgggtcacttcggcttccagaaaccccagtgctgttttgtagtcacaggacacacgcgtgcccatcgctcttgctaagctgggcccgggcaggcgggcgggcatgggacgtgcatgcagtgtttccagtggcggcgccaggcgggccaggccacaggcttcccaagcctggctcaggtacccagtgttccaggcccgggccagaggggaggagcgggagggctgcgaggggaggggagggcagggagagggacagagtggcccattgtgtgtgtgttcgtgtgtgtgcacacgtggggggcccacacaatgtgccgcttgtgtgcccgacccgcaggggcagccagggctccttacttcgaggagaccccaaggcgcaggcctgctttcccacctcggcggccaatcgctccttccagcccaggagtctggggggcagcctcgcgggcatcgccggcccccgcccctcaccctgccaggcacatgactgcgagaggggtggaggcggacggcccagccaccgagcagcagcggtggaccaggggcggccccgaccccgcgtgcccaggggccaaccgctgcccggacttcacccctccgcggcggctccgggggttgggggtcgggcgtcaggggccggcggcctgctgggggagggggccgcggggggcgggggagctcacctccgccattcttgtagcacaggtaggggaagcgccacacgttgcccaggcccacggtgaagcccacacacgacatgatgaagtccatctggcgcgtccaggtctatcgcgcgcggcggcacggccaggccgccgccgggtgtccccaggcccgcggggccgtcgcccttggcccgggccccgtcgggcccgggcgcgatgagggggcccttcttctggtcgccggacacgctacagatgccgttctcggcgctcttcttcgccatggcccctgcgggcctcacggccgggctggggtcgcggcaccctgcggggggctgcggtcaggcgcggggcaccggcggcaccggggagggccccgagggcgcgggccggccgggggccggggggcggccgggccgggggacggggcggcgggagagcggcggggtgcgggtcacaggcggcgcagtcagaagcagtccacgaagcacttgaaagtgagcctgaagaatctcctgtgtgtcaggggcccgggggcgcgcgggcgtcggcggggcccggccaggcgtccgcggcagcggttccggaggctcttgcccgcggctcgggcggtggcggctgccacggctcctcggccgacccgaggctcagcctagcggggcacgggcgatatcggcgctcgcagtctgcaagcggcggctggagcaggggcctgtggcccgcgcccccggccccggccggggcccgcggcggctgcccggctcacccgagactccggtggcggcggcggcggctcaggcgcgcctcgccctctccttctgggcggcggcggctgcagccgctctcggggccgcggcgggctcagcgactcgccaccgcgttccgactgttcctctcttcccggttcccggccggcagccgcttaaaaaccgactccggggtgatgtcactatcgccccacccccacggctggccggcccccctctccctcccgccctgctcgtcacagtccgcccaccttgtccctgccctcctcccggggaggagtcgccgctccagcgggaggcaggatggttgctacctggggcggccgccagctcctcccgcagtgctccgggccgcccctcaccccagggtcgcccgctcctagtgtggcccaggcttcccggcctgcccctcccagccctaggaagacgtcccccgggccccctcagccctccgcctccccttctctccctttctccc

SEQ ID NO: 15969 - DNA, 2300 bp, Homo sapien
tgccaccatggcggttccaggaggtccaagcctccacctggccacccagtagctccagtcctcagcagctggtggtggtggtggtggggagggggggagtttctagtagcctgaggtagtgttggagacagttgcccccgtagtgggcaacctcagtacgtcgctccacctgtctgtgccccagcgtccttggggacagtaatagtaggacctacctagagagccaagtgtgctgggcaggtcccatccccagcccggctatgcctggcctgtccttgccttgtggagctgcctatgccccctctagtccctgcttccccaagttcactgtgcggcctgaacatctcctccaggctcccccctcgagactgggatgccatcacgtggccccaggcctggtgctcaggacaggaaaagatttctcaagtgggagccagctgggaaaagggggcagtccctgaggctggccaagggctgctcacctttgaacaagggacagatgttccagacattgatgctgccggccttcatgaactggcccagcgagatctccaagaagaaaatggggattcctccgaccagggctatcaggatgcagggaataaggaacacacctgggggtggaggcacagggtggactcagggtggcccccagccaggctgcccaggcccagcgggccagcccagactccaaaggccccatcacaacttcccactgggtgagtcagtgtaggggtggccactgactcgggccccacgtagggtcttgaggggctgggttcagtgtgttgaagaggtgctacagtagcccctgggccattgaagtcctattccctgggtggcagagaggcactaggcccacagggcttccacccccacggtcacttggggtgatggccatggaggacacgcacgctcagacacgcagcctgtccctagtgccgcaattccctgtttcaggcagcacagtgagggcacgtgcgtgtgtgcatgtgcgccaaggctgggtgatcaggcctgaggggctcatccaaaggcagggagcgcgactgtcctgcacttggacgcttgcctgcaagtgtgaggtccaaggcagagggcgggtgggtcacagtcccctgctggtgggatggccacgtgcaaggacagagggatacaggtgcgggaagaggggccaggccggccttagcaagcccagggagtcaggctctacaggagataggcagggcatggcacaggccctggccagcaggctggggtgggggtggcaaaagggcagggagagctgggtgccactacccccttctcctctctgggcctcctacccttgccctggctgggctcgctccactactcagaggccgagcttggctgcaacttgcctgactccaggtcccagcatccttctcctaactttgggcaaaggcctttgctctggacctctgtttcccacccatcactgggtcacttcggcttccagaaaccccagtgctgttttgtagtcacaggacacacgcgtgcccatcgctcttgctaagctgggcccgggcaggcgggcgggcatgggacgtgcatgcagtgtttccagtggcggcgccaggcgggccaggccacaggcttcccaagcctggctcaggtacccagtgttccaggcccgggccagaggggaggagcgggagggctgcgaggggaggggagggcagggagagggacagagtggcccattgtgtgtgtgttcgtgtgtgtgcacacgtggggggcccacacaatgtgccgcttgtgtgcccgacccgcaggggcagccagggctccttacttcgaggagaccccaaggcgcaggcctgctttcccacctcggcggccaatcgctccttccagcccaggagtctggggggcagcctcgcgggcatcgccggcccccgcccctcaccctgccaggcacatgactgcgagaggggtggaggcggacggcccagccaccgagcagcagcggtggaccaggggcggccccgaccccgcgtgcccaggggccaaccgctgcccggacttcacccctccgcggcggctccgggggttgggggtcgggcgtcaggggccggcggcctgctgggggagggggccgcggggggcgggggagctcacctccgccattcttgtagcacaggtaggggaagcgccacacgttgcccaggcccacggtgaagcccacacacgacatgatgaagtccatctggcgcgtccaggtctatcgcgcgcggcggcacggccaggccgccgccgggtgtccccaggcccgcggg

SEQ ID NO: 15970 - DNA, 2300 bp, Homo sapien
tcaggctggggagtcacctgaacaaagaagacaatgtccagagctgtgggacatggccagctccctgggggacaaggtccccagagcagcatgtgggaagagggggcagacagtgtggcagccgcatcttgcctgcctctgcctggcccagttccactcttcacctgctcagccccgacctctctccagaagaggaggggggcccggccctgatccaatatcccgctccctgcctgggcctcccatgcgtgcactgcccacacactcacacagctctcactccccacatgctccatgcctcctgtccccactgaggagagctcccagaggctcgcccgctccccactgacatgcatccctgcagacaaacgaggcgcccagagagcttccccactgcacttgccagggctgccggggcccagccttgcccctagcttcctctggcgggagctatggctcggaggagaatggggacctctgaacatacctgcccgcaagggggaccggaggtgctcggagtgggcttgtgagggaggtggtgccgcagtccccgctgagcagcctggccccccagatcgtgtacttcactgctacattcccctacgtggtcctggtcgtgctgcttgtgcttggagtgctgctgcctggcgccctggacagcatcatttactatctcaagcctgactggtcaaagctggggtcccctcaggtgaggtggaggtggggaggctgcagcagggtgttgtgggggagccctgcaggcccctcatgcctgcactctccagccctcctctaggtatggatagatgtggggacccagattttcttttcttatgccattggcctgggggccctcacagccctgggcagctacaaccgcttcaacaacaactgctacaagtaagcactgctgccctgccacccgtgccctgtcccgccctgccctgcccagcagcctaacccatccactctggcccctccacccctccgggacgccatcatcctggctgtcatcaacagtgggaccagcttctttgctggcttcgtggtcttctccatcctgggcttcatggctgcagagcagggcatgcacatctccaaggtggcagagtcaggtagggccctacccccagccccgcctccagagcagcaactgccacccagatgcatgatgtacaagaacacgcaatagaaatgctgaaaagtgatgaggattcaaacagaacttctcagattgtgggcctgtgggggcaggtcctgggatttttcaatgttgacagagacaggacctcccagcccctgctgcatgacccagggttgacagcacctcagaggcaggcgtgggcatgggcgtgagtgttgcaggcagggctcagggtgagcgcagggcacgacatcggctgcaaggtctagagcctgcacctttcccacagggccgggcctggccttcatcgcctacccacaggctgtcacactgatgccagtggccccactctgggctgccctgttcttcttcatgctgttgctgcttggtctcgacaaccagatttgcatggggctctgggacagggagccaggagaggggcggagtgagggctgcgggcaaggaaaggggtggagggtggtgcggggctcggcctgagctagcctggccacagtttgtaggtgtggagggcttcatcaccggcctcctcaacctcctcccagcctcctactacttctgtttccaaagggagatctctgtggccctctgttgtgccctccgctttgtcattgatctctccatggtgactgatgtgagtggggtggggggtctgcctgtgacttctggtggccgtctgccatcctccctgactgggctctgtcccccagggtgggatgtatgtcttccagctgtttgactactactcagccagcggcaccaccctgctctggcaggccttttgggagtgcgtggtggtggcctgggtgtatggtaggtcatggctgagggctgggctggggcatggtggtggggaaggcaggtctccagcttggccctcccgcctcgccttgccacaggagctgaccgcttcacggacgacattgcctgtatgatcgggtaccgaccttgcccctggatgaaatggtgctggtccttcttcaccccgctggtttgcatggtaagggctgggggaggtggggcggggtggggggggcggggggggtgggggccccattaaccacggcattctggtctgtagggcatcttcatcttcaacgttgtgtactacgagccgctggtctacaacaacaccaac

SEQ ID NO: 15971 - DNA, 2300 bp, Homo sapien
gaaaggagtggaatggaatgggatggaatggaaaggagtggagtagactggaatggagtggagtggagtggaatggattggagtggagtggagtggattggaatggaatggaatggaatggaatggaatggaatggaatggtgaaatgaaatgtgagctgaggttgtgccactgtgctacaagctgggtgacagagtgagatattctcgaaagaaagaaatggaatggaatgcagtggaatggaatggaatggactggaatggactggagtgaagtggagtggggtgaagtggagtggagtggaatggagagggatggaatgggatggaatgaagtggagtggagtggggtggagtggagttcagtggagtggagaggagtggaatggagtggaatggaataggatgtaatggaatatactggagtggagtggagtggagtggaaaggagtggaattgaatgtaaaggaatggaatggaatggaatggaatgcaatggaacgcaatggaatagaatgtaatgcaatggaaagttgacatgtaatgtgagctgagaatgtgccactgcactccagcctcagtgacacagtgatatcctgttgaaagaaaggaatggaatgcaatggagtgaaatggaatggaatggaatggagtggagtggagtggagtagaatggagtagaatggaatgggatggagtggaatggaatggagtggagtggagtggagtgaaacagactggaatggaaggggatggaatggaatgtagtggaatggtgaaaagaaatgtgagctgagattgtgccactgcactccagcctttgtgacagagtgtgatcctgtggaaaaaaagaaatggaatggaatggagtggaatggaatggaatggagtgaagtggagtggagtggactggagtggagtggagtggaatggaggggagtggaatggagtggagtggaatggagtggaatggaatgcagtggagtggagtggagtggaatggaatggagcatagtggaatggagtggaatggaatgcagtggagtggagtggaatggaatggagtggaatggaatggaatggagaggaatggagtagagtggagtggaatgaagtggagtggattggagtggagtggaatggaatggagtggaatggagtggagtggaatagactggagtggagcggaatggaatggaatggaatggaatggaatggaatggaatggaatggaatggaatgcaatggaatggaatggaatggaatggaatggaattgagaaaagaaatgtgtgctgaggttgtgccactgcactacaacctgtgtgacagagggagatcctgtcaaagaaaggagtggaatggaagggattggaatgaaatggaatggaatggattggagttgagtggagtgggattgagtggagtggagtggagtgcagtggaatggaatggaatggtgaaaggaaatgtgagctgagattgtgccactgcacacgagcctggatgacagagtgagatcctgtccaaagaaaggaatggaatggaatggaatggagtggagtcgagaggaatggagtggaatggaatgggatggaatggaaaggagtggagtggagaggaatggagtggagcagagtggagtggaatgaagtggaatggaatgggatggaatggaaaggagtggagtggactggaatggagtggagtggagtggaatggaatggaatggaatggtgaaatgaaatgtgagctgagattgtgccactgtgctccaggctgggtgacagagtgagatactctcgaaagaaaggaatggaatggaatgcagtggaatggaatggaatggaatggaatgaaatggagtggactggagtggagtggagtggaatggagaggaatggactgggatggaatggaatggaatgaagtggagtggagtggggtggactggagtgcagtggaaaggagcggaaaggaatgggacagagtgaaatggagtggagtggaggtcagtggagtgcagaggaggggaatggtgtggaatggaatcggatgtaatggaatgtagtggagtggagtggagcagagaggaatggaatggaattgaattaaatggaatggaacggaatagaatggaatgcaatggaatgcaatagaatagaatgcaatgcaaacgaaagttgacatgtaatatgagatgagattgtgcgactgcactccagcctgggagacatagtgatatcctgtcgaaagaaaggaatggaatgcaatggagtgaaatggaatggaatggaatggg

SEQ ID NO: 15972 - DNA, 2300 bp, Homo sapien
ggtctgtgggacaccatcagagtttctgcaaaacctggctaagacttagaatgtggacttgaaggtgattgtgatcataatgtaatacttgctataaaaactcaggttggtgttggccacatatgactataacagtccggtggggaaagtcaaagagtgtttctttgacaagttcctctaaaggtggcagtaaacttaatgcctttcagtgtctcctttttgccatagacccagagagagcgagaaacacttgacaaccccagattacttccttagcagccaaggccagcattttacctagaatggattttggctgtggggagaacatggcaagcatgcagagatgtttggcatttggtaatacctgggtgagagttttccaagctcttatgaagtatataatgcacaaggcccatttctaaatattggaaacatcttgctgtgaaagctgtgaaaggaatccaatggaatcatcatcaaatggaatcgaatggaatcatcatagaatggaatcaaaaggaatcatagtggaatagaatcgaatggaatcattgaatgcaatggaatggaatcatcaacgaaagcaatcgaagggaatcatcgaatggaatcaagtggaatcatcaaatggaatccaatgaaatcatcatcgaatggactcaaattgaactatcattgaatgtaatcgaatggaatcatcgaatggactcgaatggaataattgaatggattccagtggaatcatcaaatggaatcgaatggaatcaacgaatctactcgaatggaatcatcatcaaatgtaattggatggaatcaatgaagggacttgaatggaatcttcaaatggactctagtagaatcatcatcgaatggaatcgaatgtaatcgtagaatggactcgaatggaatcatcatcaaatggaatcaaatggaatcactgaatggagtcgaatggaatcatcatcaaatgaaattaagtggaatcaccgaatggacacgaatggaatcatcatcaaatggaatcaaatggaatcatcgaattcactcaaatggaatcatcgtggaatggaattgaaagcaataatcgaatggattctaatggaattatcgaacggactcaaatggaatgatcgaatggactcgaatggaatcatcgtcaaacagactctaacggaatgattgaatggactctaaaggaatcatttaatggaaacgaatggaatcttcaattggactcaagtggaattattgaatgggctcgaatggaaacatcgaatggactcgaaaggaatcattatagaatggaatcgaatggaatcatcaaacggaattgatcgcaatcatcatcgcatggaatcaaattgaatcattgaatggaatcgaatgcagtcatcttcgaatggaattgaatggaatcatcattgaatacaatcgaatggaatcattgaatggattcaaatggaatcatcgaatgaaatccaatggaatcatcatcaaatggaatcgaatggaatcattatcgaatagaatcgaatggaaacattgaatggaatcatcatcaaatggaggccagtggaatcatcgaattgactcgaatgaaatcatcattgagtggaatcaaatggaatcactgaatggaatcgaatggaatcatcatcgaatggaatctaatggtatcattgaatgcactctaatggaatcatcaacgaatggaatcgaatggtatcatcaaatggaatcgaatggagtcatctttgtgtggaatccacaggaatcaccaaatggactctaatggaataatcatcaaagggaatcgagtggaatcattgaatgtactcgaatggaatcatcgaatgcaatccaatggaatcatataatggaatcgaatggaatcgtcaatgaatgggatcaaatggaatcatcgaatggactcgaatggaatcatcattgagtggattcgaatggaatcatcgaatatactcgaatagaatcatcattgaatggaaaagaatggaatcatcaaatggacacgaatggaaacatcgtcgaattgaatcatacagaatcatcaaaagaaatcgaatggaatcatcatcaaatggaatggaatggaatcatcaaatggaatcaaaaggaatcaccaacgaattgaatcaaatggtatcatggaatggaattgaaaggaatcatctgcaagttaaatctaaaggaatcaccgaatggactccaaaggaataatcatcgaatggaatccagtggaatcatcaaatgtacttgaatggaatcatcgaatggacacg

SEQ ID NO: 15973 - DNA, 2300 bp, Homo sapien
ggatcagtcgtgcaggctagagcagaagtgggcctgtaaattctccagcactaggcctaagtgagaggcttcacctgactgttcagctgcagcaaggccacctgtacatctatccaagaagaacctatcttcttcctgccttcaatccattcaccagcaaagggtcagttgtaccagttcttcctctaccatacacatcttatggtccctgggatccctctgtgggctgcccaagtcaggcatcaagggtggcaatgcaccagctcatccaggccctgcatacaaaagagatctccaaacctccgtggcactcaggggccatgtgtcaacaggaccaactctaggaggcacactctcacatcatcaggatcttaacctctgtaccaaagaatgtgccaggaggacaaggaccatgagcatgctggcctggcaggtgtgtccttaaagaggaagcctcagcttcaatgagaatccaaagtaggagcaccacagctgactggacaccccaagtctctcctgtgttgggagcagacacaagccacaaagaagtttctctttctgcttgagcagcagcaccagccatctgcacagaccttcagccttttcgattatctcctgtagattcaggagtttcaccaaaaggcacaatcttttccgaatctggatccacagaaagagcaagactgcaatgctgaaacaacccattagtcaggaagaatttcccagagctcaccaggaaatcagcttagcaggaggcagacctctttcccacagtaagcatttggacacacatttacgggcatgtctacccgtcaagcttatattatgatgaatgagttagaggtcaagttatgggagaaaaaatggaaatagatctctttctttgaacactgctaaaagaaacacacaggtaatagacgtgtctggtggatcggggcttgtccccaaaaagccggaaaggctgagcgagtgattgaaggcagggtgagactggacacccatggagaggtcacaggatccaggccatgcccaccgaggatgacatagcccttctgaaggcccaagggagatggctcaggatgccaaagactcaagcagccaatctgatctgtgcacaaactgctgaatctcagcgtcatttgcaaggaaggcctggccagctgcaggaatcaaagacactagaggcaggcagccagcaggggggtcaggagggctgtctactccggatacaggagtccactggcaggcaggctacaggcttctcaggtgctggccctagagctatcagtctctcggtcgttcagggcaaggggtatgatctctgtagacatccatgtaacagaggctcaactccttcatcctcagaagcaaaggctagtggagaccaaatagggcttgaaaggtaaatcccctaaaaaggcagaatgtcctgggctttggcctctccccttcaagcacaaccggatcatcacctcttttcagacttctcactatgctgagaaccggaacaagactcctaactccccctcctcacctctgcactcctgcactcttaccgggcagaccagaaaccaggagacctgaactctggccaagctcggggagaagagaatccaaagagggcgggagcggtgagggctgagctcctacgggtgccccggcccaaggcttcaggtccagactgcggtccaagtggcactcggtgcaggttctgcgatgtcgctggaaggcctggaacagcctctgcagctagctgccgcttcttccttttcttaagcgccaaaaacgtgaacacttcccccaaggttttcagatacgcccaggcgcccccagctggaggtggggataatggcattctacaacatggtttatcacctcgcccgccagggcagcaaccagcccccgcctcgccaacccagctgccccaggctggaggcgatcctgtcgagcctcctccctgcagctccactcctcctccttatcttcttcctcaaccactggcatagttttggtcatcctccttgtcgtcacaatggggcgcctgacaccatggagacccgggaaccccactgatcttgggtcctgcaggggtcaggcgaccgtgcaggaagaccagaaggaaagtaatctgccgcatccagaatgaacagaacaaaacccccgcactccaggaagaagtcaggagcccagtgggggctgcaggtccagcccacaacaacctagacatgtggggtgctccatggctcacgcttatgtcctgcaggctgaagcccgcgccagggtccgcagtctttgttccg

SEQ ID NO: 15974 - DNA, 2300 bp, Homo sapien
ggtgatgccttgtcatgggaggggtgtatctacatcattgcctagtgtgtatgtgtgtgagtgtgcaggaatcactttatagcagcagggtgaggagaggagtcttccttcagaactccatcccttttaatcctcagttccctctgacccctagatgggacctattgtcacaagacaattcacactgtgacagcatgtgtgtaaaagaatagagtctttattccccaaaagacccacagtatacctccagccgaggctgctgtgatgtctttgttctaacaccaaatacatggagtttgttgaacaccaaccaattcatcaacaccaactgggagtttaacatcttaattctgacaccacccagagttggcatagactccacaagttcaggactcagtcccacagcaccatccccactgcacatgcctgtcacaacgaacatgggcacgtctatgcttctgagcatctatctataaatcataagctcccataacccttttcatgaagtttaataattaataaaactactcacagaacttggcaaaacatttcacctatgcttgccaggttattataataaatacagttcagaaaaagccaaatgcaaaaaatggatacagcaaagaaaagcataaaagaaagacagggtgggtagtgagtcctggtaaatagtgacatttaagaaaactctctaattctttgtgttctgtgagaaaacttactgcagagaaacacctttaccattgttacctagatggtacatcctgttttagatatcacagattcatagattctccacattcccatttgctcctcataaacaattaaatacttttgtcttcagagttcagaagaaaatacttgttaggcacaggttgcttgtttcttttttcccccgggaccctggcctctgctccgtcttcagtctgagtaaacatataaccatacaaccccttttatgcccctcccaagaacaggctgatttcagggtgaaaccatctctaatcttgaaggattttgtcactctccatggggcccttcctctcccacccttctttctaatataccttgctcctccatttcaaagacagctcttttctgcctagtattttagatgtttgcagatattatgcttgatgcttccaccattgcaatacttctttaggttaaagtctctgaatttattttatttgaaaatatctagaaacagccccaggacaataacaattacaccctcacagagaacatctcagtcgtcctcctatctcacatgacactgtatctgcctgtggatctccacagttgagaaggtgatatacattttggcccagctcacaggcactatgataaatcttatacatgagccaagccaaaaggagagattttgactctcatagctaggcttcaagcaatgggtaaagtcctggatcttctacttttatgaaggtcaaaggattataaaacccatgtgtgttgaatataccccttgagtggtacagagagtgtcataacaggacccagttcacaggtgagatatagagatctgtatggccacagaaccaaaagtagaaattgtcacatgcccacatgtacataacccacaactgaggttctaagctcacacccatgggcagggggaagttggagttgtgactctcacaggtggatccagtccacaggcgaaatggtgactctctcaccaagattcagcacagcattgaggctgtgactcccttaccaggacatagcttggagaagggattggggctctcatgtgaggatgcagtccactgttgagattgtgactcaagtacttggacccaacgcaacaggagttctacctggagtggagaaatgtttggatttggaggtctcattactgggccttcccacaggtataattgtgacatacaactagaaccttagtgatttcacagtgcttctgggctcagcacagatatatcttgtgacttatacctggaataaacacctaggtgatgtgactattttgcctagacacttccttcaaaggaattgtgatgtatctctctactttgcacctaggtgatataaatcttttcccctacttagaccctgctcacaggtaaggttataacatatcactaagcctggtacttaatgatgtgactctctgatcctgtttgtgccctgccctcaagaagcattgtgacatcactgggctaagcaacaaggtaatcttgcttatgtgtgtcttctgtctaggccatgtgcacagggggcattgagaaatatctctggaccaatcacctaaaagatgt

SEQ ID NO: 15975 - DNA, 2300 bp, Homo sapien
ctccatcccttttaatcctcagttccctctgacccctagatgggacctattgtcacaagacaattcacactgtgacagcatgtgtgtaaaagaatagagtctttattccccaaaagacccacagtatacctccagccgaggctgctgtgatgtctttgttctaacaccaaatacatggagtttgttgaacaccaaccaattcatcaacaccaactgggagtttaacatcttaattctgacaccacccagagttggcatagactccacaagttcaggactcagtcccacagcaccatccccactgcacatgcctgtcacaacgaacatgggcacgtctatgcttctgagcatctatctataaatcataagctcccataacccttttcatgaagtttaataattaataaaactactcacagaacttggcaaaacatttcacctatgcttgccaggttattataataaatacagttcagaaaaagccaaatgcaaaaaatggatacagcaaagaaaagcataaaagaaagacagggtgggtagtgagtcctggtaaatagtgacatttaagaaaactctctaattctttgtgttctgtgagaaaacttactgcagagaaacacctttaccattgttacctagatggtacatcctgttttagatatcacagattcatagattctccacattcccatttgctcctcataaacaattaaatacttttgtcttcagagttcagaagaaaatacttgttaggcacaggttgcttgtttcttttttcccccgggaccctggcctctgctccgtcttcagtctgagtaaacatataaccatacaaccccttttatgcccctcccaagaacaggctgatttcagggtgaaaccatctctaatcttgaaggattttgtcactctccatggggcccttcctctcccacccttctttctaatataccttgctcctccatttcaaagacagctcttttctgcctagtattttagatgtttgcagatattatgcttgatgcttccaccattgcaatacttctttaggttaaagtctctgaatttattttatttgaaaatatctagaaacagccccaggacaataacaattacaccctcacagagaacatctcagtcgtcctcctatctcacatgacactgtatctgcctgtggatctccacagttgagaaggtgatatacattttggcccagctcacaggcactatgataaatcttatacatgagccaagccaaaaggagagattttgactctcatagctaggcttcaagcaatgggtaaagtcctggatcttctacttttatgaaggtcaaaggattataaaacccatgtgtgttgaatataccccttgagtggtacagagagtgtcataacaggacccagttcacaggtgagatatagagatctgtatggccacagaaccaaaagtagaaattgtcacatgcccacatgtacataacccacaactgaggttctaagctcacacccatgggcagggggaagttggagttgtgactctcacaggtggatccagtccacaggcgaaatggtgactctctcaccaagattcagcacagcattgaggctgtgactcccttaccaggacatagcttggagaagggattggggctctcatgtgaggatgcagtccactgttgagattgtgactcaagtacttggacccaacgcaacaggagttctacctggagtggagaaatgtttggatttggaggtctcattactgggccttcccacaggtataattgtgacatacaactagaaccttagtgatttcacagtgcttctgggctcagcacagatatatcttgtgacttatacctggaataaacacctaggtgatgtgactattttgcctagacacttccttcaaaggaattgtgatgtatctctctactttgcacctaggtgatataaatcttttcccctacttagaccctgctcacaggtaaggttataacatatcactaagcctggtacttaatgatgtgactctctgatcctgtttgtgccctgccctcaagaagcattgtgacatcactgggctaagcaacaaggtaatcttgcttatgtgtgtcttctgtctaggccatgtgcacagggggcattgagaaatatctctggaccaatcacctaaaagatgtgactctcctcacttgcctggactctgctcagaatagagatttcgacacatcagtgggttcaacacctaggtgatgcggctcttccttcttttctgggctcttccatcagagaaga

SEQ ID NO: 15976 - DNA, 2300 bp, Homo sapien
ggcccagcatttctattttttctttcactttttaaatttatttaccttaaaaagaaaatgtatggaataaaagctgtatagacagatgaaagggatacagaaagaaaggatgaactgttcagagggattttttggtatttatattgactttcttgtgccttgtagagcaactactggatatgcaaaaataaaaaacaggttgctagatgggatgtctctatggcttcaatgaaaaagaaattgtggcccacaaatagataactatttgctcccatttatctgctttttatttgcaggaaattgggggcaccagcgcaggagaggcagcaggagtcaccactcaaatttctgatctcctttaattagttctgtgagaggagattctagggtgaagccagacctggaggaggccttagaagagggtggacctggggacagcagggacagaaagtgggccctatgcatctcgtgttctgctggtggagtatttccagttctgtctttcctaagcctgcctgatagaattgactcctagagtttgtgtaattttaatctattttagccatttccctgtcaatttttatgacacacaataacaaggaatttaacgaaaactcttagggcttttttaggaaaattatatgagaagctaaaaaaattatttttactaatgtaaaagaaatagaaataatcacaacaatagcaataattcttctgtccatgaatagcctttctggtgataatgttagaactcacaacaacagcatatgggaagtggaacaaatgcagccaaagtcccctgtacacctcccttctctcttctgacctcagaatgttgaatgcaatcatttagccatttgctctggaatgaaagtatctggacagtagaaaccatgaatgtttcatctgtttttccaatggtcatacgatatagtttagatatttgttccaaatctcatattgtattttaatccctaatgttacaagtggggcctggtgggaggtgtttgaatcatggggatggattcctcatggctctgtgctgttcttgtcatggtgagtattcatgagatccggtggtttaaaaatgaggcgtatccttatcccaactttcctgttcccactcctaccatgtgagatgcctgctcatctttcatctttcaccatgattgtaagcttctacatatgttaatgttgttacaaaatttaactcaattttcttataaaattaactgacaagatttcatgttattataaaatcataaatataataaatgaatatattatgacatcacattatattatgatataatttgtatgtattgtggcatcacagtatgttatgacatcataattcacatgcatcatgatgtcacactatattatgacataatttgtatgtattgtgacataatatattatggcataattcatatgtattgtgatataatacattatgacatcataattcatatgtattatattacaatatattatgatttcatagttttatgtattattatgatagcacagtaacaaaattttgttaggtaattttataaaataactgagttaaattttgtaagaacattaacatataaactttatagaaccggagaatattatctgctattgtgtgcacaactgctttatgatattatgataaaatatcaatatttgtttatatatcaaacaaattttatgtgatattatggtatcaatatataatgatactataagttccatttaaataatatttaaattcagacaattagagtgtctgtgtgtctaccacccgatatttttctgggttccactatttgcacagacagcaaagctaggaaaacacagactcattcagcacagtctcttccctgaatctatcccctcctcagggcatcaattcatcagtcaaccaagtcaattgagagtggaggctgagttctctctaacatagaaggtctcattcttgtatgcttttctcagaaggaaagaaaacaagaaggcttttgaggggacacttgctgggacaggcactaagccttctacagtttgatagctctaaccagcagatacagacttctcagtaggaaggggtgaggcagctgtcctgagccaggagctccaccatatcgtgtcccatcctgttaaggcaattttgagaggctgctctggaatatgtctcaatggtggatgtagggaaacttcacaggctttgatgggactgaggtggtgtctgttgtgtgaagacaggagctgaatgctcaggatctaggctgcttttcttgtggtcagttggg

SEQ ID NO: 15977 - DNA, 2300 bp, Homo sapien
catgcctaaaattattttgacaaaatttaaaatccattcctaacaaaatttatagcaaattaggtatagaaagaatatacctcaaaataaagagatgcgttctttattagctataggacaagcccatagctaacattgtcagtggtgaaatgttgaaatcttttctaagatttattttaagataaagatgcccactctcactacttccttacatacagtatttgaaatcctgctcagaatataagacaagagaagaaaaaattggggcatttaagaaagaacaaggtcttatattcatggagattaacgcgcaggtttttacagatttaacagcatgaaacctggtaccacccaggaatcaaaggaactctccctgaggacacagggctttagggcgtcaattattaagaggctacatgaaagcagaaatgctcctcaatgtttccattgtctagatataaagtttcaacagatgagcaccagtaagtaaaggcacatccctgactactgtaggtgatgatcttttcacacaaagcagagatatgaaacctgacaggtttcaaagaccccccaagtgctccataccttgaaattcatctccacaaagctggagcaccatctgttcctgagcctgacaggtttcaacgaccccccaagtaatccataccttgaaattcacctccacaaagctggagcaccagctgttcctgagggatcaggtcatcatctgtgtctttgagacactggccagtcaggcttcagtggatatgaggtcaataatttcaagtgtaaaatgcctaaactatcataatctttaggtagatatttgggggcctgcacacttaaatgggttggtgaaatgtcaaaccagacacatggctgaaaactgggattttctcttctgctcttagcagtaccttggtagcccagtgattaccctccctcattcctccacgtccacgtccgcgaaaaaggcactggtgagggtgacattttcacaaagccatagcccatgatcacttcttgcaaagctctgaacttgtgcattcccaggccaggcggtgggtgtctttcaaagtcggctgagcttgtgctttgcttggacagagcggagagcaacagcacagtggacaccctttgggacctcagcccagtttccaaaaccacttaggaaagcaggtggctccaggggctggggcaggggtgatgctgtggaaagagcctgggtgagggtgggagagaaaatcgacctgagcagcagagagccgcgtgagtgaggaccagacactcctaatttcggcaaagacggggcgcacttcgcaaaaacacaccctcctcactggccagcccacgcctccccttcaagttcctctcctgacaatccccttggcaagggtttggcatggaaacaatggccagcaaagcttggtaaatgaagccgcctacaccgccctgcccctccctgcacggccgcgctccgcctccgctcctatctcaatttgaattgtcctcctgcagccccaccacccacagtggggaaccggtgaagagactacaactcctggatgcaccgggaggcgggtgtcgccccgcatccccccgccctgggctaggcgcacagcgcagcccggagcaggctggcatcctagaccctctgccctgccaacaacacaacaacagccggggagtggacctgaccccggaactcccgaaatttcctgaagacggttccgctccctgcctcgcccttccaggcagcccagcagtttcgccctgcggagggaagcctttctgttctcaaatctctcgtgctggggagacagtggagctagggcggctagtttccccttgtaattgtgacaccttgtctcctcgagctgcaggctaatgcttgtcgtgttcgtagtttgatttctcgcagatcaacaaagggccggtggcctctctcggcctccgcgggagggttgccagggtaacgctcttccgccagactttgggcgcgccccgccccttttctcacacagcctcctcctcagccccaccctctctcgctcctccctttctagttccctttcagacatgcgcagtgcggccgtccctagaggcgggttaacggccgcggacctggcagttctcaggcttctccaagggagaagcccccttgccagggtctcgatttcccgccaaccaacaaaggttcatttgcctcttatggcctgcgcgggagggttgccatggtaatacttctccgccggatgttgggcgcaccccgccccttttcttgcccccctccccctcca

SEQ ID NO: 15978 - DNA, 2300 bp, Homo sapien
gaagggacaggcagaagggaaagaaagaagatttgggatgagtcacattgggaacagagattagggagggaatgaagtgttaaaaatgcctggatgtagggcacttcagaccatttgcctattttatgacaaaaattatctagatcttgtaggatggagaaatcaaaagggtaattttctgcacatttagagccattatcaattttgtattggggccaagcagtgttgcagaaaaaaagtagatgcttaggttttaggtcatgtgagagttgaagagattttaagtttttaagaacaaaggctaagggggaagaaggaggaatggagggcagaaggttgcccatagtgaaaagttaagttgagagaaaagagggggtacttgccacccaggggaggtggtacttgccaccaaggtggaggatcaaggcacgcatacccgcagtgatcgaacacctctggaatgtgggtgaatcaggcaaatgtcctgcagtgactagacaccaaaggaaaactgtcttcctgagtacgtgatcagtgccagacttttcagtctacagataaaatgtgtttcctctgtctctgccagaaagggaaaggaactgaaattaaggaaagggagagattgaagggtggcactgaaattgaaaggagaaagaggttgaaggatactgagagaggttggagaagagaataaaaaaggctgcttacccgattcaaaattggtgaagtgtttcttggctggtcagaggacccgaggttgtaggtggattttctcacagagcaaagagcaggaggacaggggattgatcttccgagggaggtcccctggtctgattcatggctccaaacgtcaagcccatccatgtgaagagaccaccaacaggctttgttgagcaacaaggctgtttattcacttgggggcaagtggactgagtccaaaaagagagtcagcaaagggagataaggaaggggtgctttacaggagttgggtaagtaatggaaatttacagtaaaaggtggtcatctattgttagcagaggacagggtcacaaggtacatgatggggagatcataagacttattgtccagaataagaatgttacaaggttgattgatcagttaaggtagggcagggacaagtcacaatggtgtaatggtgtaatgttggttaatcagttaaggcaggaactggttattttacttcttttgtgtttttttggttgacccagacttcttggctcttgcaggccatctggacatttatgtgtaggtcacaggggttacaatggctgagctttggctcagagacctgacaaagcccagaagctaaacagggtttggcctgcctggggcttggatggggcaccgcctggggatactggtaggtggaggtttttggtgtccctctcccttcccgcttttccctgcttgtcacaaaggttcccaactgcccccgactctctggcacctctttttccacccatatgcgccaccgccaaggcccagtacctccctgtgggggtccattctgtcagcccctgggtgccatggcagcctgagggcaccctggcctggaagctaagcaggatcaggtctgcctagtgcttggatggggcaccacctggggagactgggggccagaggcttttggcttactgctcccttcccgctttctcccgcttatcgcaaggcttcccaaccgccctctgactctctgcccaccccccgtttctgcccacctgcacccccaccatggcctgggacctccccatgggggtttgttttgggcagccccagggcaccatagaagcctgaaggtgccccagcctagaagctacccagcccagaagctaagcagggttgggcctggctggggcttggataggggaacgcctagggagacctggggctggaggcttttgacttccctgctcccttcccactttcccccgctcccttcccactttcccccgcttgtcgcaactcttcctaactgcaccctgactctctggcccctccctttcctgcccacctgcaccaacaccacggcctgggacctcccagtgggggttggtcctggcagcccccgggcgccatagcagcctgagggtgctccagcccggaagctaagcagggttgatcctggctgggacttggatgagggaccacttggggagatcggggctggaggcttttggcttcccgctcccttcccacttttccctgcttgttacaacatttcccgattctgtgacccccccgccacccgcttcccacatgactgcattcttgctccagcc

SEQ ID NO: 15979 - DNA, 2300 bp, Homo sapien
atggggtgtgaaataagtcattcaattgaaagaccttcaacaaaaaaaagccatggtttctgtcttagtgagaaggcttgtggcttgtggtagttttgtgttctaagcacaggctgcctgggacctagctagcttttgacagcagatgacaagtgcaagaaaagaggacagtttcctggtgacatggtttggttgtatacccacccaaatcttatcttgaattgtaactcctctgaaggggtctgcctgcagaccctgactcaacaatggaagaattaagtacactaacacagagatattctgttttgccaattcgactgagcatccggaccgcttacagactcccaggagaatgctgtaaacagttgtgaccatggccccaaccagccagtgagactcgcatttattcagtcaagactaattgacaaaggcttgagtcaacaccactagagggtaattgacattgccaaccttccaagtagaaagcaattaagcacccatggcagatcaaaagttaatcttaggactacatgactaaacaagatagttagataacttcctcacatttctttgtttctactctaatttatttaatgaaatgtaggggactaggctgccttcagccagatttattaccaaagttatgcaaaatctcatgccttccaagagggtttgtggctattataactaatttttttttccaaccagcctgactaaaccaccacatctccccttttttgttttctgcatcaggtcttttggattggagagtgcagatgtgttcagcgacaggtctgtcaggtgtggcagtcattgctcttattccagctttgcatcctagaattagcaaataatataaaaccatcatgtgtacagttagcaacattcttttccagtcaaagagtgactgtagtgttatttggcatctcagtttattgtatgccattaatgaggaactccattatgttaattttttttagttaaacagtcacgttgttagaagatgagaagggggtgttttttaaagtaacagggcagaaaaaaggcggacttaagaaatgagcttaatagagtgtagcaggtaccagttgcagacaaagtgggagaattaaaaaggattaaaatttctggctcaaccttttgcttctttatattgtgtgtcttctgcagaagcagcattgcctggggctgctggtcctatagtagggtcttttttaggctggtttgagttttttttttctttccatcctttaatgaggacgtagtctccaggctggtgctggtgtactggaaattctaggggtggtgcctgtgctaagacaccttttataatctttctaaagagcaggttagtgctttaagaaaaacctgctgtgatttattttaatgtctagtttacagaaaaactggatgaaacttctttaactttagccaatatgtttacacacagaattttttttacaattaacattttaaaacttgcttagagtgtgaaaaagaagaggcgagaaagaccccccgacagaccaaagcccgtgtgccgctgcatcctgcatccagcacctacctcccgccactgtcgccactgccaccatgcccaagagaaaggctgaaggggatgctaagggagataaagccaaggtgaaggatgaaccacagagaagatccgcaaggttgtctgctaaacctcctcctccaaagccagacagcccaagcctagaaaggcccctgcaaagaagggagagaaggtacccaaagggaaaaagggaaaagctgatgctggcacagaggggaataaccttgcagaatatggagatgccaaaaagaccaggcacacaaagctgaaggtgctggagatgccaagggaagtgtgtgcatttttgataactgtgtacttctggtgactgtacagtttgaaatactattttttatcaagttttataaaaatgcagaattttgttttaccttttttttaaagctatgttagtacacagaacacttcattgttgcttttgggggaaggggcatatgtcactaacagaaggtctccaaagctgcattgatgtggagaaaacacctttcccttctagttttgagagacttcctcttggctcccaggaggagggattccctgactttgacacacatggccaccttggcacaaaagccttgtggtatagaaaaacaaatttgtttttatgtcctcttctccctttccatctttcagcatagacttaactcccttaagcccagacatctgttgggacctgacccctagtcattggttaccagtgtgtcag

SEQ ID NO: 15980 - DNA, 2300 bp, Homo sapien
cttgttccccagttaaaaatgtaattgatattttgatatggtttgactctgtgtcccaatcctaatctcatctcaaattataatccccatgtgtggaggaagagacctgtaatccccacatgtcaagggagggatgtgattggatcatggggacagtttcccccatgctgttctcatgatagtgagtgagttctcacgagatctgatggttttataaggggctcttcccccttcactttctcctctctctcctgccaccatgtaagatgtgcctacttccccttctgctgtgattgtaagtttcctgaggcctccccagctatgcagaactgtgagtcaattaaacctctttttaaatacattttacccagtcttgggtagtatctttacagcagtgtgaaaatagactaatatgtattttaatagtgatcatatttaacctgtagactccttcagatagtattttaacaatattaattatttaaattcatgagcatgggatatatttccatttgtttttgtcctctaccatttctttcatcagtgtttcatagttttcttgcaggggagctctatcacttccttggttaaatttgttcctgagtagtattttattattttttagcattcgtaagtggtattgatttctagttttattccattatgtttgagaagatacttgatatgattttaagtttttaaaatttgctaagacttgttttctggcctaatatatggtctatcctggggaatgttctatgtaccaatgtgaagaatgtgtattctgtagccatttgatgaaatgttctaagagtttgtttgaggagtctaggttttttatgtataggatcaggtcatgtacaaagagaaatttcgattgttctttcccaatttagatgcccttcatttttttttcacccagttgctctggctaggacttctaatactgtgttgaatatgagtgctgaatgtgggtatccttgtcttatgccagttcttagaggaaagactttcagcttttcctctttcagtgtaatgttagctgtggttttgccatatatggcctttattgtgttgaaatatgttccttctatgcctaatttgttggagtttttatcataaagattcgttaattagagtcttatattcaagtctccttctcagagtgatttattggcttaggtctggataatttaatatggtgtccctaaaacttttttagaaattatggggaatgacaaagggtatgagggggcaagagactttgtactaagaagtgacttagactgagtgtggtggcacacgcctgtaatcccaacactttgggaggccgaggtgggtggatcacaaggtcaggagttcgagaccagcctggccaacatggtgaaatcccgtccctgttaaaaatacaagaaattagctgggcatggtgtcaggtgcctgtaatcccagctactcaggaggctgaggcaggagaatcacttgaacccaggaggcggaggttgcagtgagccgaggccatgccactgccctccagcctgggcaacaacagtgagactccacctcaaaaaaaaaaaaaaaaaaacaaaccaaaaaaaaaaaaaaaagagaagtgacttggagcaattttaaagaggaaatacattaaacaatcaggaaaatgaaagcctactatcacgtaaaaatgttgtgtggcaaagatgatgtgtgtaaaacatatatttttgtgattcctggtggttttaaatttgtttttgattttctaggtaattcaaggattcatgttttaagaatctactgcagtatagataacattttattgcaactgaatttatttcaaaaatgattagttttatattagactattctgtcttctttcttcattaccaaaccatattattttactcatgcaggctgatcttacagaagcagtggaaactgcatcttcagaaggtctacatgtgaatgcagagattgaagttcttcaacaggcattattatatatgaaaacaatgcaagagaaacgtgaaacactacagaaggatcaggagaagttggaagaagaactagtaaacctcaaaagtcacatggaaatgaatatgttagaatgtggtcaattggaacactataaacaggaggtagaagaaagagcaaggcaggagatagcagaacaattagaaaacattggtctacttttacaggttagtttattatcaataaggtgccttcattcatttcagtgcaaattatatttgggatacatacattgtatgtgtttcctctacttctcttgtagcaat

SEQ ID NO: 15981 - DNA, 2300 bp, Homo sapien
catagttccatagggaggacatttggttggtctcattagactaaaaggggagtagggttttctgtgtttcttcttgttaacttaggactgggatttctttggggattgaaagtcagtttcagttctaggtagagatggctgattcaatgtatgcatcacttagcatgttagcgaagctttgagagtaacaaagagtaagaagattaaaagaatatgtaaactcaaaaaaaacacaaaaagaaagagaaaggaaataaaatatgcaaaatttggaagttgaaaagcacatggacaagtgggaactgacttggttctccctactgctagcttaggagtcagttttctctgctgggaagtgcctggtgcaggaattggcactttcaggtacttctggaagtaaaggtaaaggtgagatttgaaaaagcagaaaatcggcagggcacggtggcttaggcctgtaatcccaatactttgggaggccgagggtgggggggggcggtggatcacctgaggtcaggagttcgagaccagcctggccaacatgatgaaaccccgtctctactaaaaatacaaaaaattagctgggtgtggtggtagacgcctgtaatcccagctaaccggcaggctgaggcaggagaatcacttgaacgtgggtggcagaggttgcagtgagctgaggtcgagccactgcactctagcctgggcaacaagagcgcaactccatctcaaaaaaaaaaaaaaaaaaaaaaaagagggtctctggcctggcagacactaggcgtagtaggccactggagtgctgtactgaaaacggggttatgtgaatggctcctagttttcttctctttctcctttttcttttcttttttgttagacaaggtctcgtcctgtcacccaggctggagtgcggtggtgccatcttggctcactgcaacctccgcctccagggtttaaatgattctcgtggctcagcctcctgagaagctgggactacaggtgcccgccaccacacccagctaatttttgtagagacagggttcctccatgttgcccaggctggtctttaactcctgagctcaagcgatcctcccgccttggcctcccacagtgcagggattacaggcctgagtcaccgagcctgatccctagttttcttctcatgctcagcttccaggatgccgactgccaggtctgtactctacgggcagaggtttatagaaatgttttttaggtctcccttcgtggtcatttccccagagatactgtacaaatactggatgctttttaagggaacgccccatgattgacctctggtaaagctcatagttgctaagcatcaggggattgagcctccaatcaggtggtaatgtgctgactttttaaatggagcagaccgcgcaggatccccagacagctgaggaaagactctaatatgacacagatgaatgcaacccagcatctcctctgactatttttcctccagcagcgcgggccccggggtcagtctcaaccaaggaagccaggccggactgcagcggctgtggctgcgtaggggcggaatgggccgctgggctccatccaggtggctctaggcacaagccaggggagcgggtgcaggcaggcaccagaagctgcgctgggagggtctgctggctgggcagggagtggtgcgctgcctactctgaggtcctcggttctgagctcagcagccttcgctggcgcccgagctgcagccgcgatttgcaaggagctccgcccgccagagagtgtcctcatgggggtttccccgggcgaggccttcagcatcccaaggttctctagctgctctaccctcagtcctgtgttcccacgtgggaatggcgtcttcacacgtgactggggctagagtagctggaacttcaggatgccttccccttccggggaatgtcctgaaaactctgccaactctcactgacgtggggcgggaacgcagggctggtgacaagctgtcatcgatgtttctgacacgtgagccatgcacatgcgcgctgagaacggttggccacctgtcggttgtgcgcacgcgcagtgacgagctgtcagaggtgcgcatgcgcggtcgggcataccggcttcgcttggcgcggcttggctggttggcttcgcttgttactggctctgactttggaaactgcgaagtttcctggttggaggtggtggctgaccagagtggcttggtcttactgggcctctgaggctgtgataggcggactggtgctgaggtgtctctgatagcctccgccatgaggaggagctctggc

SEQ ID NO: 15982 - DNA, 2300 bp, Homo sapien
tgtaggcagacttaaaaaaggtctctgggctaagataggagtggggctatcaacaggcaagatcaaaccagagtgtctggattttgtactgtgcagtaaatttttcctttctgcttcaaaacacactgcttatatgtgactaaaggaggtctgaaaaaaaccaacactgcttcagaacttcgggatctgtgacacaaatgttacttcattgcttttagactatgaagtatcaatataatgaaaagaaatgaaaagaaataagctaacgggcatggatactggaagtgctaagagacttattttaaaatttgagtcttaatcttcacaacttagtagaacatggtttcatcctcaatttcttttttttatttttaaaatttttaaatttttttgtttttccctttttttttcacagctgttcactcagtttctttcggattaaccaaagtagacaaaatccttgcttttcaagcttcacctaattcacttacttgaaaagcgggaaaagtttcttttttattcattcaaaatgtttaagtgttcatagtctgatgtaaatttgtttaagatatggttctatcttgcatttgtttttccctatcttatttagagcatgactaaattaaaaaaaaacaacatcatttaaggcaatcgttctcactcttggctacacattagcatccccagggaacttaaaaaaatacccttgtatgtccagagacccatttaattggtctggatggggccctgagcatctgtttgtttgtttgtttgttttttgagacagggtcttgctctgttgcccaggctggagtacggagtacagtggcataattagatctcacagcagccttgacccctggggctcaagccatcctcccacctcagcctcccaagtagctgagactacaagtgcatgccatcacaccaggctcatttttgtatttttgtagtgacagggttttgccatgttgcccaggctggcctcaaactcctgggctcaagtgatctgcctgccttggcctcccaaagtgctgggattacaggtgtgagccactgtgcctggcctattttactttatttttaaacccattaattttatatctgttaacttgattgtgcatttacaaattattttattgcatctagaaatactctgtattctgtttttatatttgagaaagtttataaattaatacatttgaagtgccagtatggttgtccagtacaaggtcattttgtttcagtcactctctagattagtaatggcacctttttttccccctcggaatctcaagggcttattttttgaaattctttaataatcttccttagggaatattcagcataattttgtgccatagtgctttaaatggaaggagggactagattgtttgagtcatttctactttttgatcctataaatatgataaccttaaaaaaatttttaaagtcgtattcagatccatgaaaaatatagtaatcttaaacattgttgtgaaacaatttgagaaactgctctccctacccctactcccaaattgccccctgccaccttcttattaagcttttgaatctaatatatgagaagaaaataatttcttattaaataataaaattgtgtaacctgaactttcagtgtttctaaagcacaaatgcttggatccaagaaagaaagtaaaaactcctcaagagcagaaaaattagtgaccttaaggaagtggtgctttaaattttcaacagcttccacttattattattattattacagtgctattcagaaagacttaacatgcacctgagttatatactgtaaaactcttactgggtctttgagggctaagtgggctgttttaatgataggaaaatgtgcctgaaaggcagtggatttcactttgcttttaaactttcaggcattatgacattcttgaagaccgagttccatcaggacttattgttgactaccacaatctgttgtctcaatgtgaggagagttacaggaaatttttaaatctgagaagcagtttgtcaaattgtaactctgattccgagcaggaaaatatctccatggtggaagggttaaaattgtattcggagatggaacagttgaaacaaaagctgaaactcattgagaatcctttgttgaggtatgtgtgtctttgtaattcttagttagtcagcatcttttcttacttgctgtcttactgataggcctgtttcgtttctttaaggtatgtgtttggttatcagaagaattctaacatccaagcaaagggtgtccgttccagcggtcagaagat

SEQ ID NO: 15983 - DNA, 2300 bp, Homo sapien
gtgtcagtcaaagggcagaagcggaccctcatttggtgcctgattggaacaagtcaactgtgaaagagcagcaggagacaattaggggaatttgaacactggatatttggtaatattaaggaattaaaacttttggtataaagatttattttagagatacatactaaaaatttgtgaatgatttgatgtgtgtgagattggttcaaaataatccagtatatttgggagactgaagtgggtgggttgcctgaggtcagtttgagaccagcctggccaacatagtgaaaccctatctctacgaaaaatacaaaaaattagctgggcgtggtggcgggtgcctgtaatctgagctactagggaggctgaggcaggagaattacttgaacccaggagctggaggttccagtgagacgagatcgcaccgttgcactccagcctgggcaacaagagcaaaactccatctgaaaaaaaaaaaaatccaatatcaagatggtgggggaggagagcagagggtgcctgggtgaggcagagatgaaataagactgtgagttggtaattgttgaagctgcctcatgatacatggtattcatcatactattttctctgttgttgtatatgtttaggattttccataataaatttgttaaatcacttggagagctttaaaaaaatatggatacaactgggcacggtggctcatgcctgtaatcccagcactttgggagaccgaggcaggggggatcacctaaggtcaggagttcaagaccagcctggccaacatggcaaaatgcctctctactaaaagtacaaaaataagccaggcgtggtggcggttgcctgtaatcccagctgctcaggaggctgaggcaggagaattgctcgaacccaggaggcagaggttgcagtgagccaagatggcgccactgcactccagcctgggccacaagagcgagactccatctcaaaaaaaaaaaaaaaaaaaaaaaaaagaaaagaaaagtgtggatgctgatgattcccttgcaccttccccaccccaccagattctgattgcttggtctgggagagggaactaattgttcttgtttttaaatttatttattttgagaaagaatctcactgtgttgcccaggctggagtgcagtggtgcgatctcgcttcactgcagccccggcctcccagttcaagcgattcttgtgccttggcttcttgagtagctggaattgcaggggaatcaatttttaaaagtgtcccagggaactccaatgtacaatgagggttgagaaccactgccttatgattatgtccttacgtgatcttatacattgctttaacaccatcaatgtgttgatagctaccaggtttatgtttccagccctgacctttccctggagctttgggctgtatattcctctgttattttcaatcccaaacctgtttctctctcagtgttttttgtctcaacaaatggcactaccatccagccaggtactggtggtcaataaataattcttccaataaaaagaaagtcctggctgggcgcggtggctcatgcctgtaatcccagcactttgggagtccgaggcgggtgaatcatgaggtcaggagtttgagaccagcctggccaacatggtgaatccccatctctactaaaaatacaaaaaattagctgggtgtggtggtgggtgccatctcagctactcgggaggctgaggcaggagaatcacttgaacccaggaggcggaggttgcagtgagccaagatcacgccattgcactccagccccagagacagagtgagactgtgtctcaaaaaaaaaaaaaaaaaagtcctaacaaaaccagtgtggagaaacttctcttctttagctgatccaaaaaaggtctctatgttgtgtgactcatgactatcaaccatagcaaatatgcagcattctctaagatatgagaattgttttgatttactctttagctctcacccctccaaaatcctaatgttttgagccagtgatagaatttgaatgatactaagttccatttcagatttttctaccaaaacatttggaggagttgggatgaagaagaggaggatgaatacgattattttgtcagatgtgttgaacctcgattaagattgtaagtatttattgctgaccttgttgtacatgttggaaaaatagttacccatggtttaattttgcctgtgtgagatacacacacacacacacacccacactcactcactcactctctctctctgattttctttccaggatctcatagacagaaataaactgatgt

SEQ ID NO: 15984 - DNA, 2300 bp, Homo sapien
cccactgcccttccggcccttaaaactgggctgggagagaagatggggaagtgtgtgagacaaaacaaagccggcttgtttcctccccttggcaggctaagctctcccggcagcccgggctctggggcggaaggagaacagtgtcatctcttcctttgttgataaattgccaaagagtgggagcaggtggggtcaggggccagagtgcaggggagggggcaatggtggaggtggcggggggaagcagagggaggtgggctgaggcctcggtggggccagtgcgacgctggcttaaggagctggaggggttcctaatacacatttaattcagtttctcttccctaagaggctgccggagttggggcctcctccagcagagaccctcggacccctgcagggcctggacttggggtgaacagggcttcagtcagcgcaagtattccatttgcatttggtaatttttcatgccacctatttatgaatatacaaatctttataccaaatctattttttaaaacatggaaaagttgcctttatggaaacttggcagagccagagtgtacacattcctaaaccattaaacagatttctataacaaaaaaaaaaaaaaaattttgtagagatggggtttcaccatgttgcctaggctggtctcaaactcttggactcaagtgatccgcctgcctcggtctcctaaagtggtgggattacaggcatgagccactatgcctagcctggtttgagtaatatcttgatggttgatgaaatatttgataattggatgagaagagaactgtgttgtctccagtgatgctgcaaatgggtgaggagaaatgctgccatttgtgaggtttgtgggcggcaaggttgaagaagagaataatgaaaaagctagcgtcatcctcaaggcctgttgatagtcttgattattgttttctgtgtttttacctcatggtgctcaatatgtatttgttcagtgagcaaataaatgtaaggtcagattctgcaaacaaaagtcaaagaaatcttacttcctggaaaagttagcccaattaagtgcagctttccagtcacccctcctggctccattttatttcagctgtaagggatccgagagactttagcccaaggtgtttcttcaaagcaataagtggaaatgtttccccacattaagactgcacagacgaactgtcatgaccaggctcttggtcccctgtggacgcatcccacttggtgtcctggttacctgggctatcttgggctgacctcatcattctagtagtgatggcctggcagagacattaaaaggcttcttcatggagtctggctggtttcacatcctggctttgctgggttagattggagaagtgacttaacttcttagtgactccatttgctcatttgtaaaatgggtatagtaatagctcccgtctcataggatcattgtgaagattaaacagaacaatccaggtaacgcatgcaggagggtatcttgcacacaatatgcagtaaatgttagccattatgatggagattatagttgtctttgattaatgcaaattaacaaatttacttactaaatttaatttgacattctttgaaaatatgctctctctctctctctctctctctgtgtgtgtgtgtgtgtgtgtgtgtgtattgaaagacagagagagactggtgtttggtggtgaaagttttgggcccacgtaggccagcatccttttcagttgaagttgtgcttgtgggaggtgaaatgacttgcccaaggcaataccactaggaatagcccaggtaagtttaaatactatgttttttgactctcaacccagtgacttttccactatatctcatttccaggcattgctggttcgtttttttcgaaaatcattccaaattatattccaattcgactttcttcaagttcatcccagaaaagcaaaggccgggcacttgaacaagaacagctgtcagcctggggcgagggggcagtgttggtgggggctggagcggggccggactctaattggtccacggcctcggcccgactatcaaatcagcagagcctgcgtcatcacgtcgttgcctgggctgccgtccgcggaaatttgaaatggctgacgggtcgctgacgggcggcggtctggaggcagcggccatggcgccggagcgcatgggctgggcggtggagcaggagctggcgtctctggagaaaggtgagctctccatgccggggccgaggagccgcctctgagcggaggcctggggcgtcgggaccctaggagggcgcctgggtcgcg

SEQ ID NO: 15985 - DNA, 2300 bp, Homo sapien
ggactcgagcaacgtggaggaggccttcctgagggtggccacggagctcatcatgcggcacgggggccccttgttcagcgagaagagccccgaccacatccagctgaacagcaaggacatcggagaaggctggggctgcgggtgctgaccaggggccgggccggcagactgggggctccccacctccttgctctccccagcctgccaagcccagccctccagagccagccctcctgggtaccggcaactacagcagccgggtgaagctctggagctctgcatcctgtggcctggctgcgggatggaggctctccttgaggaaggggaagcaggataccctggcgggccaccctgccagccagcagctggccctccaccatcttcacattccaagactggcctgaacccgccggtgtgggccacagtaggaggggccagcagtcctccctgtcccatgcctgctggctctgaccgtttcctctcatgggtttgctttacctgtggcagcaggttgctgctttccagggatgtgtccagtgccctgggttcttcccggtcatcctggggctctgcacagagcagcagagctagagccatgaaacccacagacttggtgcctgagcgcagctccagggaagccccagccccttccaggcggggaacctgcttcctgccttcactgcccccgcagcactcacagacatctccctggggtctggctcactgccttatcaggacctctgagttttctgactttctgtgtagcttctcattttcatcagcacagcatggggtcacggcccacagctaggtggggtcacggcccacagctaggtggggactgtctgctggctcagggcccagtgttttgccactcaggttgcaaaattagctaatccttcagtgccagcactcagaagtctggcaggtgggggaatgagatgagaaagtggacatttaaggtccaagtagaagcttgcatccttgaggctcagggatgagagggcaccgcaaggcacccagccttaccccacaagcaggaatcctgccagccgagcgtgggtcccagtctagtttatggaatcgagtctcccagacaaaaaaggagaggccctggcggtccttggcctggcccattttattccctggacccttaactgcctcaccctgagctgggcaccaaggttagaaggcaaaagtggggtagggggatgtgggaagcagcattgtcctctgggcatgtggctcagaggtatcacagtgacaaaagagccagggctagggctggaggggccaagtgatcttccttagccaatcccagtccgtctgtgtcagcccagctctgcctcgcagccccctcagcatgggtgcccccagaagtaagcagctcttggacccacgagcagggctgcgtcggtttgtggtctagctcccagggccaggccaggcatggctcagtgcagtccctgggccagtgagaggcctcccccatgcctccctgccctctgcactaagcactttccaggcaggcctggccatagggcaagagcaggccttacagcagtgccacggtgacccaagaggcagggttggggcctggacagggcttcctctgctgagactgagacaagcagggcttgatgctggtggtggagccagcatctcacctgccaggcttccttttgggcagggaggctacctgtggaatggctgagcctggttctgcaggggaggaaggctgccaggagctgaggggctggcacctgcattgaggggagtctgggtgcatcagattggggggcaccagaggcgaggctgcctggctccctttctcagcagctttgcttgtggcaggggtgagagtggagctgagtggggtctgggctctgcccctgcgcctccactgcagtgcctgggctccccttgcagggcagacagtgcctggcactgaggggtgcccccagaccccgctgggactggatgtgccgtgggcagtgccttcctccagcctcacaacctttctgctggggctgaagtttctggggtcacatggtcagaaggggctgagctggtctttcactgcaggcccactctgaaagagaaatcccatgaagcctgtccttgcagagcccctctgtttttgggggaacagggagcattcacagggtcttgggaacaaaggcctgggcctccccgtttgaatttcagccccagttccagggcaagtcccagccacccaagcatacttaccagtactgcccaccaccacccactgcccacctctaagaagcccggctctc

SEQ ID NO: 15986 - DNA, 2300 bp, Homo sapien
tttttttttctgataaagaacaatcacatgaggttctctctttattattagtccacagggaatcattgtgaaatggataaaacatgttgcctgagtaggtgtatcagtgaccgatactagatagatagtttattttagtgaagggttagcacagttggctgcttaattattgtttgggcaaagtagtttaaccattcttggatgcataaggctattaggctgctatgatgaaaaagacatttgcttgaggatgtcctgactgtctcatccctttctgttgactttcttcattgtagttgacacacctgtacttcataatcagtgtgaaataagaggctgacttctgttgatagtgtgatggtctttgtcttggtttagtgacaaacattccaggactgtggtattgtgctctgtgagctatgtgatctgtacagagtgactgtcttaagtattttaactgattgccttatgtttctgtgtgagattgtttgtatctgtgtgttttcattttctattgcctaccaaatatagtagttagaaactattccttccggcggggcatggtggctcgcatctataatcctggcactttgagaggctgaggtggatggatcacctgaggtcaggagttcaggatcagcatggccaacatggtgaaaccccatctctactaaaaatgcaaaaaattagctgggcgtggtggtgggcgcctgtaatcctagctgctcaggagactgaggcaggagaatcacttgaacctgggaggtggaggttgcagtgagtggatatcatgccattgcactccagcctgggcaacaagagtgaaactccgtctcaaaaaaaattatgccttctgcatgtggctgattggttattcccatgtatggagatctttaatgatagggtcattagctctgactgcccctaggggaaatgcattctcttattcatctaccatatcaggaatttcacaaaacctgaatgccattgtgtcacatatactaaaaatattttataaactctgtgtttttcttgtaatttttctgaattggctatatgttgtgccatttcagaaaaaaaaatccaagaaaaacacagaattcatggaatatttcacaagtagctcttttaaagtatgttagcattttccttgacttaaatggtcttaaaatttttttgaatgaggaggtatgatgtaccagtaatatgcatatagttgttgtgtatcatagtaatagttaatattactgagcttatgccttgtgctaagtagtggtaagccttcacatgtgtcacttgatcttcccaacaaccctaggagtttatagaaacttgtggctaagagaaggtaaataatttgcccaaggccacacatgtaataagtattagcatctgcttttaaatgtgagtctctgagtatcttcacagccttctttttttctcttttcttttttctttttttttttttttgagatggaatcttgctctgtcacccaggctggagtgcagtggcatgatcccagcttactgcaacctccatctcctgggttcaagcaattctcctgcctcagcctcctcagtagctgagattacgggtgtgcgccaccatgcccagctaatttttgtatttttagtagatacagggtttccctatgttggccaggctggtctcgaactcctgacctcaactgatctgtccaccttcggcctcccaaagtgctgggattacagacatgagtcaccacacctggccagagcctacattctttatcagtgcagcatactttgcacatgtgtgtatgaaaatatatttaaatatatctttgcttctaactcgctaccttgggcaggttatacaacctctctgaaactcaggcttccccatttgtgaaatggaatagtatctgtctctgggttgttgtgacaacttgaggagataagaaatatgtaaattgcctaccataaagtatggtacattgtatatattcacaaaatgttagcaatgatgattagagcccacatttatttcacaaatgattaatcagagtttggaaatttttttttctttaatgcttttgggtcagattttgaacacagcacgaaaacattttggagctggtggaaatcagcggattcgcttcacactgccacctttggtatttgcagcttaccagctggcttttcgatataaagagaattctaaagtggtgagtttacttttaagtatttaggtactttttttcctctttcatcactctgagtgtgtgtgtgtttgttttatattataaaaaatttcaaac

SEQ ID NO: 15987 - DNA, 2300 bp, Homo sapien
ttaaactataaattactgtgatgaagatgatgctattttacctttgtaaaatgtcttactgtgctttctaaagcatagtaatatgctcttgtgtcttttattggtttaattcctaacaaattgggaatgaaaaataaatgtcttggaatggagaagctgggtttgctattgcttgcttctttctcttcctgtgtatggatagtgtttcctctatctcaaggaattgcttgcatttctgagttaagtggaacatatgggcattgtgagggcttgaagaatgcaagaggaaagcaaacttacatggatagtcatttcagacagctctgaagagtctttaacccatgacaaagccatgtcaggatagtatcttccttcacctgaatcagtatgccagttctcttgattgcaggtaaaatgtgatgaatggagctagtttcctagtctctatagattgaaaagattagcattctatcaagaagcttgcagtcttagctatgttaagtcttactaagaatcatgtatctttttctttttcagtagagacggcaaggtgaaccgatctaagttgtttttttaatgtggttaaaatcatttaagtgcggtattcttttaaaactatgtaacaagtccttgatgtaaagaatttgtacaaccaagataaatgtttatttaaattaagcattctcatctattctcttggtatttctgtaggacaaaaacaagcttatggatgctctaaaacatgcttctaatatgcttggtgaactccggacttctatgttatcaccaaagagttactatgaactttgtatcttttgaatgttgaagactaaacatttggaccatacctttttcttgataaggcctattttgtttgttctttatgaagtttttctggagttatcttattcttcgttatctgagtcacatggcactccttctccatgcagatgtgctaagtgagaaaaacactttgagagtactcctttcctatgcttaaacatctttaaatgtgttgtcggtgcatctcaattttcagacccttcatgaggatatttaggctatgacacagttggttctttaatacttagattttgttatgcagcagtctcaaatggacaggaatttaatcatttgccatttcaaaacccattagcagtctgacaggtaaccattgtatttactgctttgcttgaccacacatgctttaaaacccttattttaaagtaagaaaagtccggctaaaattcatccttcgcttgaacactttcttaaaggactaaaacttaagatgtctgcccagtagttagtaatgactccaacaagtttcaaagttttgtttaggttggcttatttttatttttagtccttaatcataattaaaagatatggccatttctgatgaactgcactacttggaggtctacctgacagatgagtttgctaaaggaaggaaagtggcagatctctacgaacttgtacagtatgctggaaacattatcccaaggctgtaagtaattacaaatcagagaacttttgtgtctgtatttctcactatatgttacgtcttttatgattatcagcttaagaaaaagttttaagggtaacttcttaacaaattgagatgaacattttggtagatattctcttacttgttttagagtaactagatttacgttttatgtagatatttgaggaattttggaaatagaaaaaatggacatgcttgctattttttttaatgtcttgactattagaaaaattaatataattgttctcttcctaatatgtttaaaggtaatatctatgttgtatatatacagtgtgtgtgtgtgtgtgtgtgtgtgtgtgtgtatagtttttttagaggtcagtcagtggttatattttaaatgagatattttccttgtcatgcgggagaaaacaacatggttcctgtcttgtttatttaatgttttgttcagtgtgtttggaaataaattcttgatttgaatattttatttctaatcagcatttcttcataattttcctagttaccttttgatcacagttggagttgtatatgtcaagtcatttcctcagtccaggaaggatattttgaaagatttggtagaaatgtgccgtggtgtgcaacatcccttgaggggtctgtttcttcgaaattaccttcttcagtgtaccagaaatatcttacctgatgaaggagagccaacagagtaagtgattttctttcttaattttgttgcaatatttctttcattgtagaatgtataaaagtgtggaaacatatacagaaacaa

SEQ ID NO: 15988 - DNA, 2300 bp, Homo sapien
aagttcagagaagactagcccatgatgaatagtaaatttcattaagtcagagtctttaaatgctggtgtcatccttgcctctgaaaccagcattttatggtaatagttccactgggttaaattcatgttccctttaagtgaagtttaaaagatacctaacttcttctttgaaatttgtttgtgcttctgaggaagagtgcttgcagcagagctcagtttactagagtttttcatagggaaaaaaagggagatgcatggtgttgttcattattcagttaatatttttctctttccaaagttagaacaagagaaagttttcaatttttataagctatgctagttcagaagtgggttttatgttatcaagtttctttgttaatctcaaaatgaaatgttgttttgcttttcttagataatgaaacagaccagattttacttgcaggttgatgtgtaagtccttgccttccacctcttcaactcattgtgtgagaggcattttgtctttagtcattgttttaaaaaataaaagtgaaatgacataacaaaaaattaaccattttaaagtgaacaatttataaagtggcatttagtatgctcacaatactgtacaatcaccacctttggtttcaaaacattttccctacccctaaaagaaagccagtgcccattaagtgattattcccctcagcctctctcctggtaatcatcagtctactttctgttcctatacagaatatttcatattagaggaatcatacaatatgtggctttttatgtctagcttctttcatttagcatgatgttttctaggtttgtttatgtagcaatacttcattccttttcatggttgaataatattctgtaattgtatgtatataccacaacttgtttattcatccattaattattcagtctttttttgttaaatatctaaacattctaaaaccagtgtattcatttatgcagtgaacatttgtggagcatattatgtatcaagcagtgtgttggatcccaaggatgtaaaaatgaccgtcatttataataataatgtgatacatgctgtggtggagatgtaaacagtgtttatatgacttgaagaagtggttaattctttttggcatggagattgaattcattttgcaagcagatttttgctgatggcaaagagaagagtgtctagatatattttgtccactgtagctgtagatcagtatatctgaaatggtgtaagctatttgaggacagtgctctttattgttttctactgtaagtcactaacaattttggctgttttatttctagactgtttagtcttttgttaaatattgccaaggaggggctggtcactgttctcgtaaactagttccttagtctgtcttaagaatagactgaaatgcagatgataagtagtctagaggaaaagagaggctttagagattggtttcggctatacctatcacaagatttcgattggtcagatggctatgtctgggttggattcagagtgtgttagcagaacacagccatgaactaccactgcaagtttctttgaggccagcctactttctgagagagaggcaattctttgtacacatactattctcctttgtcagtcttattctgttaacttcagcgataaggcatgactctgtgtgcagcagctgttaataattggtaaatgggctgggtgcggtggctcatgcctataatccaagcactttgggaggtcgaggcaggcgaatcacgaggtcaggagatggagactatcctggctaacatggtgaaaccccgtctctactaaaaatagaaaaaaaattagccgggtgtggtgatgggcgcttgtagtcccagctacttaggaggctgaggcaggagaatggcttgaacccgggaggcggagcttgccatgagccgagatggcaccactgcactccagcctgggcgacagagctagactccgtctcaaaaaaaaaatttggtaaatgggtttgaggtatagagctggacattgttggagaaggactatggctagaactatagaaataacgtacttgctagaagaatgtgcttgagacatcagtggaattttttatttttcagcctacaacacagcagtcccctcaggatgagcaggaaaagctcttggatgaagccatacaggctgtgaaggtccagtcattccaaatgaagagatgcctggtaagaatggagatgtgggaggcacagttgcagttcgtgtgttcctaaggaagcatgtgcagtgtcttctagagtcaggtgtttctggtaaatctaatctt

SEQ ID NO: 15989 - DNA, 2300 bp, Homo sapien
gaccccaaagcactgagttgacaatgttagtaaagcaatccacacactgtattacagttaagttctacaagcgtgtctcccccagtagcctcttaagttcgacattggtacccagggccacagtccgtgacactgaaggcacacaagatgtttgatgaattgaagtggattctggaattttagggctgggaagggccaaaggggccgccaacacttgctttcggatgcaaaagtgcgacaccaagaagactaagcgagctgcctaaattatagacagtgactgtgaaagaacgaatactcaagtttcctttcccaataaaattcatgaggacaagactgtgtgtctggctgattgctcccaactggttcacccaacaaagaatcggagtgtgtaatacatcctcaattaagtgttttccattacaaaacaatataaatgtcaatccataaacgctggaaacacacaaatcctaaagttaaattttgcgccggtcttgtatcaattcccaattataaaaatcctgagaaacaggcaaaatcaccttgtacggcaacacgttatatgaaaatagtatttgtaaaacacttaatcctttctggcattaagacatttaaagtgaaatctgtttccaggcttacagatttacagaagcctatctacacagagtgagtaaggtaattaaagcggacatacagtatatactcaaaaaatttatttacacagtgcaggctatgttaaacgctaataaaatgcaagtgacaacttgcctttgtgggaaccagacacaaagattcacattttgaggaagttcaagtttaccggccaacagccacaccacgatttgctgccgtcatagacgggccctaaggagaagtactgcttccagcaagtcaaatacttggattttatcaatggcgagacaaaagaggcaaggtgcgcccaatgcacaaatgctaaagtaaacaatcagtctcctttgcgaccgtcaggattagaagacagcctgagtccttccaggaaattcatgtaagcaggtccccagaactcgctgacaaacactgcagccgaaggcgggtatgaggccaagaaaggccaaggaatcactgcgacccctccaggagggcgtggggacggccgagcacaactaggcacaaaggtagaaacgcaacatctgggcgggtcccggcgccacctccgagtctcagggcctccacgcgccccgggggccagacgctcagacctaggactaccggtcccctcgtggtaggcaggtgaccgattccacttaaaggaggccgcaggccttcatggaccccaaagcctacatgccaagtcaaccccacagagaggccgccccgtctctcagcaacggccgcagccaagagccgccgcccaccccggcccggatcagcctgcccgcggccttcctcctgctgtcccctatcccgcaggccaaatcgggctggtcttaatcccgaacggtctgtggggccccttctccactcgctggagtgcggggcggtgggagagagcaggggctacaaggagggtcgacccaggtgccactgccccctcagcactcaccatggcgactccccagagcctgcagcaagcagcacccgccccgcgcgtagcctcccgcggtcatgtgacgctgcggcccctccaagccccgccctctctagccccgcccccgggccctacaggcggctcattgattggcctacttctaggaacccgagtctcgcgtgcttattggccctgtcacttaacgctagatggacggacctgagcgccagccaatctcaccacagcgtgcgagagtgggcggagcagtgcagggcagtggggatcgcccggcggcaggcaggagacaacaggagggaaaggcagtgtgtgatgagtttgtcaagaaggaatggaaggagggggagccgacaagtccacgttcaccgcatctgcgttggcgattgcgctattgatgcgcatgcgcaaaaggaagaccctgattggtttgtgggacggtctcaacgtcctgtcctaaccaatccagatgcgccgggggtggggcctggctctcactggccggtgcagcctttgcgcgcgggtttcgttgacccgcggcgttcacgggaattgttcgctttagtgccggcgccatggggtcggagctgatcgggcgcctagccccgcgcctgggcctcgccgagcccgacatgctgaggtgagttcggccgcgcaagaccagggctgggcttccgcctcgcggccctgggccctcaggtgaggcccgcgccct

SEQ ID NO: 15990 - DNA, 2300 bp, Homo sapien
ttccaatgcaaaatgattctacagtatttccagaataacacacaagaatacccaggacaattctaaaacaagagtttttactagggtttagttcaaccaaaagttaaaagagcttcaatgttgcactggattattcagacattcggtgggacctacttaccctgtccaaggggcacttcatccaggaagctgcaaggtccaggcacatgactgcactgctggtctccgtggtgcgtgcggagaggccgacacacttcacccgggacaggcgcaagtactcctctgctttcctggttaaaagggcagtgtgttcgctacaacttattcagaagtttgctcaacacgttggtaaacaatgaatacagcctggttagcttcacactaagcctaactcctgtggctcgtttatctggggctgggaatgaaggtcatatcctctggtgagaggaagacagaaccagcactgactccaaacatcactgtgctcaaatgctttcaggcaaaaggaagttaaattttgacaaaaaaattacccttctttcctccttccattactggaacaagcacgaactatcagagacaggcaggttagaccagggttcctcctttcctcctatttcctttaaatcagtagttcttaaacttgatggtaggcgaaaatcaccttggggacttgcaaattactgggtcccaggccgagttactgatcagcaggcttgaggtgggacccaagaatttgtatttctaacaagtgacaagatgatatggctgttgctggtccaggaaccacattttgagaaccactgttctaaatgactaccgagtcctgcaggtttgtcttcaaatcttttaagtgctgttttccttgccttccctcgcctgactgctccacgttttagctacaatggctttatttcgaaccccggatcccgcttcccatctcaacgcttttacaggagctgtcgcccctgcctgggctgctcttgccatatctttcctcgcctagcatctgccatcaatccggcctcagcgggaacggcgcctgcttttccgagttttgtttgtttctttgtgttaaaggcagccgctaggccgcgctccaccccaagcccagtggctcaggagcattgcccggttaaggtctacacagtcctcgcccttacagacagcggggtctgcgcctcgttgtcgggttccccgctataaacccgactgcagtaggcgttggcggaatgaacggaaagttctccctggctcatttttctacccacggacagggctggctgttcccagggacgtgtgccatcgccgtttgctatcgcccttcttgccatctcattcaagctcacggccgagaagtttttcttgaagtaggccctaaaccccgcccggccccagcgctccccgtcactcccccgccgcccgtcgcctgggaagggcgcgggcctcacctgagggcccagggccgcgaggcggaagcccagccctggtcttgcgcggccgaactcacctcagcatgtcgggctcggcgaggcccaggcgcggggctaggcgcccgatcagctccgaccccatggcgccggcactaaagcgaacaattcccgtgaacgccgcgggtcaacgaaacccgcgcgcaaaggctgcaccggccagtgagagccaggccccacccccggcgcatctggattggttaggacaggacgttgagaccgtcccacaaaccaatcagggtcttccttttgcgcatgcgcatcaatagcgcaatcgccaacgcagatgcggtgaacgtggacttgtcggctccccctccttccattccttcttgacaaactcatcacacactgcctttccctcctgttgtctcctgcctgccgccgggcgatccccactgccctgcactgctccgcccactctcgcacgctgtggtgagattggctggcgctcaggtccgtccatctagcgttaagtgacagggccaataagcacgcgagactcgggttcctagaagtaggccaatcaatgagccgcctgtagggcccgggggcggggctagagagggcggggcttggaggggccgcagcgtcacatgaccgcgggaggctacgcgcggggcgggtgctgcttgctgcaggctctggggagtcgccatggtgagtgctgagggggcagtggcacctgggtcgaccctccttgtagcccctgctctctcccaccgccccgcactccagcgagtggagaaggggccccacagaccgttcgggattaagaccagcccgatttggcctgcgggataggggaca

SEQ ID NO: 15991 - DNA, 2300 bp, Homo sapien
ttaaacaagggggaggtgctaaacaaatgtctgtggcctgaatggcaatgttgatgataatgatgacattttttatggttgttattttagaataaagagcgagtggaagaagagggaggaaaaccaaagcatgtgctgagcaccagtggggtgcagtctgatgccagggagcctggggaaggtgagtgggaccccatttgctttatctaacattgcagacacaacagcttcagaataaaggccccaacaacacggcccacagtatgattcctgggcaactgtcaaagcttctttttttcttgtttttgcagggttttttgtcatatatatcccaccagagacacatagtcaattgctgcatttcaaaaccacctggaatacagttgacccttgaacacctcggggttggggaactgacttcctgcacagttgaaaattcaagtataatttttgaatcttccaaaatttaactactaatagcctactgttgactggaagtcttgctgataacataaataagcaattaacacatgcttgttaaatatggtattcttagagtaagctaaagaaaagaaaatgttattacggtgatcacaaggaagataaaatatattccctattcattcagtggaagtgggtcttcattcttgtcattttcacattgagtaggctgaggaggatgaggaaggtgaggggttggtcttgttgtcttggtggcagaggaggaagaaaatctacgtctaagtgaacccgtgcagttcaaacctgtgttgctcaagggccaactgtagtacctttctgtgcaggctatgccaccaacttgttactcaaatgctttaaatgtttatggattactttcttaacctttaattttcttgtataattttgcatgatatttatgtggttccaaagtcaaatagacaaaacaatgcgtattaagagaagtctagaggccaggtgcaatggtccattcctgtaatcctagcaatttgggaggccaaggcaggagtatcatttgagcccaggagtttgagaccagcctgggcaacatagtgagactccatcactatgaaatttttttttacttcaaaataagaggccgggcacggtggctcacacctgtaatcccagcactttgggaggctgaggtgggcagatcagctgaggttaggagttcgagaccagcctggccaacatggtgaaatactgtctctactaaaaatacaaaaattaactgggcatggtggcatgtgcctgtaatcccagctactcaggaggctgaggcaggagaatcgcttggaccagggaggtggaggttgcagtgagccgagatcacgccactgtactccagcctgggtgacaagagcaagactctgtctcaaaaataaaaaacaaataaaagagaagtctatcttctacctttgttctctgcaccctgcttcctcccctgatatgtaagtaaccatttaaaaaacttttgtcttttctttcccttgaggtccagtctaactagacaacatgatcagtggttatgtgcacatgtgcacacatgcacactcacacatgctcccttcttagagaaacaggatgccagacacaccattctccaccttgctttctttcacttacagtatattcagagatcactccttagctgtgcttagagattgtttttttgagatggggtctcactctgttgcccaggctggagtgcaagtggcgtgaatatggctcactgcagcctctatctactgtgctcaatcctcctgcctcagcctcccaagtagctgggattgcaggcacatgtgaccatgcccaactcatttaaaaatgtttatttttagtagaggcaagctttcattgtgttgcccaggcttccatagagatattaatttctcctttttcacggctgtgccgcactccttgttggatgcatcatggtttagtcaaccagcccctttcatttgggttgcttccagtctttggctattataaacctgagcactgaatggccttgtgcagattccttgcagtatctttgtggcagactcctccacatgggagtgcatttttgtcctgcctgttttcctgtagagagccagaaggcggacgtgctggaggggacagcggagaggctgccccccatcagagcgtcagggctgggagctgaccccgcccaggcagtggtctcaccgggccagggagatggtgttcctggcccagcccaggcattccctggccacctgcccctgcccacaaaggtggaagccaaggctcctgagacacccagcgagaacctc

SEQ ID NO: 15992 - DNA, 2300 bp, Homo sapien
ccggctttattaacccaggacttgcctggttgctggttctccagagatctccacagcagtggcaataataaagtctctcctccagagaccagggtctgcctctcttgtctggtgggaattttattccacaaaaattatgggcaccagctggggagaggcacaggggctgggtgtgttagacttctgagacttctctaagcagccatttcccaaaggttggcccagggagccccgatctgcagggaagtgctaagtgtgaagtgtcaggagagccccctgccctggtcgggtgggggagtcttctgtggcagatgaggtcctcctgaggtgcacggtgaatccccagagggactggaacacagggttacccctcaaatttccttttccagggagactttgtttatttgtgtgtttgttttcagtggcggtgaatataacagaccctgctctttctagcatgttctgggtcattccaccaatgacacccagggctgtgctctcaggaatgggtttggatttctctgtgggctgcccaggggcaactatcgggatagaagggtaggtagagaaggttgtggtcaagctgcatttgcatagcaagctcactgcattgataggttaatggtctaacatagcaaaacctctaatggtgctttcgtgtatttatttattttgaagacagggtctcgttctgttggccaggctggagtgtagtggcaggatcagagctcgctgcagcctcaagcaatcctcccgccttagcctcctgagtagctaggtccacaggtgcgtgccaccacgcctggcttattttttgtagagaccaggtctcgccatgttgcccaggctggtttcgaacacctggacacaagcaatccgcctgccaaagtgctgggattacagatgtgagccactgcatccggccctaatagtgcttttagattccaaatgtccaggtcagtttttatcataattgcttttattcagaagggggaagcttgagggggacactaaagccccctcccttgggggcagccctgcccatggctggaccatcctcaggaggccgtgtgcctgcctgggccaccttgggcaaatgcccctctctgggctttgccctctgcccacggggagctggatggaaatggtgtaggtcagactgctccgtggcgtccttgggactttaaggggctccctgtgccccacctcgggggtaaccttagcatctctgcttgtgtctgctttattgactgatacttctgtaaaacgttttatttgaaccaagggcttataaggcaaaaacgtttgtaaaccacaggaaacacaggcctgttgtgctctgggtccctgctagtctgtttcagtatggaaattgcatgtctgatacctgcatagttgttattgggggagcaggtgtctctggtgagtgtccccctgagggccctgtgaagaacatggccctcgggacagcgcttggcaggtggccagggccattgccctcagttctatttttaggtacaagggactagtcactgagggctccggtggggagggacctgccggccaccccacagacagtctaaacacatgttctgaacgctggtgtagtaggggcacctgaagtttgttttaaatttgcagaagcatcaaaattttcatcatggcagaagtcacaactttgctgagtggtctcacattcctttctgtcttggtcttgctttttattgtgactctgatgtgtgtggcctcagggctctgggcctctaaggaccttcctccgccctgggatccctcctggagcccagctggcaggtgccgttctccaaaggaccctttcctttcctccgaaccattagttgcatgaaccctgctggctctgggcagattcttaacatatttgcccatcagcagcctctcagagaggaatgttaaatgctgccgtgatgtcaaaggggccccaaggagaagggcctgggctgacctcggcctgtcactcacaggcccgtgtagggtgggagataagcaaagcaaaggcacaggaagaacctgggcctctgcgctcctcacacagcccaggccatcgtggaggttggtgctgccaggagtctgtcagctacggaggacaatgaccttgcagacaccaccgcctgagtgagaaccaggggtctgtgcctctcctcattccccgctcttgcccttgtcaagcctgcaccagcatgtcaggaacctccaaggagagtctggggcatggggggctgccagggttgggcaagacctgcttaacaaccatggacacaaag

SEQ ID NO: 15993 - DNA, 2300 bp, Homo sapien
tgtttttttttttgtattttttagtacagatggggtctcagcatgttggccaggctggtctcaaattcctggccttaggtgatctgcccgccttggcctcccaaagtgctgggattacaggcatgagccactgcactcagccttgtgtgcgttttagagtcttaactagtagtttccccaataatgtaatgtgattttatctttgaaacatactgtaaggaaacttttgattttaagtaaaaaagcttaaaaatgattaatatctaaaaatgcttgtatacatatatatgtcctcagaaaaagcaagaacagcttgtggaataagcacgtctttaaggaattatcgatgtcagagtctatccatttaaagctgaagaccattacaggaaagtcatgttaaaatattcattggatatggtaaaggaggtactggtggctgggctggagcttgccgtatagaaaagtaattacttcagatctcataatgttaaattattggcttatttaaaaatttccgtggcagagaggcaaattaggtttcctctgtgacataacctatttaaccaatttttcaaaaaattgtactctatgagctttcttgttataaagctaaaaaatttaatttgtctaggcatgttgtaatggtcccagaaaatattactttgtcactggtgtcagagaaacctctgtcatcagcagatgtcctaagagtataattatagttctttacttaatccaaaatttgttctgctctgatatctataaatgatatgattattcaaaataccttgaaatgattccacaattagattaggtctgttgaagataacttattcttaaatatgagtaagattaaataaaagtagtttgagagttgttactccctgcctcaactccatggtattccaaaatgtttttgtgggcactttaatacttgtagtttgattttgtttgttagttttagaaatgaacatttcttagattttcatgggtattttttggctgtatttaaatgtaaatgatataaaagtaagggaaattgtgcaaattatttcttgtgtagtaatcagtggaagtgatcaaacagcttgaagcagtttatgatgagaaaatttaaaattgcaaatgacctgaaaatttagccagtctattcttatttctttaaatttcagaaatacttaagaaaaaaaaaaaaaaggtcagtatgacctctgagttgcttcctaaaagtaatcagatagtgttctccctcagataagatttcaaattgaaaagtatttgacttctttaactctagtaattgcacttgattctctaattctgatcattaaaatgacttggcaatatttaattttggcttgcctttcaatctgcatgtttgtcttaaatttagaaaaattaagctctttacttacttttatataaagtattaattggccaggcatggtggcttacacctgtaatcccaacactttgggaggccaaggcaggagagttgtttgaagccaggagtttgagaccagcctgggcaacatgatgagaccgcgtctctacaaaaagtaaaattagctgggtgtggtgcttccagctactaggcagctgaggctaaaggatcacttgagcccaggagttcgaggctgcagtgagtgatgatcttgccactgcactccagcctgggaggcagagcaagaaacaccctgtgtgaaaaaagtattgaatttgtttgattccactttcaaaatatgctctagatacaggtagtcattctgccaaattgtgttcttctctaaaacattttgtccgtcattctttgaaactcattcttaattatttccactttaccttctagtttggtttgatgccttatattcttgctagttaaaagcattttttccctagtattttctgtctttctagcctttaaggcatattgttgttaacaaatctcttatttaagttaattaaagttttttctgtgcagctgggttttttcttttactacatgacaagcttcatttttacatttggaagtacatgtatatatgtttatatatttttattctcaggatctattttctagggaactatttttttaaattattcttttgtgctgccttaacccatttattatagtttgaatattagtagtacttactactcaaagattacaactatactaataactatcctaacatacaaagcagactctccaggattaaaagtatgagacatataacagagtctggaatagaataattctttttaccccagtcaagtatttgccttttgcattattaagg

SEQ ID NO: 15994 - DNA, 2300 bp, Homo sapien
ctcaagcaatcctcctgtctcagcctcccaaagtgctgggattaatgttgcaatctcatgataaaacttgaacagatgaggagttacttcttacgaaggagcaaagaaagtggttttttgagatggaatctcctggggaagattctgtgaacatagtggaatggcaacaaaggatttagaatattacataaatattagttgataaagcagtggcagggtttgtgaagattaactcctttttttttttttttttttttttgagacagggattttctctgtcacccaggctgaagtgcaatggcgcaatcatggttcactgcagccttgacctcctgggctcagtggatcctccaactcaacctcttgagtagctgggactacaggcatacgctgtcaccacatggctattttttaattttttgtggagacgggtttcaccattttgcccaggatttttagcccaattttaacatcaacgtgtgtacactgttttttagacataatgctattgtacttttaatatattacagtatagtggaaacatgtttattatatacactgggaaacaacaacaaaaaattgagtgtggctctcttttttgcaatggcctggaactgaacccccagtccctccaaggtatgcctgtaaatggaccaaacaggaagcaatttcgtgggtttcatattaaaagctttaaacatttatataactgttatttatacaaagtgtgcttacaggcatttactatgtaaaattgtaactcataactttgctttagttaacaattgttgaataaaaagttatcagtggaatagccagtctctgtaataaatgcatattggtaaattttctctgagccaagtgtacagtttgtaaattttctttctgttatgtttgttctgattgtttattaagtataactttgggtctgtcaaattaaatatttaaaagtaagcttacgttttgcatagttgtttttaaatttcactttttctttctttttcttttttttgagacggagtctcgctctgtcgcccaggctggagtgcagtggccacaatctcggctcactgaagcctcaatctcataggctcaagcgatcctcccacctcagcctctctactagctaggactccaggcatgggccaccacgctcagctaatttttaaaaatcttttactttttgtagagatgggggtctcgctatgttgcccagggtggtctggaactcctgggctcaagagatccgccctcctcggcttcccaaagtgctgggattacaggcgtgagccattgcgcccagcctcgaataatttaattttaatgttaatttagtaagtatcagtcacggacagattggaaaaagaaaaacatctgatccctcatcttgatagtgagtagcactggtttacacagctaggctgctccttgaaggctgacactgcattttattcaaattttcctgacagtgggacttaggcaattatatattgaataaataaatgaattttcactctgctgctgggtccagtggtctcataaaatgtctatcataatttctcaatgattagccttggtaacatctacttaagtttattaaatgccaggatccacgctacgcccttcaccattcattccccagccttcgctcccacggtctctgtggggatggggcgtgcccagcactacggcccgccctacctatgcattcgttggtcgaactcgacgcccgttactgccgagtcccgcccaggccttgccccctcgtagtcggccaggccgagaggaggcgtggccactgccgcgccggggcggtctggcggaggggggggaggtctcccctcgtctcgtgatactctgggcgagctcgcgggcgggctgtgggtcgcgagccgccgtgggagcgcgtgtcgcggtccccaggagccgccggccgacgctccgccccgcccccttggcgcccaggtcccgcgcgagctcgcgcacgcgcgcgcgcgcacccgccagaggcttgtttgaggcccgcggggactgggcgggcggaggccgggctgccgaagtgtgaggggaggagcccgagccgtcgctgctgccgccgctaagggagaggagcatgtctgcaactcgagccaagaaagtgaagatggccaccaaatcatgccccgagtgcgaccaacaggtgggtgccgggggccgggcgcgcgggcgggcggcagtggcttggcggccgttgtctgtggaggggggcctcgccgggctcccggaggccgagcggtgggcagatcctggggcccgccggc

SEQ ID NO: 15995 - DNA, 2300 bp, Homo sapien
agcactgggttagaaatcacaattcctgctctccttttagctgtaccacctgaacaagtcacctaacctctctgagcctcatctataaagtgggaataatactgcctgtgcttttgggtaagaaagtgctttgcaaattgtacagtggttcacaagaaatcaatgaagcttttttcctcatgcaatctcagagagacgggttggcagagggcatattaggcactcgacttgtttttcacagtgatgacgtgggagcacacataagaaggctgtgtgcttgttgttctcagttgtggaaatagatttgtgatcacctctctaagcccctcctcccctgtccctactgatcagagacagagataacagaagagcatagtacactgacacgtgggtggacagcaagggactgcatggacattacatgcaagtcaaggtcaagcgtgttttggaggtggagggttatgtttgtgtctcaactgggcagttgataacgacgacactgaaggaggagctaagctcactggggaagacttttacctagagactgaatacctggccatcaagacctagtgtagacaaaggtgcgggggtggaaccagtacatgagagcccaaataactttccagcgcctttggtggaccaagccagtttgcagacataggaatactcaaagatatcttcggtttctgttgttctccccacctactttcctcttttattggcaaccaatgtatttaatcacagtatgaggtaggtgttaccctgactttacgcatggggaaactaggctttacgaagacgaggtagtacaaactcagttaagcagtgcacggctgtatgcaactgtggatattccgactcaggtctaccttctcccctacactgctgccccaactttcataaacctaatgtgagtgtgtgtgtgttgggatgtgggagctctgggctgtttttctggttgaaaacacccagactcacagaatttccaaggggaaggaccttagagggtatttaactcattttgcacatggagaatctgggacctagacgggattttgtagattctgtatttgtatttttgattttgtagattttggtgtctccattagaccccgagtcttccagaactccctttgcgccaccctacgccacctcctagtcttgccctgctcttgctctgggcaagccagggagcctttcgccagcagacaccgttaccaaacataatagcccccttgtgctgggcattcattcttcaacaaatatttactgagtggctcctctgtggcgggaactgttagaggtgctgcgaatgccatgaacaagaaagacactgcctctgcccctctggagctcgcacggttagtcgggggaggtaaaccataagccagtaaaaagtaaccgaagataatttcagatggtaggcagaaaataaaacggaagtgatggaggtctgaggtcagatggagtggtcgggaaaacctgaccacttggcagatggtccttgaagtctcacaacaaccctcagaggccgtgggcagatccccgttttgctgagaaggaagctggcgttcggtagtcagggcggcgtggccaagtcccagactcctcacccgccttcctgccagctctggtgggcagccgcaggcaccgtgtggccttggatgatgaaactcggggcgatgactgcaccatccagcagcctgcgtcctcgcaggtgcgggcagtgagggcggtaggggggcggacgcgccactggggacaggctgccaacagctctagcttcgcagacgcgacagagagcacggcccctgccccgcccctccaggctctccagcccctcaactgggacaaagagcccgcccagccccggccacgttcggacgaacgctcccgcctactgtccggtcccggtccggcccggcgcggggcgctgtgggacttgtagttcgcgtcactctccgcagccgctccggagcagccaggggaactacagggcccaggaggcagcgcacaggcccggggcggccccgacggtggtgggtgtgcgagcgcaggggccgggcggcgcgggcgccgggcgcggggatgcggctgtgggcgccggggccgggtagctgctccaggcgcgcgagctaaccgagtgcggcgagggcctaccaggggcgacaggcacgttgcatgcatgccttgggcgcagcctttgcgaaagccggttgggtgtgcgttggtgcttcagcggcgccgtggagggtccgggtcgccgggggatgggcaccagcgccgaagccaggctggca

SEQ ID NO: 15996 - DNA, 2300 bp, Homo sapien
agacgaggtagtacaaactcagttaagcagtgcacggctgtatgcaactgtggatattccgactcaggtctaccttctcccctacactgctgccccaactttcataaacctaatgtgagtgtgtgtgtgttgggatgtgggagctctgggctgtttttctggttgaaaacacccagactcacagaatttccaaggggaaggaccttagagggtatttaactcattttgcacatggagaatctgggacctagacgggattttgtagattctgtatttgtatttttgattttgtagattttggtgtctccattagaccccgagtcttccagaactccctttgcgccaccctacgccacctcctagtcttgccctgctcttgctctgggcaagccagggagcctttcgccagcagacaccgttaccaaacataatagcccccttgtgctgggcattcattcttcaacaaatatttactgagtggctcctctgtggcgggaactgttagaggtgctgcgaatgccatgaacaagaaagacactgcctctgcccctctggagctcgcacggttagtcgggggaggtaaaccataagccagtaaaaagtaaccgaagataatttcagatggtaggcagaaaataaaacggaagtgatggaggtctgaggtcagatggagtggtcgggaaaacctgaccacttggcagatggtccttgaagtctcacaacaaccctcagaggccgtgggcagatccccgttttgctgagaaggaagctggcgttcggtagtcagggcggcgtggccaagtcccagactcctcacccgccttcctgccagctctggtgggcagccgcaggcaccgtgtggccttggatgatgaaactcggggcgatgactgcaccatccagcagcctgcgtcctcgcaggtgcgggcagtgagggcggtaggggggcggacgcgccactggggacaggctgccaacagctctagcttcgcagacgcgacagagagcacggcccctgccccgcccctccaggctctccagcccctcaactgggacaaagagcccgcccagccccggccacgttcggacgaacgctcccgcctactgtccggtcccggtccggcccggcgcggggcgctgtgggacttgtagttcgcgtcactctccgcagccgctccggagcagccaggggaactacagggcccaggaggcagcgcacaggcccggggcggccccgacggtggtgggtgtgcgagcgcaggggccgggcggcgcgggcgccgggcgcggggatgcggctgtgggcgccggggccgggtagctgctccaggcgcgcgagctaaccgagtgcggcgagggcctaccaggggcgacaggcacgttgcatgcatgccttgggcgcagcctttgcgaaagccggttgggtgtgcgttggtgcttcagcggcgccgtggagggtccgggtcgccgggggatgggcaccagcgccgaagccaggctggcaccgctcgctgaaagagcccttggctgggcttgtgtgggggagtgctgcacgcctgggcagtgcgcgacgtgtttgttctttttctctttttgtgccagggtttctctccgcaagcgcgcgatgcagcgggcggcggcgctggtccggcggggctgtggtccccggacccccagctcctggggccgcagccagagcagcgcggccgccgaggcctcggcggtgctcaaggtgcggcccgagcgcagccggcgcgagcgcatcctcacgctggagtccatgaacccgcaggtgaaggcggtggagtacgccgtgcggggacccatcgtgctcaaggccggcgagatcgagctcgagctgcagcgggtgagcgcgcgctgggccccggggaggctggggccgctgagcaagggaaaaaccgcagcagccccagctggggtccttcccacgacgtccacccccatggccagctcctcagtcagccaagcctggctaaaacgagagaatgccccctcccgcccgttcacttactggtgcccagcaccgggcactcagtgaggccttgcaatacggttcacttgttgaattgaattcgtcaattgttgagcgggccgtgctgccaggcaccgcacgttgtgtgtctgccctactctcgtggaaccaaggtccagtggagagaggaacataagcgaatgaagaaagaagcaatagagtctcagtgataagttcttggaaaaaagtaaaacggaagagggttgggatgggggcggtgggagggaaaccattttaggtaggaggg

SEQ ID NO: 15997 - DNA, 2300 bp, Homo sapien
agatcaagggccagctggtgaagctgctgtcggtgcgcctgtgccccccagtgtctgggcaggccgccatggacattgtcgtgaaccccccggtggcaggagaggagtcctttgagcaattcagccgagtgagtccactgtgatgcgtctgcacccctgtggccggggtcacgagagttcctgctgggccagtggccagcctgtctccaggtggccagacagcagcctcctgagggtgtggcctgcaggtgcactcatggctcttcagagcctgaaccacccctatgagttgaagtctggaagcgcagctgggcattgtttggaagtaggaggactgtgagtgtgtgtgggcaggtgaacccttcctcttcctcatggcgagtgtcgaagagggaagggagctgtgtcctgataacacactggggggactcatgaaactgaaaagaagacgaggaggtagaggggcgcagcatcgatcccaggcccccacccgcctctgccaacctgtgtcctcacagcttgacagggtcctccagctctgacagctttgaccagttcaaacaaaggaatttatgggtcaagtaatctagaagtcagctcccaactggtccaggctcacttcttttttaaaaaattgtggtaaaatacacataaagtcgacctttttaacctttataaagtgctcggttttctggcattcaggacattcacaatgttgtgcggccatcactgccatccatctccagagccgttccatgatcccacactgagctctacctgttacccactaacaccctaccctgccctccccttagccccagcagccacccttctacccccttctctctgcactcacctcctcgagattcctcatataaatggagtcatgttggccgggcgtagcggctcatgcctgtaatccaagcactttgggaggttgtggcaggcggatcacctgaggtcaggagtttgagaccagcccggccaacatggtcaaacctcatctctactaaaaatacaaaaatcagccgggatggtacatgcctgttatcccaactactcgggaggctgaggcaggagaatcacttgaacccaggaggcggaggttgcagtgggctgagattgcgccatggcactccagcctggatgacagagcaagactccgtttaaaaacaaaaaaagtagagtcatgtcttatttgtctttttgtgactggcttattttccttatcatgatgtcctccaggtccatctgtgttgtggcccgtgtcgtgattccaggctgaaccatgctccccacgtggacaggccacatagtgcttatgcctccatctgcagcccacaccttccacgccacttggccggcggcacctgtggaagccctggacggtgactgtgctccagccgtggacatacgcccagctcaggcccagtcactgaccttgacttgctctgcctgggtcctgtgctgcatgcacaccacacagacagagggtggggcgcgctggtcccccccagatgcattggtggggcccatctgcagaagaatgggcatgtgtcctagaagcatgttctgaggaattccgtccagagccaagtccatacagactgacaggcaacaactggtttttctcattttctggaaagacatcctggtacgagaatagaacccatgacacaggctgctgggctctaccctttggcctagaactccctggtgtctgtgtgccccacaccccagggcacgtggcagcctcccagggtgagcgctgtggaagaatttgtgccgggagatgtgttccacccacctccctgttttgctgtgctcaggctcacacaagctcttctttggtcagtctgtctgataccccagtgtcgaaggaacagaccaccccacccactccgtctgtgtggtgtgcatggggcatgtgacccaggcagagcaaatctgagtcaacgcatgggtcagaggggacatgtgttcaaagctggagcaaagtcatcatctgggatttccgcaagtgctgcaggaaagatcagtggctggagtgaatctttatccagagatactgactgctgtgctgtttccatctctcatcaggagaaggagtcggtcctgggtaatctggccaaaaaagcaaagctgacggaagacctgtttaaccaagtcccaggaattcactgcaaccccttgcagggggccatgtacgccttccctcggatcttcattcctgccaaagctgtggaggctgctcaggtctggggcatgggctgggctggctctctcttaccaggttcacc

SEQ ID NO: 15998 - DNA, 2300 bp, Homo sapien
attatttagggactgtttctgtaacagtacttgtgcaaagtatgttctgcaaaacacgttcttcaaaatggtaatagtggccgggcatggtggctcacacctgtaatcccagccctttgggaggcgaaggcgggaggatcacctgaggtcaggagtttgagaccagcctggccaacacggcaaaaccccgtctccactgaaaatacaaaaatcagccgggcgtggtggcaggcgcctgtaatcccagctactcaggaggccgaggcagcagaatcacttgaaccagggaggcagaggcttcggtgagctgagatcacgcaactgcactctagcctgggcaacagagcaagactccgtctcacaaaaaaaaaaaaaaaagaaaaaagaaaaatgtaatggtacatgagaaagatttcagttaactttggtttcttgatagtgggagttagcaattataataaaataaaagcaggccaagagtggtggctaacacctgtaatcccagccctttgggaggctggggcaggagaattacttgaacccaggagttcgagaccagcctgggcaacgtggcaaaaccccatctctacaagaaatacaaaaattagctgggcgtggtggcaagcacctatggtctcagctaattgtggggcgaggggctgaggtggaaggattgcttcagcgtgggcggtggaggctgcggtgagccgagagtgtgccactgcactccagcccaggcgacagcaagaccctatctccaaaaataataataatttaaaaaaataaagtaaaatgccaagactctccaggaaggaaatatcatatgtaacttctcataattatctcatcacttccaatagcaatttggaaaaggatgctattgaactatactgtcaaatatggtagccactatcaacctgtagctacttgtttatgtttaaattaattcaaatttaaaatagttctccagtcacactagccacatgtgaaatatgcagtagtcacaggtgattaatggctactgtactggacactgcagatacagaacatttccatcatcacagaaaaaaattctattggatagcactgctctagaatggcaggggtgggaggagctatgtgtttttataattaaaattttaatcagaacacagccatatccatgtgtctgtggccataaaagcactaaaaggtcagagatgagtagttgtgacaaaaactatttggcccacaaagactaaattatttacttctgtaaggacagcttcaatctcaagatcaattctgaaaagctaactaaaggttacagtgaaatcttccacttatcagaataactaaacaactacttgtttagttatttattatttgattatttgtccctttgtagtttaaaaggttctatgtgataaaggagatagtcctcctatggtggtcattcctacagagagagtaaataaaaggttatatttgataaagaaggaaatagcaaagggacaaataatcaccttgctcctcttttctgaattaaaaagagtcacctttcactaacacaatacaaatctactgtttctctatgttcactgggcttaggcataatggagtaattactttcacacttttatcttttattttttgcaacagggtcttgttctgtcaccctggctgaagtgcactggtatgatcacagatcactgctccctcgaactcctgggctcaagcaatcctcccgcctcagcctcccacgcagctgggaccacagacatgccctgagcccctcattacatatttttccacacttttttttcctatagtaatgaggtctccctatattgcccaagctggcctcaaactcctgggctcgagcaatccacctctgtctcccaaagtgctggaattataggaatgagctaacgcacccggcctcctttttctttaataagatgtatacaaataccctttgaaataaaaaattgtaaacctctccaatatctgcattcccaatccattccaacataaaagcagagaagtactggcacacataccttctccattacaatcagagcacacagactgcatctgttgtaccatccctggagccagctgtctgatcatgatgcgcacacctcgacctcgacaagcactacacttttggacagctccagactttccgccttggctaaagcaagcacaagttatgcattaggtttttgtccacaaaccactccaataagctatgacacacagaaattgtgcttttaccttcatcttcaaccccaataacttgtatttaaattgacttc

SEQ ID NO: 15999 - DNA, 2300 bp, Homo sapien
gctaatttttgtgtttttaatagagacggggtcttgccatgttgaccaggctggtctcgaactcctgacctcaagtgatcaggacttgaggcaggagtgatcccgcctcagcctcccaaagttctgggattacaggccactgcgcccagccctaagtaatagaaatgtataactcttttaaaccaatgatataaaaaataacaagccccatcttacacctgaggaaacctcagaaaagttaagtaacttgctgaaggtcacattgttcctaaatggcagagtcagactaccaacctacacagtctaacctcgccataactttacaccgtctcttacgaacatctcaaaatgtgaaaagtagagaattggattttacagccgtgcatgaggatgacgtcagcatttacacggcaatggcggttggcagaggcagtggctcaggcctgcaatcccagcactttgggaggccaaggtgggtggatgatttgagatcaggagttcgagaccagcctggtcaacatggtgaagctccacctctactaaaaatacaaaaattagccgggcatggtggtgggcgcctgtaatcccagctactcgagaggctgaggtgggagaatcacttgaagccgggaggtggaggttgcagcgagctgagatggcgccactgcactccagcctgagcgacataacgagacgctgtttcaagtaaaaaaaaaaaaaaaaaaaaaaaaacaaaagagttcgagatcctaccacaaaaggtacaaacgaagggtggtgggaactcgaatgagatagcagtgttcaccagtgcccagtaaaggaagacttcacagagggagcaggatttcagatgggatttgaggaaaagggtttaaggactattaatgacttatcactgattactcttagggttttcaagctaaatttcagagtccttgtcatggaattcaggccctccacaactaggtcaaagggaacgccaaggaagaaacattatcctgagtgagatgcttatgctgaagtctttgctatcagttcaggttccaagggatcagaaaaccttacttttctgtctccataaaccgtaaatgggttgaaggcaggcacttttgtaacactcctctccccggaccaggcctctgtacatcatagcacttggtagatgcacagcatactttctgagcgaaactaaaacgaatgtaaatcaagtcacctggtggccagacttgccttacaccatctaaacctctggtgttagctaattttaaagctatcaagtaagaggcttaaacacgtggtccagatgcaacatgtggaccttggtttggacccggatgccacaaaccaattgtaaaaggacatgagatcatctgaaaaacctaaatatggactgggaattagattaaggaattgttaatttcattagatgagattacatcgttatgcctttaaaagttgtctcttagatattaaatatatacacttagggtatttatgaatgaaacggtttcccttaaaacactagaaatgtatggtggagccaatgaaacaggtaaaaggtagctaactgcactatggggagtaatatactgcttctgctaaatgtttcagaattctcataatataaaacacaacatacacacacacgcgccccccagtttttttcatcgtaagccccgagggagccagacccagagggtccaccgacgtcccggattctaataacgacatctgcgcgccaggcgggcctcctgcgggagccggggcccattttctttcgaagctaacgaagctgctgcgcaggcctgttaattccctcagcagccagtgcgaggttaaacacgcgacctcgcaaccatggcttttgagaggaagctgaattcctggggtgcgccgtgcacagttcttcatttcctacgttggccctgcccagccgcctggacctggaggaaaacagagaacctggcccactcttcaatacttcgaccccagtggccgcgcctcgggcgctcgggggcgggctctgcacagcgacgtcacggcgcaccgtgcgctgggtcaaagttcagccccgcccccgcttccccctcgctgtctccctcggcctgtgccgccgccgacgccgcttgtgggcccgactccgctctgtctgcttcgccaccttctccccgagcactgcccggccggccgccatggctaacgtggctgacacgaagctgtacgacatcctgggcgtcccgcccggcgccagcgagaacgagctgaagaaggtatctgggagcgggccgggcgggtgt

SEQ ID NO: 16000 - DNA, 2300 bp, Homo sapien
agaccggcctacccagtcccacttcctatgaggggagggaaaaagaaaccaaactcccaccatccaggtaacttgccctgcctccctgggtaggatatagggatagggtaagaggtcacttacttgatgaaagttgtaagtaaaagatcccttctcatgcaatctggagtaaaagaaaagtagtttatgcccttctcccaacattgcaatttgtcagattcacgttatgaatatttcccaaaaatttgttgaactaaacaattcaatatttagctgtatttacagtagaaaagtgctgtgatcttgttattatttatctttaactcgatgtttttttaaaaatatgtctttgaagagcatttactatagccttatataataccatatttatttggattaaaagaaaagcagagagtaaatataaatacttcagacagcttgattattctactgatacttctaccaagtcatagttttacaagcctagtcactttctcattgtctgccatgagcaagaattatactggatgaaactgagccagtgaccttccattggaagacatcacagtctagtggaagagggaagtcattacagcattagagctcgctaccagagtgtgagcggagggtttgggttatataagtgatggaaaactaatgagaactgttgatatatttaagaaaacatattgcttctttgttaaaatacacgcatgaagactttgtaaagttttgaactggaaatcctatttcattaccaattttccaccattctcacggaagtggtgaaccagtcatttcaaataaaccaaaattatttagtcaaaatgtaattctttaagctatattttgtaagttgttctctcttagttttatgccatcaaggtatttggtggggtggggggggaatatatgacatgacatttttgttttattaatctcttcgaattaaagggtagatgtggcatactgctccctcagaaataatagctaggaagtgaatactcattagatgtcttgaatggcaattcaaaggtaatctttattcactcactcaaattttattttaatgatagagtcacatatgagaaactagagcccaaacagggaacactgtgtgagtatgtaaagcgcttcatggaatgagaaggacgcacatttagagtcagaccaacctgggtttaatccttgccaccgaataacagattcatctctgcccacaaaaaaacatgatacctacttcattaggctcttctggagattaatgcttaaaatctaaattcacaatgtaagagaaatcgccaaacaagaatgggtcaagagtgtttaggaaataacttagaaccatttagctataaaatttgaatgggggatgctaatagagcttcctttgatagtacagttgacgtctgcctgtctgaaaatgcaggtattgttaagaggtgaaataaagcaaccatgtagaacagtaggatattgtgtaaataaataataggacatccgggaataggtatggctaagagtatagataaaaacatttttatatgttacagctaaagtaggatgtgtatatcttacaattaaacacaggtttttttaatgtgcagaaagagtgaaaagaaactcaccaattaatcacatgcattgttggaataatagaaatatgagtgattattttattttctcccctgtccagtaccatgagattgcttttataatgagaaaaatgtgagatagttatgccttgtgagcaaaaagtttctactctttatagacaaaacacaaagtaagttccttaatgcttggttccattataaagacaaccaaagaaacagatcattaatcttagttcctctcactatttaggcatcagccatttatcgattatggttttctgtcagctgtcattcggtgtcccatgttgtctgtggaaaatagaaatagaaaaattcaaattaatatatctttttaaaagcagtgtttttgtgttaatattacagatttatttgaggttcctagattatcaaatggagcactcaaatgaatgcaagagaaacttcgttgcagtctatgatggaagcagttctattgaaaacctgaaggccaagttttgcagcactgtggccaatgatgtaatgcttaaaacaggaattggagtgattcgaatgtgggcagatgaaggtagtcggcttagcaggtttcgaatgctctttacttcctttgtggagcgtaagtaaataattcctatagtattgagatcttttacatatttttcactcattcacagtacactcagcatt

SEQ ID NO: 16001 - DNA, 2300 bp, Homo sapien
ggaattcttgtggttgctctaatctctccccttttattacaacctcaactgccagatgaaatcttcccagaactccattactgcactattaaaagtaatcatttacctaactagcatttgagcacctatctccataatcaaagcccaccatgtccaacctctttataccaaacacaacacttgccccacgttccaggctcatcctgctccctgcctgctgagctcttcttctgcctcctctcctctcgccaccccaagcatttccatggtttgtgtgtcacctccttcaggaagtcttctctgatgacatgacacgcagatttttccttcagtcaacaacttcacattaagaaactattatgttaatttgagagccccttcctctcaaatttttttggttcactgttgtctgtaacctatacttaatattgtcttcttactctcctattctactaatatgctacatcattattattatttgagacggagtctcgctgttgcccaagctggagtgcagttcaagcgattctcctgcctcagcctccctagtagctgggactacaggcgcgtgccaccacgcccagctaatttttgtatttttagtagagatggggtttcaccatgtcggccaggctggtcttaaacctctgacctcgggtgacccgcctgcctcagcctcccaaagttctgggattacatgcgtgagccaccttttcatatccgtgggaaaaagttcttaaatgttttatttcctaattggttctcgtgtgcgatcttaactgtagtaggtggttacctttaggaacccaaacttacccatcttttatgcccccattcacagcacatggcaaagggtgaaacacctcgatattaattggtgttaagtatgtttttcctttgtaaatctcatgaattatttatgcttttgtacctttcttgaaggaatacaaagtgagagagaagagcttaacacctgaaaaatgtttcagttgcctgacattgtctttagctacaattggttagacaaacgtttacagagttcctactacacgcagagacaggcataaatattctattatggtaaggccttgatcacggttgttatctccagcaccaatcattgtcttctgcacataattaacacccaatacgtatgtgtggagtgaaaaaaatgaatgcagtcggcctgcctgcaagcagctgatattttaatggtgtgagggtgagggagatataaaggatgaacaaataaataaatgaggaaggtcatatcagtgtgataaccgctgtggagaaaataaagcaggatcatgaataccaccaacagccaggcagttgttggcagacctggagactcccatcagctggcgaagctgcccagcgtagtggttagctgctaggagggcagccccgggggaggtgcacagccctgccgctcattcgctacgcggctctggacgaagggcttcacctctctggcctcgactttccaatcccctaaaacctacttcatgagggggagtctgaggagttggtactaaagtgcctgtcaacctggcgggcgctagggaaacgccggcagcgccgcgggtcgggaactcaccggcgcgaagggcacggagagcctcgggctccctctgccgatgtccgcgcttccctgcccagggtcgagcaaggctgagctgggcaaagttttgaccttgaatggaggtctgggggactagggaccggcgcccctctctgtctgctagggctggcggagacccggcaggccggcgagggtgcggggccgaggtgggcggcgcttcccgggcgcctccgtcagacgggaggcatcgagggctcggccagctgccccgggcgccctgcgcggcggctgggcacgggccggtcactgccccggcgccggcctctcggacgaggccgccgcgcagccacggcgagaggcaccctcactacccccgcgcccagccggctcccagccctaacggcagccggcggggagcgacgccgtcccacggcgcgaggccgcggcgggcgcgcgaggcgcggcgcggggcggggcggggcgggcacatgcgcacaggcggcgcagccggcacgcggcgctcgcgctccctccttaaatgagcctgggcgccccgcgcccgccacttcagtggatcccgcgccggggccgcgggcggagctgcctgccggtcccgcgccgcgcgtccgcactcctcggccctcgggcggtcgatgggacggggcgccgcggagcaggaggcggcgcccgtcggggtgctcgggccgcgcgg

SEQ ID NO: 16002 - DNA, 2300 bp, Homo sapien
taatcagtggttacaagaaggtttctgggcactgttctcaacaagaaaacttttattctactccagttcatctgccctctcaagcatagtcccactagtccaatggagatgcctaacattatatcacaagttcaatgttcaaagtagcagagaaatagaaaggatgaacatgggaaaaagcagctgatcaagagaaactgaagccagtggattctgcgaggagtcagattggttgacttaaaagaaccatataaagatgccttataactatactacatgtcaagacttgtcttccccgaatctagcaatgctgtcccttgtaaggctgtttggttcattacacagatgcatcacaccaaggatgcagggactcccattgtagatatctgacaaagacataattaagcatgtgagcacaaaatgctgaatcctccaagaccctcctcctatggggccatcctccagagggtgacacattcttggagctcaattagcactcattgagacagacttttggaattgtttaatcaaacacaggccatctttaaagtcaaggctactctctgtatccagtttggacacagcagcaacaggtttggcagtacactgcaaaatgaggagtcaaaaagattgggaaaatattcagggtttgtaagaggttcctgcatccccgcaagggctccaagaagtctggttcaggatcctgtcaggcaagctctgagtagctcttccttccttccttcacagcattgatctttaagcagcacctgcttctgtaggtactcaagaaccctaagaccccctaatgcccactgtcagcatcaagatttacaaaaaagttagtttaacgattgtcaaagcaaagaatttccaagaacaagttagcaaagaaagtagacatttggaacactaaggtgatgaccaagatgaggaaggagtacacgaaagaacaggcagctcaagagagaaatttctgtagtttgagactgctttcccaaggaggcattgggtttatcagtggtccctgcaaaatgcttgtgtgagctgtttagtgtttaggcccttggaagggtacattcgcttcatagaaagttgtggccttgacaaagaaaggggtgggcgaattaggtaggtggggaggcaagaagaagccccctatgagaagagattgtcaggttgcaccttttcatgttcatcaacggggaaggaagactgaagcaaaatagaaaggaatgagtgggccttgggagcgaacgttgaggcaagctacaaagattcctaggaatcaggaagcactttggaaaacaggtgattccatggggaggagggggtaaggtgactgggtgagggccgcagacttcttaggaacaaaactgaggtgctgtcagggcttttgagggtaggtcaaactgtagggtagctgggtcagaacctggggttggaaagggtggtgcaaaaggacaagctgttaagaatgctaaagggaaggccacagggctgggagagaaggaccaggaaatgcagaaggaccggccattgggcaatgggtttggggaacaccgggagaggcacacggacagcgaacagagggagggcccggcaagcactgactttcccgcagcacgaagagatccgtctgcttgtcggagttgaggtccccgaaagccgcaagggtgccccaggcctcggccccaaagagctcggccgtgacgttgtgcagcgcccgcgctgggaccggcccgactcccagtagtgcaagccctgcgaggagcggcgagaagagggcccaggagctcgggagccggcccgccgccgccatggcagcccctcagcccccgcccgccggcccaacgccgcgcttgacgacagccgcaaagcaccgcgttaccggccgagagagtggcgcgcagccccgggacgcgtaagagccgctgccggctcctttttctctctcccactagggctgcccttccgacgctaaaaaagcagtggagctagggtgaaagccgccctcacgctcacttccggcaggcgcgcctcccgacagtgtcgtgcggggggcgtggcccggcattgctgacaggcggccccgggggcggtggccaaggcggcgaccggagcgcgatggcgggggcggcgggactcacggcagaagtgagctggaaggtcttggagcgaagagctcggaccaagcgctcaggtttggctggctggggcgccgccccccacccgagtaccttgggtggtgcttcgcctcaagcgccttggcgggaggcaggtgggggccctgggaatgaacc

SEQ ID NO: 16003 - DNA, 2300 bp, Homo sapien
ataactgcactcaacaacagttaacactagaattttttttctcagctaagaaaagagaattaaggttttcaaagcttactgttatgacatgcatttcagaggaaacaaagactgacgaagaaaatcaactctatgagcttatgaaagttaaagagaaatgttgcaaaaatatatgttgggggcagtactcaggtccctgtaagaaaactccagttattctctttgttcagacataaccaatccaataacactttttatatccagatagccacatcgttagtagccaactcagtatttctatatcacacaaaaacaatttaagaaaaagtgtgaaacaaatacatgtgactattccaagtcactttattgattcttagtagtactaaggactactttttgaaaaaattatctcatacttcatagatggtaattttactataaccctaagtatataaagctgaactttttgtaaggtataaaaaaacagagtgttcggtgtatgatttctgaaattagattttcagaaattagatttactttctccaaaaaaaaaaaaaaaaaagtcagtgtgcacaacagacaactaagaacttcataaataggaaaagcccaaaacgtaaggagaacatattaggtgagaaaataattttttttttttttgagacggagtctcactctgtcgcccacgctggagtgcagtggtgcgacctccactcactgcagcctccgcctcccaggttcaagcaattcttctgcctcagactcccgagtagctggggttacaggcgcccgccaccacgcccaggtaatttttgtatttttagtagagatggggttttaccaggttggccaggctggtctcgaactcctgacctcaggtgatccgcccgcctcggcctcccaaagtgctgggattacaggcgtgagccaccgcgcccgtccgaaaataatttcttaatatcaatgcaagtgcaaagttaattttcctagctaacacctttcacacccacccccaataatgacacttcatcaattctttaaaagggaagctccttagctgaaaacctgcattccgcctttcacctttcctgtttaagtgcatgccttttgttcaagattatatccagccaaccaggaatacaggaagttttaataacgccacaagtcatgacgttgcaatttgaacaagtcagttcgggacacttggaactgttaaaactgcctgcaaggcaccttctgacctctatgctttcgggtttggaaaccacacaacctggggccacttaagaagcccttttctttctgggccctaactatactcttcaatatctgaggcccagtctccttcagtttctgctagatagatgacaggtctactgcttagaacctgtggggaatgtaaaagggatataagacataaagcaaggagcccagacgccggctttctgcagccagatcgtagttacatctgacttggtctgattaagctatctgacttttgcagagaacattcacaggaaagacacattcacagggaagacacattccctttcccaggaatgtgccgccgcccgatttttaagttagaagactctaagggaagtccggaccgctgcctactttccgagtggggctcacaagcggaatagagtcgggggcacacgcagagtggagctggctctgccacctaatttttagaggtggaggaagatattagaaacaaggccagggccgccacctgctttctaaggaggaactcggggcacaggttcattcccagggcccccacctgcctcccgccaaggcgcttgaggcgaagcaccacccaaggtactcgggtggggggcggcgccccagccagccaaacctgagcgcttggtccgagctcttcgctccaagaccttccagctcacttctgccgtgagtcccgccgcccccgccatcgcgctccggtcgccgccttggccaccgcccccggggccgcctgtcagcaatgccgggccacgccccccgcacgacactgtcgggaggcgcgcctgccggaagtgagcgtgagggcggctttcaccctagctccactgcttttttagcgtcggaagggcagccctagtgggagagagaaaaaggagccggcagcggctcttacgcgtcccggggctgcgcgccactctctcggccggtaacgcggtgctttgcggctgtcgtcaagcgcggcgttgggccggcgggcgggggctgaggggctgccatggcggcggcgggccggctcccgagctcctgggccctcttctcgccgctcc

SEQ ID NO: 16004 - DNA, 2300 bp, Homo sapien
ccatttataagaaatctgcctccgtgagttactcgcctctaaccaggtcccacctccaacactgggaattacaattcaacatgagattagaggggacacacatccaaactatatcacatgcagatagtagaaaagagttatgatggaaaattgataagttaaatattagattttaaatgttaggaaaagtatgccttagtaaacacaaagcaagtagaaggaagaaagtaataaagataaatataggaataatggtatcaaatataaaggtaggatagagactctcaaaaccaacagctttattttttaaaaaagattaacaatataaactgacctcttaaaaaatttaccaagcagataaggaagagttaaacagagaaacaatattcacaatgaaaaggagaacataactgtaaataagtagagattaaaagagaaaaaaggaatcttctataagaaagtgcacggcaataaattttaaaactttccaaatggaatgtgttctagaaacaccataatttactgttttgggttgaattatgtcccgtcaaaattcatacattggagctgtagcccctgctacctcagaatgtgactatttggagatataaacatagtgttttaaaggtagggtctttaaagaggtaaattaaaatgaggcccttgggtgaaacctaatccagtctgactggtgtcctcataagggaagtaaattttgatgtagaaaggaataccaggggtgtgtgtgcacaaaggaaaggccacatgaggacaaagcagcaggaggatggccttctgctagccaaagagcaaggtctcaggagaaaccagacctgccaacaccttggtcttagacttcccactgtcagaactgtggaaagagaaatttctgttacttaagccacacggactatggtattttatatggcagccttagcaaagaagtagttactgtaagtgacttagaaagaaatagaataatgaaatagacttataacagttcttaagctttttattgttgttgttatttttgttgcctccaaggaagggaaaactatttaatttaaattctccctaatgtgagaaattaaatactaaagagtaacattttgttgggtagaattgagctttgaagggtcagaccttattgtaatagctaagattttttttgccccttgctctcttgagaaccaatttcacctccctaggaatgcataatcagtagcctttgaagaaagtaaatcatttttcagaaatcttactttttctcttcatcttctccaaaaagagaatagctctctagctagttagttaataggcacattttatcaaagcttaaaggaagatataactcctgccttataaaataggaaaagctcctcaataaattttatgagattggtataattttataaaagttgatgatgttagtatgaataaatcaaattttaaaccaggctcaatttttttttttcgtgtattcttttggaaacatggagaatgagaatgtaaatgagtcatggataaggtatcatgtaaagtttcacttggctacaaataaaagaaaacccatcgaacagtggtttcaataaataaaggactttttctttttttttttttttttattttgacggagtctcactgtctcccaggctggagtgcagtggcatgatctcagttcactgcaacctctgccacccagattcaagcgattcttctgcctcagcctcccaagtaactgggattacaggcacctgccactgcaccgggtaatttttgtgtttttagtagagatggggtttcaccatcttggccagggtgatcttgaactcctgacctcatgatccacccacctcaacctcccaaagtgctgggattacaggcgtgaggaaccatgcctggccaggatttattttatacacaaaaaatgctggggattggaagtgttttcctaggctttaacagtcatcaaggatatggattccttttctatccctctgctgtatttggcatgagacatttatccaaataatcataatataggtggtattcctctaggtatcatgtctacacttgtatgtaagaatcaaaaaagaagaggctttaaagaagtttcttggccaggtgcagtggctcacatctctaatcccaagtctttgggaggctgaggtgggaggatcacttgaagccaaaaatttgagaccagccttggcaataaagcaagaactcatcgctacaaaaatctttaaaaaataattttttttttttttttttttggagacagagtcttgctctgttgc

SEQ ID NO: 16005 - DNA, 2300 bp, Homo sapien
ggcaaaatcagtggccaaataatgaaacccactggtgtcttttgagcagtagcatatgttggaatgatcatagccccatgtacataacaaggcctcagtaaagttttattgaacaaataaatgaaaactcatatatattagagtctacagtatttgttcaattgctaattattttactatattctcttttcttcttttctgcagtaaattagaatagcatttgtatttgttaaaagtttagattgcatattaattaggaaaacagttgaatttcgagaaataaaatacctatattacatactcagactaaatagtatcaagtgctggggatagtcacactctatatatttgagttacatatttaaatatgttagttcagaacattaatggatcgatgtatcaactctagtgaagcacagtgaaaatgagtacttttaagaggaataaatgttgtgcatttaattaaaagctttgttcaacaaagactctattatccaatgtctaggtaccgtttctgatcacattgagagagtctatagaagagctggcagccaaaaactttggtttgtattagtgtccttgttgttatgttttatttttgtgttgttatattcgatagcctaaagaaaatggaccaatattaaagatagttattcatcctaatttttacttttaacctccaaggttacagcactttctaagaatgtgcctatgtagcatgtctgtccccccactgcctccaccaaaattctgagaacaaagacactgtagggattgaacctgaagagtattcgctggaatggtatgctaaggtttctttcctgctgtacacctcctctgccccaacaaggtgctttaagttctgttttttaatttaggaaacctgttctgctattatagaaggccatgaaaagagaccagtgatttatctaatcataagcaaaaatagtagaaggctattgtcttgtcacttaagttgaatgaatcccagtgattgtagttgcttcacgaaaaataaccaatttgttctacagaggtagtctgttcccagagattgaaaaaaaaaaagatgtaggaaagtttaaataaataaaattgtttaaattcacaatggagggccaattcacatggccctctgcattttgatgtaattctaacagttttactagcagaatctaacaaattttgaaagtcagagcgtatgtatagatatatatacacatgcacacatttttttaatgatacgttatccacttaaaaaaaaaagtctcaagaatgtcataagaaactcccttaacctcaatgagcctcaggtttctaatccctaaaataaggggattaaacaaaacaatcccttagaatatttcaattctatttttataataaatatgccgttcctcctcagaagaaataatgtaataatcctatagttaaatctttcaaattttcactgtaaattttcagtacagtaagacatcaagccaataagtgatagttctggtaaactttcttagccagtaagtttcaagtgtggtctgtagtcttatttttgattaagcacatctgttcttgctttatgtattacactttatgcatttcagataaatcattaactagcaaacatttagaatgctgactgttatgtttggaagaactcctggaagttttatttactctattttcccttttatggctttccactgacacacccaggttggcggtgcgctacggggctgcatttacccagaaattttcttcctctatagccccacacattactacttttctggtacatgggaaacaggtaacatgcacagaatttgaaaacccaagctgcttgaaatgtgtgggcttatttgcactctgaaggttaaatatgtcttttggtcttatagtgtgtgggtgaaagcttctctagaagtaggaagtgtttgtttcactaactttattagttattgacttaattttcttttagtcatctatgttgaaattaaggaatataaatgctttttataagtcagcttctgtggatatcctgaaatacatgaagattgcagccagtttcaaacctacatttttatttctctatctaaaagttccacgagaatttttacttttgagggaaaaaaattgtcttatgtattgcatgtgctgtactttaaaaaaaaaaaatctgttctccctaggttctaagactttttcagtaatataaaaatagcagtgtgaattccttcccccaacattatggctttatcagtaaaaagaaatactggtatttcattgtagcactttctaaaatt

SEQ ID NO: 16006 - DNA, 2300 bp, Homo sapien
ccggaaacatggctttgaatgtgaaatactagtcctatcttttcagtattggtaacaaatccaattcagaaaaaaatatagggaccaagcaaacttggtctgtgaccccctttttatttttatcttacctagatggtagactttttgagagtgagtcaaacaggtagggcagaagttgcaaatgatgacttattcctctttggaaaggttctactacccagaattaccagatgagccatgtgtctctcaagagaccagggtcctactatttattaccaggtgggtttccagaaggggtccatatggggcttgaggaagctagtgcctggagtgctgaaatgtcccaggaatcttccagtcataacctgtgactgcacagagcagtgcctaattaatgtctatggaatgaatgcacattttatgagacagctcacttattctgcagctgcagggagatgggccattttggcactctgatagggagtcctggagaactgagccaaaattttagtttctccatttgggggatgtgaacttgggcaagttatttaacgtctctaatcctgttccgtcacttgaaaaatggggatagtaaatagatatctttcattttgttgtgagatgagcgataatatagttaaagacttggcacatagtagtcaataacagctattaacatggggatcatgtaaggatatacccctagccacagaggttgggtcctggataggcatgagacacgggtagggccactcagagacatggccatcctttgctaagatttttgctggaaatattagtaaagcaaacctcactctcctggggaggctaaactggtaagatgtaggtaagatgttaagatgtaggtaataaaatcgttatatatacacacatatatatatatgtccagctatacatatatatatatatgtccagctatatatatatatgtcagctatatatatatatgtcagctatatatatatatgtcagctatatatatatatatcagctattatatatatatatgtcagctatatatatatatatatgtcagctatatatatatatatatagctggacaatgcgagctcaacagagtgagatggggtctccctttgttgcccagactggagtacagtggtgcgatcatagctcactgcaacctggaatgcctgggctcaaggcattctcccatctgcacctcctgagtagctggcactacaggcacacatcacccatgactggctaatttatttttgtagagacagggtctggccatcttgcccaggctggtctcaaactcatggctcaagccatccttccaccttggtctcccaaagtgctagaattataggcatgaacccccgcagctggctggaaatatttttttgacatttggatcctgctgtgcccgaagctgaactacccccaagtgtctctatcatgggaatagtatgtcttctttcatgcttaggtcaatttcaggtgggtttctatcatctgtacccaagagtcttgaccactataaacctctctaaagggaaacaggggaccagtgaagtacaatgagttgtttctaaatgcctatacatggtggggatttggaggagtgatttctgtgtcagccagaggtctgcatctgtacagctgataatttatggatggaatacagtggctttcaaaagattcctatttatctcatgtggagggttaactgtatgatagtaccgccttcctggtcacaacagggaagcagaggcaggggaaacagtgtgtttgtggaagcttgaagtgaaattgttttttacaaattcctgactccaagaccttaggaagcaggagcgtctctgttttacaagattgatatcaaaaccagaaacaacaaaggagctatgacaatttggcaataaggtttggcagccacctgctgcccttggcatctcagatcactctgaaggacctgactcaaggtagatgggtgtccttgtctgtccttagttgctctgattcctgatcagcatgcagagtttcacaagccatgactcaaagtcagccacgagggcacagcagccataaccctagcgtctagcacctggtacaaaccgatggcatctcccaggcatttctgaaccattttcacgtgcctctactctccggccgtctccacaccaccctgtgttctgccaaagggagctaaaatgagccctgttttaccaaaccactcaagcacggctgacacagtgtgttgctgcagaaggatcggggtgggtgggagtagggacagtgcagagagaaag

SEQ ID NO: 16007 - DNA, 2300 bp, Homo sapien
atagagatgaggtttctttatggtgtccagactggtctcaaaacacctgtcttcaaatgattctccctccttgacctctcaaagtgctgggattacaggtacaagccactgtgccccgccttcatcagagttttcagacagacaggaagcaaatagacatatcacgtaacgtcagataggaattatggctataaagagaaagaaagtaggttaaagaattcggagtgatgggagatatttcaggctggagggcaggaaagaactcttgcggagatgcctctggaggagagacttgattaatgtgagcaaaaggcttgtgattattggaagcaaaactgttccagccagaggaagcagccagcacaaaggtcctgaggcaggaagatgcttgggaggctggagatgcagggaggaggccagcacactgggagcacacagagcaaggcagcaaaaaccagacagatggacagagaggcagacaaaggtcagatcgtgtagcagcacaaagaatttcaaactctattcccaatttcctaacaaccctttgaagggttttgactgagggcatgcggcgatctgactttctttatacatggttgtgtcttatttagtcttcaaaactatcttatgagataagcagcattaacctcactttacagatgtaggaagtgggaatgagggagattaaacatcttgtcccagtttatgctgctggtaaatggtagatttgtaattccaatttaaagtggtgtgattccaaaccccaggctcttcacatcaccccatgccatctgaggacaggaactgtgtcttgcatgaccctgaaacatgatcagagtacccagcacgtggccactgcctggtaagtattttctaaatgaatacgtaagactcaactcaaactctgccacattcctgcaatgcctgggcgtttgggtcattgacatggcaaatatagagagtacagggatttttacaatccaaaagagaatggcaaagaattaagatgttttgatctgtgctctattttgggcaataattacccttccatggaaaaacataattttttttcagtgattccattttttaccccacttgatacattatctcttctacataaagagttctgtgtgcacacacatgtcaacgctgaaacagacaatcatcttgccctttctaatagtctaagggtctgttggaaatgacatgcactacaatttagctgagtgttgagtttgctcctaaaggctattcacatgcatatatcacgtcaagaagagtaaacgtgaatggatcctatgcctgttctccttcctacactcaagtaacccaccatgtagcagctcctttttttcaccctttcccaggggtaaactgaaagacaaaagaccattttcaggtgagtacctattatatacccctctactgactcacagttccccactgaataccccgaggctactccctcgcagccattcatacaataaagatgactaaagaaaggaatttgcatgtgccagcctctcctccctgctgaatgcgctggtgagcagagcctcaagcctgccctagctcacaggagcctctcaggttcctcgggtggaagaggccaggcacattctcacgcaaatatgaaatagaagaaaggcactgaaggaagcaaactagaggttctaagagctttccagcctgacctcttctggggtggaggcacagaggcttctctgatgactggtgacacaggatgggtggacattgaggagatgaagaggggaaaggagcagcattctaggctcggagctttctcggggctctgaaaagcacagaatcaaagggtgcagaaggctagcgtgatgggtcacagggtcagggagggggctgcgggtgggaggcagggacttttaggttatgatcctaacatctcctttacgcccccaatactcacaatactgggtgttgactcagcctccataggagatatcacaatgagtgagtgaaaacaggctcaggaaatcctcagagctcccagggtgtctagacacagggattctataatcctgtcaggaaagtgggtgggagagggatttgcaaagaaaaccattaacatcacttccccagggcgaggaactccatgtgaggctctgggggaacctgactatgtgcagtcgtttacagcctgggtctcctggagcctatgaaatgagaagcagtcattagcacagcaagcggccctcatccttccttctcaataataacactgtcaccagaggatggaaaattaccctgacgtctctgtatct

SEQ ID NO: 16008 - DNA, 2300 bp, Homo sapien
gaaagttttcttagaaaaggaaatgtttgaactgagccttgaaggctgagcagaaattggtcaagtgaagaaagggatactagatggttccaggttgtgccagtagtaaatacaaaaactaaaaagcaggaggaataaacagtttgtccagggagtagtaagatattccacatggctggagtgcagtattcaatggtacaaatagaaggtggagagtagagtatgcagtttggccagaggtttagggagtctctggtagctgctaatactctcattgaattaggaatctacagctgggtctatgatatttatgtcattaatattcattaactgcactgggcacagtagctcatgcctgtaatcccagcacttttgggaggctgaagcaggcagattgcttgagcccaggagtttgagaccagcctgggcaacatggcaagacctcgtctctactagaaatacaaaaattagctggacatggtggtgcacgcctgtagtccctgctacttgggaagctgaggagggaggatcacttgagcccaggaggcagaggttatgatgagctgagatggtgccactgcactccagcctggcgacagagtgagatcctgtctcaattttttttttttttttggtgactcacgcctgtaatcccagcactttgggaggctgagacaggtggattacctgaggtcaggagttcgatatcaacctggccaatatggcaaaaccctgtctctactaaaaatacaaaaattagccagacgcagtggcgtgcacctctagtcccggctactcagtaggctgaggctggataattgcttgaacccgggaggcagaggttgcagttagccaagatcgcaccactgcattcccacctgggcgacagagtgagactccgtctccacaacaaccacaataacaacaaaaactttaaattcattaacaatgattaaagagcttttcatcaactactagctctaaaacatgtgggcttctccatctgactacgagtcttcagtttccacgttgggggatttatctttttgagatgaagacattatgattttcaaattctgttgtaaaaagtacgtatattattccagaggagtgcctcttgttatataatataagcaagggttattgtagggttattggaggagggagggaacatcagtttcctgtatccagagtgccccagatgagatagatgctactcattctctatatactcttgagtaagtccttcctctctctgggcctttgtttcctcttctgtataatgagaaatgtgtaaaagattgcatctgaggacacttccagctctgccatgccatggttttatcagccactaacaacttgatgggagttggtttatctactgcttctagctatgaaaacttccagaaagaactcatgggaatgtgaccccgtttatatataataataaggcctttgtttgcaagtggcagagaccaactcaacataccttaggtaaaaaaggagaatttatctatagggtatggggaagtggctgtcatgggaccctagggcaggaatagagggaggcctcaggaaaggactaagactaggcatgggaaaccttcagggatcatgctctatggattggatttaggtggctggaggatggggtggctggcttggggactgaacagacattgcaaaaagtgtcctctccacctgggttgttggttttcatttggggcagcagtcacagaagtgtggggaatgtgggcctgtccagatgtggctggtcctgaggggtggtgttgttgaagttctctgaccagtgggtatcaggatggaggggatgtggatgcaaaaactcctggggatctgagagaatctgaaagaagaaggggtgtgtgcatgtgtgtgcgtgggtgtgtgtgggtgtatgcgcatggcggtgtgtgtgcatgtttgtggatgtgtgtgcatgtgtgcatctgtgtggatgtgtgtgtgcatgtgtgtgcatgtgtgcatgtgcatgtgtgtgtgtgtcagccaaacttaactctgagtaatactaagaaaacccattttcttggggctctttccctgggctgggactcagccttggtcattggaccggctcccaaccaaaaccacaccatagggttttctgctcttggccaacccaacatgagaaaagaggaattaaatggtcctactaataagaaagcctcagcgtagcattaagggacgtagcaggtcttctggccacactcccctacaaatgtggaaagctcattggtgaaaacagttctcagggg

SEQ ID NO: 16009 - DNA, 2300 bp, Homo sapien
aactttgatgaaataaaattgttatgctttccttttgttagtctgccttttgttacaagagtgtcagccatgacccacatgactggtgaggaaaagtatcacactttttctcccctacacatgtatatcactgtacacaatttttttttttgagacagagtcactctcatcatccaggcctgaatgcagtggcacgatcacagctcactgcagtcctgacttccctggctcaattcatactcccacctcagcctcgcaagtagctaggactacagacacatgccaccacgcccagctaatttttgtattttcagtagagatggggtttcaccatgttgcctaggcttgtcttgaatgcctgggctcaagtgatccacctgccttggccccccagtactgggattataggcctgagcctctgcacacagccaaaatagaatttttaaaggaagaggagaaatatgaaaaggatttctattttttttctttttgtattccagtggattatctcgcccccccgcgagctgtgtgtacacccaggatgggcctcagttccctgactatgggtgagtccacgctctgcctggaacaggagcttggctggtcttttcctaaggacttccttggatacagaccggacagtccctctccatcattctccactctgtttccggctaggcccaccaatcttcttgcgtagcgcccaatactgtttgtctgggtggaaatccatctccgcccagcctttcatggagatagaggaaaactgatcggcattcttcctccataaacttgacagcacttgactccgtttggaagattgtggaagcgagtctttgctgtgtttatgagacccccggggttgttgcgaagatcaagtgataaagaggatgaagaattttgcgatacacaaagggctccagaaatgtcgagtgatattattagcagtgatttgcattcatgaagggaagaatggacggaaattaaatggaacactttggacacgtgtaaggaaactgctgtcggtctagctcactccccaggccggggagccttcctgggaggacccattttcctacacagctgcccacagcccctctccatttccacctccctctaggtaggaagggaactcaggttgggcaaaggcggtgaattcgcatctccaggaagcggcggggccggaaggcagccagcagggggcggcattgcgcaggacaggagaaggtagcggccaagttcctcatgaaatccacgtgcgtgaggctgggaaggtcctctaagatgtttaaataacccttaaagcggaatcaagatttgtttttttctgcagttagagagtttgctccctcccagccggctcgctgagcgctgtggaacccttcggctgggctcccctgaaatcgggcgcttgttctgggacaggcgcagaagggaccccgggaatcacgcttgcgctcgggatgtgcagggttccaagggtgacacaggggaacttttctatgcaagggctagctgctagtgcaggtctcagacttaccttccgttcatttcaagacaaattgagctcaaattacccttttctttttcgttaaatgaatggggaatgaatgaatgagattttctgttttgaagatgaggctcatctcccctcccctcgcctcccctgccctcccctacccctgccctcccctacccctgccctcccctcccctcccttcccttcccctgatcccaaagttgattcccggttgcaggaacacagcgtagaaaattcgatgcattctctcaggaaggagcctggagtgggactcaggggacctgggtgctggtctcagccccacgccagtcgtggacaggcttctgttccttgggcttctcgtctgtagaatgacggttggagagaggatttttctccttctcttctacaaggatgtgctgtgacagccagggaagggctggccatgcacagtgctttcatgcatgggctctgactgtcaccaaagagccagacccggccacaggccatcctggaagaggggagagccctttaatgtgggcagagggaatgttggcccgccagagttccctctcaggtgtggtgggagtggcagttgaatggggcagttggagaggaggacttcaggcgggtgggacaagagaaactgaatctgaggtccttggggagaagcaggccctggagtcctgggcagcagatgccaggctctgagccccatgactgctgaccctcctcccctccctctcatcctcagcccaggtaaagcttcatttccagccca

SEQ ID NO: 16010 - DNA, 2300 bp, Homo sapien
tatataaacttacaattaaataaattacatcaaaaacaaagataatactcaaaatgtatcatttcctacttattttgctaccttttgctgttatttatacttctgaggttacttacatctattatatctctatggtagaaacagtatatgatgatgccgtgctgcgcatctcttcccagctctgcattcagtggagttatgttggtatcacatcacgaaatcggccatgatgggtgtgtttacaccacagaaataggcaaaggctacatatcagggctggatttatcattttgttgattgtctagtcttaagaaagaaatgtaggaaatgttaataatgcagattaaatgtacaagtgtgtggtgcctgtagccattacattgtgagtagtaaaataaaataagggaatattctttcagcatttgaaaactattcagcaaagttactcaggtcattggcaaatgagtgaagattcaaccaacatatatctctggtattgcactttcctcttacttgttaacatagagcaaaatgtcaagtagcattggaactatacttaatcaccaattgcaaccacaggtttgttacagatataaacgtttatgagcacagcactgaggcagccctttgcaaggatatgagacttgcactctgaaatttgctgcctccaccccttgctctattccctttactggggatctttgtgtgtgaataaatcatacagcaatataccgtggccccatccacagggcctcattctagggaatcatgccagttttaatttaatgcagctatattctaggctggttcatggcagccagtcttcctcccagagctgtaaagagtgtgtgtcactctctcttatctaatacacctccttctctctcttttctcttttctatcatccctgaagtgtccacattctaccactacatggcaagtaagcctatggcctggtgccctggctgggaagcctatcttatatggtctgtaggaaaattccagcaactgactctaccagatctggttgtgatttggtaaaaggaagtgggatgggaaggagtgggacaaagaaatctagagtaacttctcacaaagtaatgggttagcttgcagtctatttgcttgaagtacaatccaatatttgaatgtttgttttgttttgttttttgagatggggtcttgctctgttgcccaggctggagtacagtggcacaatctcagttcattgcaacttccaccttccaggatcaagttatacttctgcctcagcctcttaagtagctgagaccacaagcgtgcaccactacgtctagctaattttttatatttttggtagagacagggtttcgccatgttgcccaggctggtctcaaactcctgagctcaagcagtcctcccgcctcagcctcccaaagtgctagaattacaggtgcatgccatcatacccagcctcagtatttgaatggtaaaagctatatctgaacaccaggaccaactacataatttgtgggtaacagtgcaaaatgaaaatgaaaatgaaaatgtgggtcttcttgttcaaatttattaagaatttcaggatggcaacagaaaagcattcaactgagcctggggcccttctgagtgtggggccctggggggcacaggctgcaccctcatggccctggctctgctgcacactttctctttccatctcttcagaatattcctaattactaccttctctcctgtcccaggcacatgaatattctgagtcaagcagggagtgagtcacatactcagaaaaacaaatatgaaagtcatattttttttttaaaaaaagaaccctgattatttaagtctcctaacttgtccccagattccttctggggtctgtgaaaaccaagagtgaaagcagggaaaatgatgtttctttcattcacatatgtgtccattcattcttcatttattgagcacctgctctcctcccagcacgttccaggcccaggaaattcaacagcgaggaaagcagacatgtccctgtgctcatgaggctctctgtgtagtgcataaatgaagtctgaacaaataatgattcaaacaaatacacagttaaagactgggataaagcaagaagactgattttatgagcaggggtttgatacatcaaaggagattgcccaggatcaagggtgcggtgttgggggtgggttggggagggtggttagagaaggtttcactaagtgatttgggcctgaggcctgagaagatgtttaaaaagagggatcaagcacaggctaaggagaggaaagagcagg

SEQ ID NO: 16011 - DNA, 2300 bp, Homo sapien
gatatgtacaatgtgccctaccttgtgacagattctgagggtggtacagagataaaacatatgtggcccagattcccaagcgcttaccttttcatcaagggtctctccaagggtaagaggggaggggctgcattcattcaggcttccagagttttaacaaagaacttctaaaaccagcttacaaactttatggtatatttttaaaacactaatgtttaataattttaacccacttatgccggaggttgcaatttttttggatttttgcaatcagacctcggtgatgaccttgagcagtaggatataaataactttcacatgcttagcattcccataatggaacactaggcatcaatggcctaatacatacatgtgccccaacaaccacaataaacaatactatataaatgttctgttcacataataatggctggatttagtttttaaaacacaaattaatgctgctctatagaagatgtggtgtggtgtgggaataggcccaagtttaacctgcctgcttgatgaaaaccctctttcaatcctgtcactgtatctctgtgatgggatgtgtcagcctactttggagaacaccaagaatttaaatgtgaagtctttcgtgactgtgtggctttcctagctccttttttgacagactctgcatgtacttcattcattgatccattgaatatttgttatgcatatactatgtgctgggcactcttctagacccaaggacacatctgtgaacatgacagacaaggtccctggtttcaaagagcttacattcaatgaggtatgcagaaaacaaataagccaacaaggaaagaaatggcaatttcagaatgtgatgagtaaaggaagtagattaggaaaatatgcagaaggtggtatggagagaggggatctgggaaggttactctgaggaggtggcatttgagtagagtcctgaatgtcaagaatgaaccagctctgcaaggaggtgggaggagaatattcttgtcagatattaggactaatgcaaagatcaaggtgagaggatcatcctagcttctgaaattgaggagaaggccaggtactgagatgtggggattcttcaggcaacaagatgccctcctgaagctactgaaactaacagaaggaaataaacctaagagcagagaaagttaaatagcacagggcgaggtacaggaggagtaagatctaatcacttaaacttctttagggcccagctggcaggtgcttctggctccttgccctggacacttccttaaccactgatgtaccttctgatcttggacactagaccctgctgcataagaacatggaaataaatcagctcctccagaaagcccatgatacaggttaccccgctccagtggctcccctcctgttcacagtctgtttcaccatacgcaaacaacccacgtccaaaccaaatttgtcatcctgacctttgcctctggggattgggaaaacacagggctggaagcatctgctgtttcctctctattttattcccagtcatgtcctggtttccatcctgactacaatgatggtcttacaccaattagagtgaataaactccagctccattttcttccggaaagagaattgggagtccagggaatgcttccgggactgccaaggaaggttctggagggaattcccctggtcagtccaggaagtggagatgggccccatggaactggaaggaggcccaagctaatgtgtggctgagctcgagctcgtttgcttgggatgagcgactgatgttctgcaaacataactattacaatgtttgcattttcttaattttcgttgggtttcattttccatgtcgttagtttcctggatgaatcttgaataggaaagagtcacactatgtgctgggcactcttctagatccaaagacacatttgtgaacaggacagacaaggtccctggtttcaaagagcttacattctaatgaggtatgcagaaaacaaataagccaacaaggaaagaaatggtaatttcagaatgtgatgagtaaccctcattgcatctctttgcatctctttgcatctctagttgtgaaaccttcgttacctctctttgcaggtgtatttgaataaaccaggttggcaaatcatactatagctgaaaggtgagagaaaatctaatttctttacttggtctttataaatctggtcttcctcatgatcccccacttgctggttaatgagggaaaaataaatgttttggcttaccattttaagaccttgtttgagccaataatttaagtcattttatcaaataat

SEQ ID NO: 16012 - DNA, 2300 bp, Homo sapien
aaaaaatcaaacaaccccatctaaaagtgggcaaaggatatgaacagacacttctcaaaagaagacatttatgcagccaacagacacatgaaaaaatgctcatcatcagtggccatcagagaaatgcaaatcaaaaccacaatgagataccatctcacaccagttagaatggcaatcattaaaaagtcaggaaacaacaggtgctggagaggatgtggagaaataggaacacttttacactgttggtgggactgtaaactagttcaaccattgtggaagacagtgtggcaattcctcaaggatctggaactagaaataccatttgacccagccatcccattgctgggtatatacccaaaggattataaatcatgctgctataaagacacacacacacgtatgcttactgcggcactattcgcaatagcaaagacttggaaccaacccaaatgtccatcaatgatagactggattaagaaaatgtggcacatatacaccatggaatactatgcagccataaaaaaggatgagttcatgtcctttgtagggacatggatgatgctggaaaccatcattctgagcaaactatcgcaaagaccgaaaacaaaacactgcaagttctcactcataggtggcaactgaacaatgagaacacttggacacagggtggggaacatcacactcaggggcctgtcgttgggtggtggggagtgggggggaagggataccattaggagatatacctaatgtaaatgacgagttagtgagtgcagcaaaccaacatggcacatgtatacatatgtaacaaacctgtacgttgtgcacatgtaccctagaacttaaactataataaaaaataaaattaaattaaaaacagaaaaaaaataaaagtatcaaggttgtaaaaaaaaaaaaaattggacgggcgcagtggctcaggcctgtaatcccagcacttttgggaggccaaggcgggcagatcacgaggtcaggagattgagaccatcctggctaacatggcgaaaccccgtctctactaaaaatacaaaaaattagccgggcgtggttgcgggtgcctgtagtccccagctactcgggaggctgaagcaggagaatggcatgaacccgggaggcggagcttgcagtgagccgagatctcgccactacactccagcctgggtgacagagcgagactccgtctcaaaaaaaaaaaaaaaaaaaaaaaattgaggacttgccacagattagagaacacctaggagatttcataacaaaacacctaggagatttcacaacaggatcctggatattggatcctggaccagatccaatgaaggacattagtgggaaaactggcaaaatttgggtaaggcctataggttaaacgataataatgttaatttcctggttttgatcattgaactatgattatgtaagatgataacagacgaaactgggtgaaaggtatataggaactctgctgtagttttgtacatctaaaatcaattcgggccgggcacgttggctcacgcctgtaatcccagcactttgggaggccgaggtggacggatcgcttgaggtcaggagttaaagaccagcctggccaacatggtgaaatcccctccctactaaaaatacaacaattagctgggtgtggtggcgggcatctgtaatcccagctactcgggaggctgaggcaggagaatcgcttgaacccgggaggcagaggctgcaagccgtgggtatcgcgccattgcactccagcctccgcgacagagcgagaatctgtctcagaataaataaataaataaataaataaataattagttcgaatcaaaagttaaaaacacttcaagtatatgtaaaaaatcgaagaaaacgttaaaaacacttcaagtatatacaattcaaataagatcatccttccaaatatactctgtaagtgaggcgaaggtcgctgcacgcttgagtgcacgtctttccgcataggtaggacgctcaagtcttaccgggaggctctcctagagagcagcgcgaagccatggcttttgggcccggggacggaccgtagcgcgtagccggaagcggaggcgtggaggcgggtctgaggtttggtgactgcggggcaggccgggggcagctgtctgtctggctctttttgacagcccccagtgcgaaaggctgccagcatgtcatcagtgagccccatccagatccccagtcgcctcccgctgctgctcacccacgagggcgtcctgctgcccggctccaccatgcgcaccagcgtggactcggcccgc

SEQ ID NO: 16013 - DNA, 2300 bp, Homo sapien
gcaggacgatcacttgagcccaggagttcaatcaaggttgcggtgggctacgatcacgccactgcacttcagcggaggagacagaatgagactctgtctcaaaaaatacacaaatgaataaataataaaaaccttccaaaatcttgccagaataataccaacaaatagtgaaacttaaaatgtgactaaatcgacttttcaagttcacaatgtgcccatggctaatcaatacatatgcacagtagaaagaaaatgaagtctaataatgaccactcttgcctagacagggaactaagtgtgcctgggcacagaaggcaaaataatttgggaaaagtaagcagaaggagcagagtcgtatgttgggaaactagaatccaatacaatttatcaaagagtactgaaacttggaatgtgaccaattccactcaggcaataaccaaagcaggtcagatgggagccaaaatattttccatgcttgagaaaatcaaggcttttacaatataaatgaatactgggctgctgtggaaggtttgttggtctttgttgctttgttttgctttcttttaacgggggtggggggaggtaccagtctcctttgagaatctgaagaaagcaaaggattctcctaaaaaaatgtacatagtcacaagattttgaggaaaaataagacatgtccaaccctccggaaatccattcagagtcaggaacccctaatttaaaaataagggataactgccaggaaaggagaagctctaaactgaaaacacaacacctccagtagagttaggaataggaggcgggtgcttggcaggtgagtttgaagatacttgttgagagcatacgatataccagcattgtccaataaaaatataatgtggaccacatataaaattttagtggccacattataaagtaaaaacagcagaaatcttaacattttattaaccccaagtactcaaaatattacctttccaacatttaatccatataaaatgtattaatcaaaaagttttttcaaaatctggcgtgtattgtacacttacagcacatttagggtgaccaacctcctggtttccctgggacggaggggctaaaacataggactttcaatgctaaaacagacaatcgcagcaaaccaggacaactggcaattctatcatctcaatttgacgagccacatgcactacacagtactggacagcaaagtcatccatcatgcatggtgcaaagtggaatatacacattattcaatttattcttcataacttgcctaagagatggatgctgtcagtttccaaattgcagaataaaagaaatagaggttaaagctctcacccaaagtcacaccaatagggcgagggtactgggcaatatagtagtaagcctggggcctaagaaatgttatgagtgaaggagcagaggtgagaagctaggaaagttccagaaagggggaccagcgaaaatgtgagcagtaaaggccctttacaaagggaaacagaaggattagggggagaaggagaagggtggcagggagtatagaagaaaggcacccacaaatagtgcagtttaggaatgaaacaggaaaagttaaaactcacggagcagagaatgcctcagcggacaaaaatgatgggtgacagaaaaggggaggcggataggagtaaagggcagtggggagaaaggtgaaaagcgaaggcaagtgaaggcagagatcaccggggagaaagaaagggcctggaaagttaaaagcactggcctaggaggctgaagaccgagggcgaggaattgcggagagggggaagaggattcaaattaaattatccagaacggtagggaactgcgtagtttcaccaggtgtcaggcactacttcatgaacgatctcattcatggtcatggggcaggtatctgacatccccattttgcaagtgatagcaccagagaggcggaaccgagccgcgaaggccgccccgaactgagcctcgcgctcaaggcaggccgtggcctgggcccaggtccccggaggaggccgcgccgcccgccgccgccgcgggggcagccaggcctacctgtgcagcggcggcaggtcctgcgcgtcgctggcggggtcaggcgtgttggggatgacgcccaggatggtgctttgcagcgacgtgcccttcagaaggcggctccgcaccagctgcaggttgcgggccgagtccacgctggtgcgcatggtggagccgggcagcaggacgccctcgtgggtgagcagcagcgggaggcgactggggatctggatggggctcactgatgacat

SEQ ID NO: 16014 - DNA, 2300 bp, Homo sapien
gaatctattgtatattgggccccaggttttatatatacaaacaggtaaataaacaaaatactcaactaatattttccttctatgatatacaaaaggttgtatatcaagtcagtcatttttctaaaaattctggctcttctattgtatgtgcattattaggcatgctcaaaaggcagcattttaattttgcaacagatccaaacttatacatcccaatgactggtgtccttccctttagctagtagctctgtaaatctacatcctaattatgatattgttcaaagaagttttgaaactcctaactcgaatctaccctcagaggttttaagataatgttttaatccaaatcctaactcgaatctaccctcagagtttgtaaaatattgttttcattcaagtgaggtctgactacaatggttacaatttgtgtaatttggaaactgacctaaataatataagagttccaaacatatttaagaaccatcaactgcagtagtgggaaaatctaaaagcagcactactggaaaaagttttccaagatgaggatattatgtaaatatctaattccagcctatatgcccagcacttgctttttttttttttttttttcctatagacagaatcttgctctgtcacccaggctggagtgcagtggtacgattatagctcactgcagcttcgatcacctgggctcaagtaatcctccgcctcagcatcatgagtagatgggagtacaggcacgtgccaccaggcccagccacttttaaaaaatttttttactcaaagcccttaatttttcttggaatctttaatcttccaagaccttcctgcaatgatgttagttcagttcagcccgtgttggaataatatggggcctccccactcctctctttaatccccttttgtgaaaatctacatttaaaactacccatttggatataggtttagaatgctttgcagtttcaaaaggctttcatatgtatacttcattttatacctcccttcaccccatgaagaaggtagtattatttccttattacaagtgagtaaatgagattcaaaaaggtagaacatggcatggtggctcacacctataatcccagcactttgggaggccgaggcaagtggatcacttgggctcaggagttcgaaaccagtttgcgcaacatggcaaaaccccgtctccaccaaaaaaaaaaaaaaaaaatagctaggcattgtggcacatgcctgtaatcccagacactcaggaggctgaggtgagaggatcacttgaacctgggaggcaaaggttgcagtgagctgagatggcaccactgcaccagcatgggtgacagagtgagaccctgtctcaaaaaaattaaagtagaacaacttaggtgtacatggttacaagaaaatgtaatagaaataaatttaagaaataaatttaaatttaaaatttaaaggataaatttaaatttaataaattgagttccttaattatattttaagacaaattttacttttttctcattacaatggacaataggtaccacttctacctacaagaattataaacataggccaggcatggtggctcacgcctgtaatcctaacactttgggagacagaggcaggaggatcacttgagctcacaagtttgacaccagcctggtgagggagactgagaagtcggcactatgaggaaatgaagccatgtaccctgaaaagtgtaaatttggaagaaagctggatgaccatcttgaaatgcttgaaaggatattgtacaggtagtactaaattatgaccccttttcactaagaaaacaatgggtcactcaggaagcactaaaaatgcagttctactaagcagaaaaatgcagggtgccctgggtcagcatgccagccaagttctatactgcaggacaagtccaaagctcctcctttaaaaaggctcctgcaggcaacatgcctgcacactaacgtgcagaaagggactgtactactcaaaaccaccaaggaagtggcagaggtaagtcaacatctaatcctgccactctgtgtggcaaagaacgctgggagcaaattacttctgctgctctttgaaggctgtgccagcgtcacctggatagcgcaaaggaaacaagagaaaggaacagagcccctcttctggcctctgggctaccatacagaaaagcaggtaactggggaaggacagacttgtgcgtggaaacaggctaatgctatggattactcagtattggtattgttaaagcctttttttttttttttttttaagtagagtgttttaaaggccct

SEQ ID NO: 16015 - DNA, 2300 bp, Homo sapien
tcaacaccactaattaaataatccttcccatccccattatcatctattacatttatatgtatgatgggatctgtttgaagtctaccttgatctgctgattttactatttttatgtctggacagagtttatattaggaagatatatttgatgtggacaggatgtgaaaatggcatttctctgaaggtgttgagatgcagcgctctgacttaagttgaggcgttgagaattatgttagcaatttgacgttcatcagcgcagaagtcttgtcatcaaagagaatacattgtagagaaagcggagcagaagggaagaactcctccccggtgggactagagaaggggcagtcaagtaggctgaggagagagataggaacagtgatgatcatgctggcgattagtactccaggacaccatgctgtttaaaacatgcagaaagctggattatttctggcttgagatcaggtcagggactcaattactcattttgtatagagagacaaatccactgggagttgcagaaaactgcaacttactctcagtaaagtttgccatcacttaaaatgaaagtttttcaaaagtgctccagaaaataagcaagagacagttatttaaaaagtaggaattaggataatatttggagttaacctaaaactctctcctttttgttcccctaagagttgaaaagcactgttttagcagtcaggaaggaaaaatgcattaaaaagtgcttttgtcttaacaatgaaatcactgatatgcttataaaaatctcacttttaaaaaatatataatatgttcagttttttatttataatattttatctgctgatgacttatgtaagaataaaagcatatatttagtacttgtgtttttataaaattaaatttttatttactgctttatgttttaaacatttttatatttgaatgtattaaatagataaattttccaggttaaaaaataagttctgggctgaatgcagtggctcatgcctgtaatcccagcactttgggaggccaaggaaggagaattgcttgaggccaggagttcaagaccaggctgggcaacatagtgagacctcatctttacaaaaaaaatttaaaaaattagccagcatgctggtgtgtgtctgtagtcccagctatttaggaagctgaggtggaaggattacttgagccagggaggttgaggctgcagtaagcagtgttcatgccattgcacttcagcctggattacaaagcttgaccttgtctcaaaaaataaaatgttctgggggcttttaaattaaatgctagtatataattttgctccagtagtggttgtttattcatgaatttcaaggagcatataaggtagttttaacatatgatagagagatcatagagaatacaaaggccatttgactttgcacagaatatgttttttagatttgaaagaacaattttggcaggatgggaacagatgccgaaggctcactgaagtaattgatgaggtaggggatctggtggttatagccacttgctggagaagcagaacttcacaagaaaggaagtaaatagtgcgatagttaactagaagaaactagaggtaagaaaaaaatattttgaaagcaggaaagctttgaagacaaaatagagccagtggtggaaaggttgaagatgctaggaagaaattttgtaatgtaggagataaaatggaatttttttcagtcaccaaatggtaagaagtaatgtatttcaagaaaatagtggctgcaatagtagctcaaagaaaggtaattcctagatggtttaattatttctagtatccagttccttgaaatttgttttctcatgcaagtattattgtaagcatataccaaagaatcatgtctaccttacgttggtctacttctgcaattctgctgcctctctgtatacaactgccttttgattatcattctgaacttcacttcctaaagatagagactgtagtcataaaaatatttattcagcaccagtcataatcttatgtgtacctgggtacttcgtttccaatttattttgacatacggttttacttttctgctttctatgttaggttatagcaatacgccctattaggagaattacacatatctcaggtactttagaagatgaagatgaagatgaagataatgatgacattgtcatgctagagaaaaaaatacgaacatctagtatgccagagcaggcccataaagtctgtgtcaaagagataaagaggtaaattataaaaggcatttgttcattattgttttcattcttggtactcctgatta

SEQ ID NO: 16016 - DNA, 2300 bp, Homo sapien
catattaatctgaaatatatttttactactaagtgaattataattggatttctgtttgttttttttttgagatggagtctcactctgtcaccaggctggagtgcagtggcacgatctcagctcactgcaacctctatgtcccaggttcaaacaattctcttgcctcagcctcacaagtagctgggactacaggcgtgcaccaccacgcccagctaatttttgtatttttagtagagatgggatttcaccatgttggccaggaaggtctcaatgtcttgacctcatgatccacccaccttggcctcccaatataactggatttcttaattatctgtgagcattgcaggttcctgtatttagttttaaaatatggtagagtaaaaagttaattgtgtgtatttaaagtctaaagtaaataagtaatgaattccctggaaactccaagttatggcagaaaattcattagatacactaaagtaaagtgaaagaatcaggacagctgctgcagaggggagcatatgatgccaccttcttcctttggcagatttagctgtccgatcttctagctttcctggtgtttactaacctctttccattcaaaaggtgccttatcaattcatatttttaatttttgcttgttaaatggaaagggacattagttggaattttgtcttacgggatttagagacaaaggaaatctatatttattcaggctattaaataagaacattatgtgttctaaatatactatatatagaaaaaatacatatatacatacataaatacatatgcacacatatataaatacatacacacacacacacacatatatatatataccatcatgtggaggaaaaaaccttttatatggacatcttaggttttcttttgctgctacaatttattttatagtcatagttctggaaacagtatctttagagcccttcccttggaacccactgcttatttaattgaggtgtgtgtgtgtgtgtgtgtgtgtgtgtgtgtgtgtgtgtgtgtttcaagtatagatcaaattaggctaaaaagatgcatttattcttctatttgaaatttcagaggatttgaggataaagagataattgtctctaagatttgaggtgttttcctctttgggaaatatatcatttaatcagaaaactttcaagcactgtgcttagtaaatgcttgttttgtttgtgaaaacgttggaaattttaacaattattgacttagatcaaatttctttttctttttttttttggaggcagtctctgttgcccaggctggagtgcagtggtgcaatctcaactcattgcaacctccacctccccagctgaagcaattctcgtgcctcagcctccagagtaaccaggactacagacatgcgcaaccatgctcagctaattttttgtgtttttagtagagacagggtttcgccatgttgcccaggctggtctcaaactcttaagttcaagtgatccgcccgcctcagcctcccaaagtgctaggattacaggtgtgagctaacgtgcctggccagaataaatttcttcattgtaattatagtctcatttgaaataatacttaaatttgttctaaatctaagatccatttaatctacatttgattcattaaaaaagcatggcactggctgggagcagtgactcatgcctataatctcagcactttgggaggctgaggctggtggatcacttgaggccaggagtttgagaccagcctggccaacttggcaaagccctgtctactgaaaatacaaaaatcagccagcgtggttgtgcatgcctgtaatcccagctgctcgggagggtgaggcaggagaatcacttgaacctgagaggtggaggttgtagtgagccgagatcacgccactgcactgcagcctgggcgacagagcaagactctgtctctaaaaaaaaaaacaaaaaacaaagcatggcattatgggagccatgtaaataattacaaaacaagatctcttcttttccaggttatacacaggaggagaagatagagattgcccataggcacttgatccccaagcagctggaacaacatgggctgactccacagcagattcagataccccaggtcaccactcttgacatcatcaccaggttagttagccatcctgaggcttcattaactccaggcaacttttgagtatttactgagttaccaaacaggacatagagtatcaatatttgagtttttcatcttttgagataagccacagtctcctgaaaaggagattagtttattggcatcccatagcatcc

SEQ ID NO: 16017 - DNA, 2300 bp, Homo sapien
ttgaaaggaaaggagttagtggaaaaaatggaagaaccatagcgaaactaaaataaatatatgtagatatattgctggacgtggtggctcacacctgtaatcccaacactatgggaagctgaggcagccagatcacttgaggtcaggagttcaagaccagcctggtcaacatggtgaaaccccgtctctactaaaaatacaaacattaggccaggctcagtggctcacacctgtaatcccagcagtttgggaggctgaggtgggcggatcacctgaggtcaggagttcgagaccagcctggccaacatgctgaaaccccatctctactaaaaatgcaaaatttagctgggcatggtggcacatgcctgtagtcccagctacagggaggttgagccaggagaatcgcttgaacccaggaggtggaggttgcagtgagccatgattgtggcactacacgcccgcctgggtgacacagcgagactccatctcaaaaaaaaaaaaattacatatatatacacatacacacacacacaaacattagccgggcatggtgttgtgcaccagtaatcccagctactctggaggctgaggcaggagaatcgcttgaacccaggaggcagaggttgcagtgagccgagattgcaccactgcactgcagcttgggtgacagagcgagactctgtctcaaaaaatatagatagatagacaatgttagataactgcataattattatatgtgtgtattaatatacgaagcaatcactttcagaaggaatagtgtgttaaaaaaaggtaatgaaagattttaaaacaaaacacttcatgagacaagaagttagaacaattacggcaaactaaaagaaaaagctaggaatgagatcgaatacagccaagtatttcctgcagttttaaaacctctactccccattttgggtttctggccacagattacgtaatatttttcgttacttgaactggaattacaaagattgatacagaagatggtccgataagtcaattgggtcctgctccttgtatgtctaggtccaaaccaaaatgagtcaatatttggacaagatatcagccatccagggcttataggcaggtaaaggagatggcccattattacagggatttcaaaccaggctttgtattctcttaccctggcactgccaattatatttatttattggaaaatgataaccttagagttaagctatatgcttataaaagaggcactgcttatatgggttctatcatgtccaggtttacattgcccgttagaaaacaggacacctggctgggtgcagcaactcatgcctgtaatcccagcactttgggaggccaagcgagtgaggatcgcttgagcccaggaggtcaaggcagcagtgagctgtgttcacaccagtgcactagacaccatctcaaaaaaaaaaaaaagtgttggggggagagagagaaagagagagagagagagaagaggaggggaggggaggggatacctgatcagactcctctgaagagggaattgaaaagtttgtcacaagccctgagttatgctgatataacagagaattgttagatcagagaatccaaagtaacctactgcgcttagcccttcagtctttgtcctagctataggccataaagttgaatagtgccgggaattgttcttgacttaagaatataatggtcaaaaaggacaggcaaagttgtttcccttctggaacttacactttaatgggggagatagacaataagcaagtaaaagtaattgaacaaggcaattgcaaataccaccctcggtgagctcttgaaacacaaattatttcacctgcattccacagatacacaggtgaatgtttgccttgataaatgcataaaagtgactgaacttttgaggtccactgggcttttgtttgatatttactgctagtgaattttccagcctgcaaatctcttagaacttctaaatacatttttttttcttttaggttgcagagaacacatcttagaagatgaaaaacctgaatctatcagtgacactactgacttggctctaccacctgaaatgccgattttgattgatttccatgctctgaaagacatccttgggcccccgatgtatgaaatggaggtgattcattctttttatttctttttgctccagtcaatgaaaggaacactttattgaggccccagggccgtagggcctgggcaggaggctgccctttggggaaggaatagccttattcgaccttctttttgggacgcaggttgttggtgtggccgcacttctt

SEQ ID NO: 16018 - DNA, 2300 bp, Homo sapien
gagatcacctgagcccaggaggcagttgcagtgagccaagattgcaccactgcactccagcctgggtgacagagtgagactctgtctcaaaacaaacaaaacaacaatctggctgggcgcggtcgctaatgtctgtaatcccaacactttgggaggctgaggaggcagatcacttgaggtcaggaattcgagaccagcctggccaacatggtgaaacccgtctctattaaaaatacaaaaattagccgggcatggtggcacacacctgtaatcccagctacttgggaggctgaggcaagagaattgcttgaaccaggaggcagaggttgcagtgagctgagatcatgcctctgcactccagcctgagctacagagcgagactctgtctcaaaaaaacaaaaaacaaaaacaagaagaatcttactactgcttcttcggggatacttttggtattattttgacaaatgaattgtgaggattcaaatataagaaagggattattcttggtagagttaacaaaattgtaccaaatgactttttgtgttaaacacgattcattcacccaaccctagaaaggagcctgaatgaagtctaatttgggtgacagattcccacacaaattagatgtatgtcattcaggtatagagaattgattttatattagaaaaaacaaaccttgtaaacagttttataaataactgtttcatgattttccttaagtagtactgatctcttacatatagatcgtttgtgtctttcgcctcaagttagtatagaacagggcaagtggcaaagctcgaggaaagtgtgacctgaggtacatgctgtcagcttgatgctggagtttggcctctcaaatctctaacctgttaaatgaagttaattaggattaattttttttaatgtatgtttactactgaaaataagtgctcggccagacgcagaggctcacgcctgtaatcccagcactttgggaggccgaggctggcagatcacctgaagtcaggagtttgagaccagcctggccaacatggcgaaacactgtctctattaaaaatacaaaaattagctgggtgtggtgatacatgcctgtaatcccagctactcggagcctgaggcaggagaactgcttgaacccaggaggcggaggttgcattgagccaagattgtgccattgcactccagcccaggcgacagagtgagactcatgtctcaaaaaaaaaaaaaaaaaaaagaggaaaagaagtgcccaatagcttcaatggatgccacataattttggaataatttttacaatcaggaatttcattgtccaagccccttagaaaaagaagcaacccagccccatacccagaaagtcaagctgtatagtgctgttccttagtgagacggtcaactctcagtagaaaaatctcctgtttggattagtgcttagttgacctattgtgttcagttcctctaacatgagtaacttctattggataggaaattttgaagctcaaagggtgtaatgagagttaacattactgattttccactgttactttttagtgttttcataacttggatgtgttaacctatggcccatcaactatgctcctagtctcaggtgacaacatgttcaatttaagatggcaggcagtacagtggacctctctcatcccatgggaaggaacccaggatgtttattatgtagtattgtatagtctctgcagcagtaatagagaaagttaaaggtaagcggtggagaagtaaaatctagagtttctaatataacccttctcacttttcttttcaaaaaaaataagagggtctcaccatgttgcccacactggtctctatcgaactcctgggctcaagcgatcctgtcgtctcagcctcccaaagtgctaggattacaggcatgagccactctgcatggccaagctcactcttcttaaaggtctgctagtaagagggtttctactttttgaaacaaattcatgattacctaaaatgaagctaggttatgaagtatatataaatatgcagcccaataggctgggtgtggtggctcacacctgtaatcccagcactttgggaggctgaggcaggcagatcacttgaggtcaggagtttgagaccagtctggccaacatggtgagaccacatctctacaaaaaatacaaaaattagcgggtgtggtggcctgtgtgcgcccatagtaccagccacttgggaggcagaggcaggagaatcacttgaagccaggaggcagagttttcagtgagctgaaattgtgtcactgtacttcaagcctg

SEQ ID NO: 16019 - DNA, 2300 bp, Homo sapien
ctgaatgaagtctaatttgggtgacagattcccacacaaattagatgtatgtcattcaggtatagagaattgattttatattagaaaaaacaaaccttgtaaacagttttataaataactgtttcatgattttccttaagtagtactgatctcttacatatagatcgtttgtgtctttcgcctcaagttagtatagaacagggcaagtggcaaagctcgaggaaagtgtgacctgaggtacatgctgtcagcttgatgctggagtttggcctctcaaatctctaacctgttaaatgaagttaattaggattaattttttttaatgtatgtttactactgaaaataagtgctcggccagacgcagaggctcacgcctgtaatcccagcactttgggaggccgaggctggcagatcacctgaagtcaggagtttgagaccagcctggccaacatggcgaaacactgtctctattaaaaatacaaaaattagctgggtgtggtgatacatgcctgtaatcccagctactcggagcctgaggcaggagaactgcttgaacccaggaggcggaggttgcattgagccaagattgtgccattgcactccagcccaggcgacagagtgagactcatgtctcaaaaaaaaaaaaaaaaaaaagaggaaaagaagtgcccaatagcttcaatggatgccacataattttggaataatttttacaatcaggaatttcattgtccaagccccttagaaaaagaagcaacccagccccatacccagaaagtcaagctgtatagtgctgttccttagtgagacggtcaactctcagtagaaaaatctcctgtttggattagtgcttagttgacctattgtgttcagttcctctaacatgagtaacttctattggataggaaattttgaagctcaaagggtgtaatgagagttaacattactgattttccactgttactttttagtgttttcataacttggatgtgttaacctatggcccatcaactatgctcctagtctcaggtgacaacatgttcaatttaagatggcaggcagtacagtggacctctctcatcccatgggaaggaacccaggatgtttattatgtagtattgtatagtctctgcagcagtaatagagaaagttaaaggtaagcggtggagaagtaaaatctagagtttctaatataacccttctcacttttcttttcaaaaaaaataagagggtctcaccatgttgcccacactggtctctatcgaactcctgggctcaagcgatcctgtcgtctcagcctcccaaagtgctaggattacaggcatgagccactctgcatggccaagctcactcttcttaaaggtctgctagtaagagggtttctactttttgaaacaaattcatgattacctaaaatgaagctaggttatgaagtatatataaatatgcagcccaataggctgggtgtggtggctcacacctgtaatcccagcactttgggaggctgaggcaggcagatcacttgaggtcaggagtttgagaccagtctggccaacatggtgagaccacatctctacaaaaaatacaaaaattagcgggtgtggtggcctgtgtgcgcccatagtaccagccacttgggaggcagaggcaggagaatcacttgaagccaggaggcagagttttcagtgagctgaaattgtgtcactgtacttcaagcctgggcaatggagtgagactgtctcaaaatatatatatatttgcagcccaataaagatacttagataaaactattgggtttattccttgaaaactagggcatgtgtagctagatctggctcataaaaagcaaagttatttacatatattttaaggtaaaattgcctctgataaatgtcaaagaggaagtttaggtctttcttctggcagaaagccagagagtaagtgctgaatgtgacgcagaatcatgttaggtaacaaggactttgaggtaagtggctgaagtcttctgtggagtcagccgactcttgcaggattgtgtggtatcagtcacctttagcatttgccaacccaactctgatcattcttcttctttcaaggtatctcagcgtttgagtcagccaggagtagcaataggtttggcttggactcccttaggtggagaaatcatgttcgtggaggcgagtcgaatggatggcgagggccagttaactctgaccggccagctcggggacgtgatgaaggagtccgcccacctcgctatcagctggctccgcagcaacgcaaagaagtaccagctgacc

SEQ ID NO: 16020 - DNA, 2300 bp, Homo sapien
ggaaaagtccagacctaggactagttatggcagttggagagaaagaacatcgggatgtttgaaaatatgccattgactatcttaactactgtaattttatcatttccaacgtcatctaactggggactagaacaaactgtgaattcactttcagcaaccagagggcgctaatccacacccacatcgctctgccctgttccacccagcaggggcaacaaggatataacttggggttctcggtattcttcctttagtcctgacacaggcagccttgcactttgtagcagcaggagggcacttgctttaagcatatctttcgaaaggcatccattgagagaataatgcattctccccttgctgtgtatgacatggaacagtatgaccattgcactagctttgtttttggtttgttttgttttttttttaattccaggggtgggaggttggttggttgaagtctaagctcttcctttttcacctgggttttttttttttggggggggtggggggttaggggtggggcgggtggggaagagccaaaattttaaccatttttaagcatataatttgggggtatcagttactggatctaagcatgtccactctacacgctttttttttttttttttttttttttttttgagatggagtcttgctctgttacccaggctgcactgcagtggcatgatctcggctcactgcaacctctgcctccccagttcaagcaattctcatgcctcagcctcccaagtagctgggaccacaggtgtgtgccaccacgcccagctaatttttgtattttttagtagagacagggtttcaccatgttggccaggctggtctcaaactcccaacctcaaatgatccggccaccttggcctcccaaaatgctggcattacaggcgtgagccaccacacccggcttacatgcattttttatcaccacaaactgaaactctgtacccactgaaaaagagctccaaattccaccctcaccccagaccctggtaaccactatttcactttctttctgaatttcccttcatatgagtgggatcaaacaagagttgtccttttgtgtttagcattcttacttagcaagccatcaactgctcgaacagtcactggggcaactacttttcgcccagtgtcctccagaaaagaaagatctggagggtcaggccactctttttcttcaaaataatggggtgcagaagggtagggatgaacctcttcctcctttgccactttagctttagctcaaaggaactccaactttttattatttgcaacagttagctttctttgtttcacatctctgccttgcagaaccatgacctatcaaggtgttttgtcaaacaaaaactaatactttccctgggaaaaagccatgtggtagcaagtaccagaaatttttatggccaaataatacaccactatatccatagaccgcatttggtttatccactcatctgctgattgtttccccctcttgggtattatgagtaatgctatgaacatgggtgtacacatctctcttgaagtcccttcttaggtcctttagggatacatatccaggagcagaactactagatcacatatgctaaggtctgaatgtccccccaccaaattcgtatgttgaagcaaccaccaacgtgataggtgaggctttaggaggtgattatgtcatgagagctccatcctcattaatggatttagtgcctttataaaggggctcaagggaaccaattacctcctttttgcccttcgattcccttccaccatatgaggacacagcaacaggccccgtcctagaagctgagactgggccctcaatagatgataccagtctgccagcacgctgatcgtgggcttctcagtcttcacaactatgagaaataaattcgtacttttaaattacccagtctcaggtattctgttacggttaacacaaatgactaagacaacaggataattctgtttaactttttgagaactgccaaacttttccaccgcagctgcaccatttgacattccttccagcaatgcacaaatgttccagtttctccacatccttgccagcactcattttctgggttttttataatagccctccaaatgggtgtgacgtattttgattctatgtccctaatgactagtgatgttgagcattttctagcattgatttttaagatgttacccaaagaccccttgtatcaaaataagctggatttttttattgaaaattattaactctagaaattttagtttaaactagacttagggatatgtgtatttta

SEQ ID NO: 16021 - DNA, 2300 bp, Homo sapien
tgttcagaaaaggtgcttagttacccccacagtggagctattttctttcaaatggaaggtacatttttttgagagggggagtaaattaaatttataatggtgatgtttatgtcccacccatagctaccacccagaattaaccaaatcagattgagccccgcccaaatctaggtaggaattctcagagatggaattaacccgattaaatttgttttgtataaaagggaagtggggaaagtaagaagtaacttggactcttctagaggagagcaggcacaaactaagccaagaaaagcacgtttgagaattccagaggcagaagttgcttctgggtgcctgacgtcaacgatccagcacttcaagactggtgtgcggcatcctcaggggacactgtgtcctgggcacccctgcagtttaagagaatccactagtttataaggtaagtcctcgactgtcagcagtgggccagagacagactgttattttcagatggacaaatgctgttgggtagaggaagggatgcgggataaggaggacaaaatctgactttggcaaagccgggtgtttagaactttaatcgccacgttggcaagttctctcttagtccgtatccatttcactgcttgcagagcggcccaggggttctgggggcgagaaacacatctcaccccagagctgctcctcgcccaggacagaactcctctgcccttcacgaccaggtcaaggccacatggctatgccaagcacatagtctgtaaaaatggaaaatttacctctaaactgaagtgaaccgaactctattgaccttcccgtgtactgaggagctataacttctccccaaaaatgtgaaagtaaaattgcagtttaaatcatgtaattaggaatactgtaaactagtgttttgcacatataaactttatcatacactgggaatttgtacatacgtgcccggtatgggatttttctatttttatttttatttttttgagacagagtctcgctctgttgtccaggctggagtgcaatggcctgatctctgcctcactgcaacctctgcctcccgggttcaagcgattctcctgcctcagcctccgagtagctgggactacaggcgtgcaccaccacgcccggctaatttttgtatttttagtagagatagggtttcaccatgttggccaggctactctcgaactcctgacctcaggtaatccatcggcctcggcctccctaagtgctgggattacaggcgtgagccaccgcgtccggacggaataccattttaatagatcttacatggaattccagttagggcttgtaaatgtctcagatgcttgcttctgctcatagcacccatcaaagaattgcaagtgatgttttccttttattatttcaagaagtggaatgcagagtccctaattagggactttccagatgagcatggacacaggaaaacgcgtgcttccccattacccacttttcagctgaaacaagcttttgaagctcgtcccgctgttgctgaggagcggctcaacctcgggagaggctgggactctctttaggggtggggtcccggtcggcgggcagggcagccgctttttctttgggactgagtggagttgggaaggatccgtggaggcgctgggctaaatcagcagacaaaacaagggggagggcacaaggccgcggcggcggccagcctggggctcgcatcccgctgggcgacccctccggccggagccgggggggtcacgcggccccggaacaaagcgccgcgggaggagctgccctgagccgacgggcaagcgctagcttctcgcgggccagagcgccacgtgccaggatccgttgaatgcgcggtgcacgggcgcagcaacggtagccgagtagcccccgcacctactgccgcctttggagacccgcacagctacgcccgcggaggccgccgccggccgcgccaacgcctgtgcgcctgcgcgcccgcgaaagccccgcccccccaggctcccagcgcgcggggccgcgcctcctcatggccgccgccgcagtgtgtggtatttagcgggggcgcgcggcgggctcgaggacgcgcgaaacggcggcggcggcggcggccaggggggagccggggcggccgttgcggggcgcgctctcgagaggcggcggcggcccagggtgtcccgtcggtctcggcgccgggaagaggcggtggcgctgcccgcggtggcgggggttggcgacggagcgcgttggtgccaggaccggggtccgaggcgcgctctccgcccacaggtaagtggggc

SEQ ID NO: 16022 - DNA, 2300 bp, Homo sapien
atttgtcaattaaaaatttaaaaaatttttttttagagatagggtcccgctctttggcccaggctggaatgcagtgacatgatctcagcttactgcagcctcagtctcctgggctgaagcgatcctcccatctcagcctcccaagtagctggaactataggcacacaccaccattcccagcttattttttgtagaaatggggtttcaccatgttgcccaggctaaattaaaagaaaacttttttttttaaattttttatttcaataccaacatctgagaacaccaatactgtccagcattcacttgttctgttagatctgcatttaatttaacagtctggttttctttagaaaacagacagaaaatcatacaggatatagattgtttcaaccagctggaaaaaaattttttattaatgttattcttgcttcttaataaacttgcttttgctttgaaaaaaaaaattaatgttattcttttataccttcaagaaatctggaaaccaagggtaatagtagcaaaagtcaagatttgttctgtagtcaatcacttgatttgattatcttatctcttgattatgtcatggaagtaataaattactggtagcaagcaaagatgtcttttcattagagatgtaaataaatccagccttgggattattcactgtgtagctcagcaaatccctaagatcacattgcataaaatgttacaaaatacccaccttttagatttggatgcagagttttcagttcctctaaagatggtttaagcaagttatatctgttattttcaatgttttatttaaaacatgacattttgttcaaaattacaaacatgcttgtgatttttataaaatcggcctgacatttgtagttacatggtaatttattatgtgctataaggaacttttgtaaattgacctaatttcttattttctctttacaggaatatattaaaggaatctgtgaacctgaactagaagaaagagaatgttaccccaaggacatgcactgcatttttgttggggcagagagcctgtttctgaaaagcttgattcaggatacttgtgctgacctctgcattctggacattggccttcttggcatcagaggaagtgctgaggctgtggtcatggctaggagtcacattcaacaatttgtaaagctctttgaaaataaagagaacctacccagtagtcagaaagaatcagaggtgaaaagggaattcaaacaatttgttgaagcccatgcagacaattacacaatggatttgttgattttgcccacttccttgaaaaaagaacttttgacactcacacaaggtgaggagaatctctttgaaacaggagatgatgaggttattgaaatgagagattctcaacaaacagagtttacacagaatgctgccacagggctgaatatttctagagatgaaactgttttgcaggaagaggcaagaaataaagctgggactcctgtttctgagcttacaaaacaaatggacacagtcctttctagctcaccagatgtgctttttgatccaataaatggtctaaccccagatgaagaggcactttccaatgagagaatttgtcagaaaaggagattttctgattctgaagaaaggcatacgaagaagcagttttctttggaaaatgttcaggagggggagattttacacgatgctaagacattggctggaaatgtaatagctgacctatctgattcttctgctgattctgaaaatttaagtccagatataaaagaaactactgaggaaatggaatacaacatcctcgtaaacttttttaaaaccatgggctactcccaagaaattgttgaaaaggtcattaaggtgtatggaccatctactgaaccattattgctcttagaggaaattgaaaaagaaaataaaagattccaagaagacagagaattttcagctggtacagtgtatccagagaccaacaaaaccaaaaataaaggtgtttatagcagcacaaatgagcttacaactgattccactccaaagaaaacacaggctcacacacagcaaaatatggtagaaaaattttctcagttaccattcaaagtggaagctaaaccatgtacctcaaattgtagaattaatactttcagaacagtgccaatagaacagaaacatgaagtctggggttcaaaccagaactacatttgtaacacagaccctgaaactgatggcctttcaccttctgttgcctctccaagtcccaaagaagtcaattttgtttcaaggggagcttcaagtcaccagcccagagt

SEQ ID NO: 16023 - DNA, 2300 bp, Homo sapien
tactagagactaggaaggatagggagagatttgttaatagatacaaaattacagctccctggggagaataaattctagtgttccatatcactgtagaatgactacagttaacaataatatatagtttcaaatagctagaaggaggatatagagtgctcccaacacagagaaatgctaaatgtttgaaatggatatgctaattaccctgttctgatcactatacattattatatgtattgagacttccctgtgtaacccatgaatatatacaatcagccaggcacagtggctcacgccagcattcacttgttctattagatctgcatttaatttaacagtctgattttctttagaaaacagacaaaaaaatcataggatatagactgtttcaatcagtagcaactaattgtaatcccagcaatttgggaggtggaggcagggggatcacctgaggtcaggagttcaagaccagcttggccaacatggtgaaaccccatctagcgtacaaaattagccaggtgtcgtggcacatgcctgtaatcccagctacttgggaggctgaggcagaagagtcgcttgaacctgggagatcgcgccattccactccagcctgggtgactagaacaaaactccatctcaaaaaaaaaaaattatatatatatatacaatcattatttgtcaattaaaaatttaaaaaatttttttttagagatagggtcccgctctttggcccaggctggaatgcagtgacatgatctcagcttactgcagcctcagtctcctgggctgaagcgatcctcccatctcagcctcccaagtagctggaactataggcacacaccaccattcccagcttattttttgtagaaatggggtttcaccatgttgcccaggctaaattaaaagaaaacttttttttttaaattttttatttcaataccaacatctgagaacaccaatactgtccagcattcacttgttctgttagatctgcatttaatttaacagtctggttttctttagaaaacagacagaaaatcatacaggatatagattgtttcaaccagctggaaaaaaattttttattaatgttattcttgcttcttaataaacttgcttttgctttgaaaaaaaaaattaatgttattcttttataccttcaagaaatctggaaaccaagggtaatagtagcaaaagtcaagatttgttctgtagtcaatcacttgatttgattatcttatctcttgattatgtcatggaagtaataaattactggtagcaagcaaagatgtcttttcattagagatgtaaataaatccagccttgggattattcactgtgtagctcagcaaatccctaagatcacattgcataaaatgttacaaaatacccaccttttagatttggatgcagagttttcagttcctctaaagatggtttaagcaagttatatctgttattttcaatgttttatttaaaacatgacattttgttcaaaattacaaacatgcttgtgatttttataaaatcggcctgacatttgtagttacatggtaatttattatgtgctataaggaacttttgtaaattgacctaatttcttattttctctttacaggaatatattaaaggaatctgtgaacctgaactagaagaaagagaatgttaccccaaggacatgcactgcatttttgttggggcagagagcctgtttctgaaaagcttgattcaggatacttgtgctgacctctgcattctggacattggccttcttggcatcagaggaagtgctgaggctgtggtcatggctaggagtcacattcaacaatttgtaaagctctttgaaaataaagagaacctacccagtagtcagaaagaatcagaggtgaaaagggaattcaaacaatttgttgaagcccatgcagacaattacacaatggatttgttgattttgcccacttccttgaaaaaagaacttttgacactcacacaaggtgaggagaatctctttgaaacaggagatgatgaggttattgaaatgagagattctcaacaaacagagtttacacagaatgctgccacagggctgaatatttctagagatgaaactgttttgcaggaagaggcaagaaataaagctgggactcctgtttctgagcttacaaaacaaatggacacagtcctttctagctcaccagatgtgctttttgatccaataaatggtctaaccccagatgaagaggcactttccaatgagagaatttgtcagaaaaggagattttctgattctgaagaaaggc

SEQ ID NO: 16024 - DNA, 2300 bp, Homo sapien
atgtatcttcaattatacaccaacccagtgacttattagcacagcttcttggcccagcattttttaagggtgtgtgtatgcactgcttctgttggttttgggtgggatttttttggagggaagtggggagaggaaggcactgtggtgtgtttttcaaggcagcctccctcttcacctcttacaattaagcaattaagaatcgcaagcagggaagtcactgggagcaaacaggaaccagccctggggaaagccctgtctaatcactgaacaatagcaattccgtttaaggtgagtgcaataaggcaggaaataacatgctgtgttgacaacatgccttactgatagactgcggttctgcaagcaatgcatcagcaatgccacactcgccacctgacctgcctcagccaatcccacgtcatctacctgatggagcaaggctgctggttgtgtggacatcaagggaaaagcccaggggagcaggaatctgttgatctgtgagcctagtggttctcttccctgtgctgaatcacttcttggtggggcactgggagaccacacctgagtttctgagacatatggaaacccccagaagcctggatctctcataggttttaccttgggtaaatcctcctacagagaccattcccccttggtatttccaactacagcatctttagctcctcctctttttcctctagcagggatgtacacagatggcacagactcctgggcccacaagttcactgtggttgcataatccacacaaagattttccctgaaaattaggccttaaatatattgcttaagttagcaataataatgttcagtgagcacttacagtgttgggtgctgtattaatattcacaataggaagtactattattatctacattttatagatgaaaaattaaaacagagagaggtaatattcccagagcccctatctactatagccacaatatttagctgaaggaaaggaatccaacactttatcttccacaatctgttttcatggactcagagaatataaaggcctggaaaaggccttagagataactgagtgtactcttttattttacagatcagaaaacagacctggagaggggttagggtttatttgctccagtcccagggaagatcatgagtgagcccccaaactcccacttttcgggcttctcccataacatatcccctttcttccctcacagaagaaatcactctcctgaatttatctttttttttttttttgagacggagtttcgctcttcttgcccaggctggagtgcaatggcgcaatctcggctcaccgcacgcaacctctgcctccagggttcaagcgattctcctgcctcagcctccctagtagctgggattacaggcatgtgccaccacgccgcgctaatttttttttttttttttttttttttttttttttttttttttttttttagcagagacgggggtttctccattttggtcaggctggtctcgaactccggacctcgagtgatccacccgcctctgcccccacagactgctgggattacaggcgtgagccaccgcgcccggccttcttgaatttatcttaatcatttttttgattttcaattctccgtaagtatgcccattttcttctcttcttgctaccatttttactgaaagaaataaaaagggaaagagaaaaaagtgagaagggcagctaagaaggtaaaagggtagggaggaagggaagaaacagagaaagaaaagtcccgtctgcctgtggattaacgtgaaactgaataactcaactgctagaatcctggtttgagcgtcaagatgtctgaggtcaagtccaatccctgtgacactctcagtctcgcctcctggcaattaagtttccccaactataaacccatatatctacatccaccagatcccgcgaaagcggtttcccctcatcaaagaagtccgcccaggcctccaaaaccatccctttattctcaaccaacatggcgactgagggtgacgtcaacttccgtcgccttcaccctactcccttcccctagggggcggcgagcctcaatgacggctgcggccggggcgcatgcgcggcggcggggcccggcccgcggcggcggcaaaggggcggaggggttcgctgccagcaattgccaagctgctgcggtcgtggcgggatggtatagccgggcctgagggcgggcggcggggcgcgggcgggggcgaggcggccgggaagggccgacgccgcctgactggcttgggagcagcggcagcaagctgagggggcgtcgccgccg

SEQ ID NO: 16025 - DNA, 2300 bp, Homo sapien
gagaagatcccagggcgccagggactggttctacaagggtgcccctcccggtcccctccagcgcgccgccagagctgccagtcttggctgctacacgggaggcagcctcattatgcagctctcacctcttaaattagttcatgctctcacattaggtgtaatcacagcttgcaacgctttctggggatgtctcagaaagatctgagttgaaaaaatatttttgtgtcattttaatttaaagtaaaattgctgcttcttccccgcccctttctttcctcctggcccacccagcgaccctggccggccgtgctcaacgggggcgggggtcggaggtgagatttcctccacataattccttaaacagctatcaactaagtctcaaagaaaaaaaaaagagatctagaagcagagacgtggctgctggcgatcccaaagctggtgttcgctcttgggggagagcgtaccctgggggaggccgggaggccgggccagaggctagcccagaggcagagggcaggagcgctcagccggcgccccgcgtctctccagctcccgacgctgcgctggctccgctgagcacgccaggatcaaggtcgcctggtggggaccggagcgccaggagcctgtgggaagcgttccagccggcctctgactgggatccggcgccgcgtttctgctttggacttgactgacaggtccccccgccctcccgccgccctactaccagcctgggttcatccttcagggctacgtctaccgcacccgggctggaaagcctggagcgcgcccttcctctcctcatcttctcagctctcctttctccctgccacttggcaaagctgcattttgactttcacgttttggactacgtgtgtgtagttccaagtccatgcgtggcacgaaaatccacttagggtaaaaattattctcgaaaaatcgcccatctcaggatctggtgtctacactcaaggctaggaggtgcaggtacgggtgcgtaaagcatgccgtaagggtgcacagtaaataaaaagtacggatgcaaaatgtaaattttaagtgcaaaacagaaaagcagtactcgttgccgccccgcacgctgggttttaaggggcacgaaggtgggcctcggctgcttttgctcagccccgcgtcctcagcgcccggcccagtacccggtactccgtaggggttcaatgatctcccctgaataagtgaacgaattaacaaatgaatgaatgaccgctcgatccgacctccgcggccggcagagcagtcgctggagaggcgggagagagcgagaggccaagctccaccatcgcggccgccggctggggcagagggacacggagacactcggcgccccggctccgcaccgagtccccgcggtgagtgcccgcccagcagctcccgggcaccacgtgcgcccgccagagccgcgcaggccccgccccgccgcgcgcgcacgcgccctgcaccccggccgccgggaccctgagccaggctcgcccagcgcgccggctgccctcgcgcccgcgcccgctggggggcgctcccctcccaacgggcgcgcccacaggcgggcaggcgactcgcagcctccagcgattccactcccgaccccggggcgcgccgcctcctacctgagggccgacgagtgggggcgggcaggagggccgagggaggcggaacaggatcgaggcgcgaggcgggagtcgagaaagcgagcggccgaggcgactctcagtgcgcggacgcgggcgcgcgcccgcgctcccttcgtcgactcacggcgagagcccaaccctgctgccgcgcgccacccgcctcgccgcgcctaataacaacggcgcccggggtcaggtggccgagcgcggacagcgccgccattggctcggtggggagcgcggcgcgtcaggattggctggggggcgtggcctcggccggggcgggggcagggcctcggagggaggcgggccgggaggcggcgggggcggggccaggccgaggtccgcgcctttgtgcccggcgcgcgctctccgcccgctccggctgcagcgccggctgcatcaataattcagagcggcggcggcggcggcagcggcgggtgcgggcaggaggcggcggcagcagcgggaccgagcagcagcggctatgcatccaagtgcggctgggcagccgcggcacccctgaggcccgggaggggctccgggaacacagcgcggaggggacgctagtcgcggaggggacgctagtcccggagtgcgaggaagaggtgtagtgtccagagcggcggcggcgga

SEQ ID NO: 16026 - DNA, 2300 bp, Homo sapien
aattagccaggcgtagcccagctactcgggaggctgaagcaggagaatcactcgcaccattgcactccaacttgggcaataagagcgagactccgtctcaaagaaaaaaatgccagtaattgctatgagggagtggaaagcgatcatggtaagaaggattgggtgggctgaggagaggagttctaattttaaataggggggtcaggatcagcctcactgagaaggtaagtgtgagcaaagctgtgcaggaggtcagggaatgaggtatgtagctatgcaggggtgggcgctaggaatttccagacacatagactggctagtgcaaacatcctaaggtaggagtgtgcctgctttatttgaggaccagaaataaaaggaatggctggaggccgggtgcggcggctcacgcctgtaaccccagccctttgggaggtcgaggtggacagatcatctgaggtcaggagttcaagaccaacctggccaacatggcaaaaccccgtatctaccaaaaatacaaaaattagctgggcgtgctggtacatgcctgtagtcccagctacttgggaggctgaggcaggagaatcgcttgaacccaggaggtggaggtcgcagtgagccaagatcacaccactgcactccagcctgggtgacagagtgagactccatctcgggggaaaaaaaaaaaaaaaaggaatgactggaatggaatgagtggatgatgattggacaattaaattaaacaagtgagtctgaggcttccaggggccatcttgccccccaacctgcctctccccataagaagaataaactaagtacagacagatccagtctcttgctctgatccagctatgcctcaagcaacttctacccaacattttttcagtgcttaaggtaatataatccctttttaaaaccacttgtaactgaaataatcctgataaaacactgagactcgagtgcctaggacacctgagcttctgtgcccactgtgggatcttaacaatgtctgctggctggtcctgggcagcgggacgctcagcctcggagggtgaggcctggaatccatctgttcggggaggcctggacagctgacaagtgagaaggaacctttcaaatttgcaattttcaagtgtcagaaggatattatgccgctcctctgacacctggcatcttaggcagatgtgccccgttttctatcaacacgtctgctgtgtaaggtgtggcctttgcactcacaggatccggaacccacacctgagaatgagaactccaggtgttagcttctccaacaagtcacattggaaggaccaggcagacccctttccttcaattaccaaagttggtgacacaacagtttcaaaggattctattcaattcaacaagcgctttaagcagtggctcaagatgctagagggttggagaaacacatgatttggtctgtccccttaaaaagaagataagccagtgggcaagtgacttaattcatttcattcactatgtgttccatgctagaggcaagatactaggggctaggatggagactccccaaacaggcgaaagagatttgcatgtgagtactttgtgtgtgaccacttgttattcattgagcaaacatgaagaacttcctaaatgccctgcactctttgagactctaaggacacagcagccagcaagatgggcaagatcccagtccatgtagagcttatgtcctgctggaggataaaggtaataggccaggtaaggtggctcacgcctataatcctagcactttgggaggccaaggcaggaggatctcttgagctcagaagttcgaggcgagcctgggcctcctgagcccaggagttcgaggccagcctgggcaacatagcaagacctgtctctacacacacatacaaaaaaattagaaataaattagccaggcgtggtgatgtgcacctatagtcccagctattctggaggctgaggtgggaggacaacttgaacccagaaactggaggatgcagtgagctatgatcatgccactgcacttagcctgggagaaagaatgagaccctatctctaaaggaaaaaaaaagataataaagtgaaactcatttttgaaggagtgatttctgaaattgtttagtgcagtgaggaaaagacagtgggatattacaatggagagacgctgggcattgtgcagcaagacggagaagtcagggagggctgagctggatggaagtggtgggaaggagccagcctgcagagaagcagagcgtgtgctctggcagagggagtggcagggcaaaggccctgggcag

SEQ ID NO: 16027 - DNA, 2300 bp, Homo sapien
ttactacaagaggcaaaaatgcagttaacagctggcttcccatataaaacaatagagggcaaaaagcaatcaaatgaaaaaactgttaaccaagagttccattatccagaaaatctttcttcaagaatgaaggtaaaataaagacattaccatataaacaaagacaaaataattcattatttctaaaatcttacaaatatattgcaaaattaataaatccagatgtaaaatatcacatgcatattatttggtttatatttaactcaataacaggaagaaaaagtttgatattggataataaggccggacacggtggctcacgcctgtaatcccagcactttgtgaggccgagacaggtggatcacgaggtcaggagttcaagaccagcctggccaacatggtgaaaccccgtctctactaaaaatacaaaaattacagtgcgcctgtaatcccagctactcaggaggctgaggcaggagaatcgcttgaacctgggggacggaggttgcagtaagccgactctagcctgggtgacagagcgagactctgtctcaaaaaaaaaaaaaaagaaattggatgataagatgatgtttacccttggagggtggtaataactaccaggggctgtatggaagattctggggtactggttacatagatgtcttcatttgtgattctggcacatttttgtatatataatttccttcaatagaagtttactagagcaaaaaagggaagcctgaccatgccactccctcccctttttttgaattcctttattgttttcctttgctccctttcccttcccagtctgagcagaacctgtggctaccaagttcctggatggcctggcctctggccacctctgtaccattgcctctttgcctctggtactctagtcacccttgccttctgttgttagtgccatgcctcccgcttgtcacagggcctttgcacaggcatatttctctggtccaaagcccttatcttaatccatttgggcctatgacaaaataccacaaagtgggtagcttataaacaacaaacattcatttatcacatttttgaagcctaggaaatccaaaattaaggctctgacagattccgttgtctgctgaacccatttcctggtgacaccttctcactacatcttcacatggtggagctctctctagtctcttctgcaagggcaccaattccaatcatgagagaactgctctcatgacctaattacctcccaagaccccaccttttaatgccatcaccttgggggttaggatttcagcacatgaattttggagggacagaaatgtccagaccataacagccctgttgaagtctatttatcctttagctcagagctcaaaggtggcctacccaccaccccatccaagtctagtaccattgatatggcctttcatagaactacattcctttctttgaaagcactcatcttcacttgtcattatgaattcatacggtaattatctgccctgtcttttccactagcccatatgtcttaggaggtttgcctatgtttttttcctgcattgtatccccagcaccattcccaatacttagtaggtgcctgataaccacatgttggatgaataaatgaatatagacgaattgggcttataaaaagctttcttctaattagagtacactacagaaagataggatgccaaactaaagaattcagatttcttttagataggcaacaaggagccattgaaggtttttgagaaaggaagatgcgtggacagacctttattttattaagatctctgtggaggtagaggtggagaggctgcaaggaggctgtggcagagtccagaggagacatagcgcctgaagaggggtagtggccacatggagaacagtgggaggtggccaatgtcccacctccactctgacctcagggccagctaccaagacgggcaatgacttcacaatcactgcccaggccttccaccttttaaggccaatatcccagggtcttggctcactctgccctttatgttcacatctggaggccacaccctaccttctaagtcaccaggccatcaagtccagacaaagggatcgaaagagtgagacagtgccagccacctcccacccaagccactagcaagactccacaatgtcagagcaacaaatggacctgaaggatttaatgcccacaaagaggaaatacatgtggaagactgctgaagataggcgcatgtctgacctcacctgtgtgctggagtggctggagcggaggcaggggaagaagaaacaagctcccgaggtgggta

SEQ ID NO: 16028 - DNA, 2300 bp, Homo sapien
ctatgtcttgtctaccacctgaagcagcagcttccagctccatcagtccacccatacccagagaatggtgcattctatggccaatctgataagggcatttttgttgttgcaaaattttgcctgtgttcataaggaccagtgggatttccttccctccaggattagggatttgaggggagttgactcccaggtgtggatcaagtgacaggacttgtcttccttttggcctatgggactggtggtctgtgagttcgtttccagtgactttgtccaggctgcccctcctttccctatcaggaaagtggccgagagcctcccctctgatggggggtatcatgtcctgccaggtccaggcaagtgttgtgaagggaaaaggcgctcccccttcattatctgccgcccctctggcgtgccctctgcagacaggaaggccctggtgtccacttgcttccggcccctgcccctccccacagccccctgcagccgttggccagctgcacagcctcagcccgcgtgctgtcgagaagctggctctgtccttgtttctcggcagccctgggaattgcctctaatatcctctctgccttctcttgcagatggtgatgacgacccacaactctcctgggtggcctcgtctccctccagcaaggatgttgcgtcacccacgcagatgatcggagatggttgtgacctcggcctcggcgaggaggaagggggcacgggcctgccatacccttgccagttctgcgacaagtccttcatccgcttgagctacttgaagaggcacgagcagatccacagcgacaagctgccgttcaagtgcacctactgcagccgcctcttcaagcacaagaggagccgtgaccggcacatcaagctgcatacgggcgacaagaagtatcactgccacgagtgcgaggcagccttctcccgcagcgaccacctcaagatccacctgaagacccacagctccagcaagcccttcaagtgcactgtgtgcaagcgcggcttctcctccaccagctcgctgcagagccacatgcaggcccacaaaaagaacaaggagcatctggccaagtcggagaaggaagccaagaaggacgacttcatgtgcgactactgcgaggacaccttcagccagacggaggagctggagaagcacgtgctcacccgccacccgcagctgtccgagaaggcggacctgcagtgcattcactgccctgaggtcttcgtcgacgagaacacactgctcgcccatatccaccaagcccacgccaaccagaaacacaagtgccccatgtgccctgagcagttctcctcagtggaaggtgtctactgccacctggacagccaccggcagcccgactccagcaaccacagtgtcagtcccgaccctgtactgggcagcgtggcctccatgagcagcgccacacccgactccagcgcctctgtggagcgtggctccaccccggactccaccttgaagccgctgcgggggcagaagaagatgcgggatgacgggcagggctggaccaaggtggtctatagctgcccctattgttccaagcgggactttaacagcctggccgtgctggagatccacctgaagaccatccacgcggacaagccccagcagagccacacatgtcagatctgcctggactccatgcccaccctctacaacctcaacgagcacgttcgcaagctgcacaagaaccatgcctaccctgtgatgcagtttggcaacatctctgccttccactgcaactactgccccgagatgttcgccgacatcaatagcctgcaggagcacatccgcgtctcccactgcggccccaacgccaacccctctgacggtaataatgctttcttctgcaaccagtgctccatgggtttccttactgagtcctccctcaccgagcacatccagcaggcccactgcagtgtgggcagtgccaaactagagtctccggtggtgcagcccacgcagtccttcatggaggtctattcctgcccctactgcaccaactcccccatctttggctccatcctgaaactcaccaagcacatcaaggagaaccacaagaacattccactggcccacagcaagaagtccaaggccgagcagagcccagtctcgtccgatgtggaggtgtcttccccgaagcggcagcggctctcagcaagcgccaactccatctccaatggggagtatccttgcaatcaatgcgacctcaagttctccaactttgagagcttccagacccacctgaagctgcacctggagctgctgctgcgga

SEQ ID NO: 16029 - DNA, 2300 bp, Homo sapien
cagatgacgtgggtctggggacagccacatgatatgggtgctgctgcattgttggtgtgggactggggatagaggagaaaacggcttgctctggctgggttggcaacattggagggtgaatgagggcccagcgggagcagggatcagaccaggaggcgagtggaaccaggctagaaagggtcttgaaggccacaggccagcctgccatgaagcctccctaatttgagtcctcagcctgccaaaaatacggttcattctccctgggggtagagaaagagcctccctgggtctccagacctctcctccatagccggttgtgggacagatgatggcctttctgcgtgtgcgtgggcgggactgtagtgtatgtacaaggatccacacaggactcgcctggagcatggcgcccgcccaggggctctttggggaatttgttggctgcagtgtgagtctaatgagcaaagcatttggtggtgggtctgtgggttccccaacagggtttggtctccccaagtccctcaaagtggagctgtttaagctggcggagtcttttctaggcccctgctgttgcttttagggaacttgcttatgttatgttgccttttctttttcagtgggaagtgtcggtgtgagtaattatatatattttcacaaactcgaactatgcttcatttaaacttctataaacatgtctgtgtaattctaattaactgctcgcataaagccatcacaagttacatggggaaatgctcatttgccagactgttgcctaaaagccaaggaaaatattatgttcttccaacaaacggactattcatgtagactgttaccaagataaacaggagatatttgaggacaagtgagattctaagcagcgatggctgagcctcccgtaagtggtgttattcagggttggcagggtgggtggcttgattgagtgataaatgctcttcaagaaaaatgcctgaatttggaatgtggggtcaggaccctggagatgggccatctggtggtgctctttgggcaggaggccactgtgaatttcgtgaaaagtctgaatcggagaagagtcaacgaaatggcttgcacttgtacttccaggaagttcttttagcagttcatactagggtcactaagaaagtgtgtaaaaagagattcttggggctgctttaataaatgtgtaagagtgatttcaagttaatcattcagactgggcatggtggctcacgcctataatcccagggttaggggatattctacccccagaaaaagaatggaatagctctttctctacccccactgaaaaaaaaaggcaacataacaatttttccggaggccgaggcagtaggattgtttgaagcctgaagtgtgagaccagcccaggcaacatagaccctattgctacaaaacataaaaatgcaaaaattagcctggcgtggtggcacatgcctgtagtcccagctactcgagaggctgaggtgagagaattgccggagcccaggagctcaaggcttcagtaaactatgattgagccgctacactccagcctgggagatagaatgagaccccaactcaaaaaaaaaaaaagttagctgttcattcattcattcttccatccaatcaagtattactgagcgtctgtcgtgtcccagactaggtagggttcttgctgctgcagtgagaaacatccaaacccctgccctcctggagctgatgttctgcttgttgttgttggtaaccagacaaggaagtgaaatgtatacagtttgtcagagacgagggctcaggaagacaaggaaggatgaggggtgggggaactggtgaagactgtctggtgtgtttgaggagggatgaggcgggggcctgctctgtggctggaggctggagcgagcaggtgatcgggagaagtgggtgatgaggtcagatggctgacctgggccgggagatgtatctcttttattttatgcggaagatgtttctgagctgcttggcaattatattttttaatatcttttccttcacagaatggtaaagtccttaaaatgttgcaatacttgctcaattgcagcagataagaatactacacaaaactatagagaagaaaatcaaaccctccggaatgtccccctgaagaggaccactgttgcagcggggaccctcctttcaggcatcctcattttatcatgtccctttgctttcttccccagtggccttttcaaaggtcagagagaaatgcttagtcaaacccctacttgagtatcacaggtgactaattttgggatcgaagattaaggaggttt

SEQ ID NO: 16030 - DNA, 2300 bp, Homo sapien
gccattctaatatgtgtgtagtggtatctcatcgttgttttaatttgcatttccctaatgacagtgatattgagcatcttttcatgtgcttatttgccctttgtatatcttcttcagtgaggtgtctgttgtggcaaaagatggtcatttgcccattttttaatcaggttgtctgttttcttattgttgaggttttagagttctttgtctattttagataacagtcctttatcacatatgtgttttggaaatattttctcccagtctgtggcttgccctcccattatcttgacagtgtctttcagagagccaaagctttttaattttaatgaaatccagcttatcaattatgtcttccatggattatgcctttgatgttgcattttaaaagtcattgccaaacccaaggtcacctaaattttctcctatgttatcttctaggattttatagtttttcattttatgtttagatttctgatccactttgagttaattcttgtgaaggatgtaaggtctgtgttgagttaattcttgtgaagggtgtaaggtgtgtgtctagattcacctttttgcatgtggatgtacagtttttccagcaccatttgttgaaaagaccatctttactcccttgaattgcctttgctcctttgtcgaagatcaattgactatatttatgtgggtctatttctgggctctctattctgttccattaatctagttgtctattctttcattaatacctcagtcttcattactgtagctttaccgtaagtcttgaattcaggtaggggcagtcctctgactgtgctttggtatcaagttagctattttggtcttttaccttttcatataaactttagaatcagtttattgatatccataaaataacttgctggagttttaactgggattgcattgaatctatagaatttgggaagaaccgacatcttgatacaattaaggcttcttatccataaacaaataatactactctctattatttatttcttctttgatttctttcatcagagttttttagttcctctcatataaatattcttgcatattttgttagatttatgcctaattcattcttttgggtgctaatctaaatggtattgtgtttttaatttcaaattctacttgttcattgctagtatataggaaagtgactgacttttgtataataacctttatcctgcaaccttgctataattgcttaatttcaagaggaatttttgttccattcttttggattttctgcagtcagaacagttttttaaaacttataccctacttctttgctactaagatctcatctacctagtgacagattttgttggggaatgggtaggagctgagaggagaaaaagagctatcctgctgtgaaaggtgcttaataattgtaaaacagatactaatttaaggaactttaaaatatcatgtgagaaaatatgcatcatagatcagtctttttcctagaagcacagcgcaccctgaactccttcttagagtagaagatgcatcagtgttggggcttcatgggtccaggttgccaggggtgggatgccaggagctaagacccaggctgtccagggagctatgggtgtctgggcagccccagatctgcatggggccaaaagcctggtgttctgggattggagattcagtggtgcagctcttgtccaccctggggcctttttcaagcagccagtgtcaggggtctcagtccacaggttgccaattggtgcttgtacttttttctgtgtttgagcataaaatatcaacttctaggcatgaaagagccaaacaaatgaacacacaacaactcaaggataacaaaacaccactttttgcagtggacatgtgtggtttccttctgcagggattttcggttcacagccctttggaacatctcaaccccagggactgacttcccaagccctggctacagaggccgtcatgtgacttgggcctggccaatcagcatattccgttggcttagccttggtgattggttcagggatggtcccgtgattccagctagtccaatgagagctctcctcaggacttctgccaggacttcctgggaaccctgcagatgtaccttttctggtgggactgccaaacccttaggacgtcatcctcgaactgggatcgggtagggaacaacctaagggagaggatggtgaacctgcctgagagtgaagacacagaggacagcgcaggcaaggagcaggttcctgatatgattgtctgaggccctgggtcctggtgctggaaggcagccgcaccctggc

SEQ ID NO: 16031 - DNA, 2300 bp, Homo sapien
tgtttgtttgttgagacagggtcttgctctgttgccccagctggagtgcagtggtgcaatcataactcactgcagcgccgaactcctgggttcaagcaatcttcctgcctcagcctcctgagtatctgggaccacagccacatgccaccatgcccagctaatttttaaatgttttttgtttgtttgtttgttttttgtagagacagaatctcactatgttgcccaggttggtctggaactcctggactcaagtgatcctcccacttcagcctcccaaagtgttggaattacaggcatcagccactgtgcctggcctaaagaggtttatttctgaagggttggagcctgcaggctggccatccttataggctgggaagtatggtctctggcagagaccaaaagcaggcactttgaaggaggaagggtgaagcaggaatttatgccaaatgggttggccaagtatacatatttaacaggttataggagaagctattcaggaaagaggggtgcacacatgcataataaacaatcatgcatgttacatgggtcacatgttcactttggggtagagacttaacatttaaatgcattacagttagaccctttacgtcaaaaggcgaagcagagaacataaaggcactcattgtgcagcctctgtagactggctagggccaatctatggtgggtggtctcttatcaggagaaagttactgaaatcagtctcttgtctaatgaaagcaggagttatggcttgtggaacaaagggatcagttagtcagtgactggtacttggtaagctgcaattgttttaatattgcttgtttagctgctagaggaaaaaaacgaacattgtggcagttagaacatcgtttattctttaagtgtctgggtcttgagtgatttaacccttgcctggcagggccttaggtcttgtttataagttggtatgttactgccacaaaaaaatctagcccatcagtcttagattcttttttttttctttttcttttttgacagtctcacgctgtcacccaggctggagtgcagtggctcactgcaacctccgtctcctgggttcaagtgactctcgtgcctcagcctcccaaagagctgggattacaggcatgcaccaccacgtctggataatttttttgtattttcagtagaaacagggttttgtcatgttgcccaggctggtctcaactcctgacctcaagtgatccacgcgcctcagcctcccagagtgttgggattaacaggcgtgagccaccgcgcccggccaggatctctattttaacacaactattcttatttgaaatcaattacttatttgcatgtttgttgcctgctgtagcccttcctctttgcgggcaggaatcctgtctacctggctcacacgcgtatcaatacagtgtctagcatgttaggcaataaaatgattttgaatgaaagaatgccaccaataaatgaacaagaaggccttgtgatcaaatacaaatgtagtcaatcccttacagatctcttcttaagttataggtatttgggcttacactttgcctcatttaggaattatgaaagctgggtgatgtgagaggaaagtaaccaagagagaagtgtttacttaaggggttggttatctaggataccataattaaggaaactggttatttagggttctagttagttctgtacagatttcattactccttgagatccttgaggacagaaccagctctttgatttctgtatccctcgctagcgaccagaataatgcctggaaggtagtgggcgctcaatcaacatttgacgaatgaaagaaccaagcggggaacgggggataaatgaatgaacgaactggctccggagggctgcagttcctccccggggcagcaggcgacgccagcgttacgcccgcctggccgccggcagttcttggtccctccggctgaccgtccaacgctaggcgccgaggccggtgcaagagacagccaatagaaagctgtcttagttggaggtctagtagaggaatccaatgagcgtagcgggtctaggcaaggggcggtgcgacggggaggggcagcggggagcggttagaggtgggagttggcgctgcgggccgggcgggggccgcggaagctgcgatgcggacagggcagcggcggtgacccgagctgccgcccgacatgaactcgctggagcaggcggaaggtagggtgggccgcccgggcccgtcccccgtctcccctcggaagctggcggtgctccggaggagccggcgtcgtgaagacccccgccccggg

SEQ ID NO: 16032 - DNA, 2300 bp, Homo sapien
ccgagatcatgccattgcactccagcctgagcaacgagaaagagactccatctcaaaaaaaacaacaacaaaaagacggttgcctggactaggtgggtggcaggcagatcgatggcctgataaaatatacaggaagtaaaacccaccaacatatatttagtggctccaaggttgattttttttttttttttttttttgagacggagtctcgctctgtcacccaagctggagtgcagtggcgtgatctcggctcactgcaacctttgcctcccaggttcaagagattctcctggctcagcctccaagtagctgggactacaggcacatgccaccatgcctggctaatttttgtatttttagtagagatggggtttcgctatgttggccaggctggtcttgaactccagacctcaggtgatctgctcaccttggcttcccaaagtggtgggattacaggtgtgagccacagtgcccagcccaagattgatctttgataggcccaaatgcaacatgagctacacttctgttactctctaaaatttgccatagtaattaatttcccttactggacagtcaactctttgacagtagggttaccatggaatggaaattttctccagtagaatgttgacctgagcctgggcgtggtggctcatacctgtaatactagcactttgggaggctgaggcaggcagatcatttgagatcaagagttcgagaccagcctgaccaacgtggtaaaaccccgtctctcctaaaaataataataaaaaaaaaatagctgggcatggtggcacatacctgtaatctcagctacttaggaggctaaggcaggaggactgcttgaactccaaggcagaggttacaataagccgagatcgcaccattgcactccagcctggacagcagagtgagactctgtttcaaaaacaaaaagaaaaaaagaaaattgacccaaagctatgcatatattgagtactcactcgttacatgtctaattataaagaccacctaagattctcctgtacttttccctctgcttagtatttaccacaattataaccaaagttattcatataattatatattcaacagatctctccctggactgtaaattccataaggacagggagagaggacaggaaccaaactgtcttgattactgctttattccaatgcccagcactgtacctagtactcaacaaatatctgcaaaagaatctctttgttaaatacgtttccaaacatttacatagtgcttagtatctgccagtctctgttcttagcaccttaaacatatgaacacatttagtcttcgtaacaactccatgaggtatatactatcgatgtccccacttcactgatgaggaaactaaggcagggagattaggttcttaagcgattctgttttatcaaatatagacacacattcgttccaaaacattaactagtctctgtctacgacaggagctatgggaggtgctggggacacaaaataaaatcgtggttaatgctttttgagtacctgctatatatcaggcttggtgttaggcactttacagaactttatgaactttacagaacttacaataaccttgcaagttaggtattcttaatcacatttgattatttgtagccggtgttactaacttattggttgcttgattgattgattgagacagggtctcgctctgtcgcccaggatggagtgcagtagcaggatcacggctcacctcagcctcaaactcctggggtcaagtgatcctccggcttcaacgtcccaagtagctgggactacacacacacgccactatgcccagataatttttaatttttttggtggggaggacagggagtggagtgttttcctatgttgcccaagatggtctcgaacttctggcctcaagtgatcctctcgcccgggtcggcgttactattctagtccaacctcctacttacccggtaaacccacaaggctccgcccctttgccgaagctggccccgcctatgccctcttccacgcctgcgcgctccgtgcgccagttccccccaccccgccccgccccaaccccgacccggcagacgacgcgccgtgcgcctgcgcacggcttgcccatgtgtgctgcagccgtcagccggcccagctgagcagcagcaacggaccttgttaacggcgcggcagcctccaccgcctgctgttgccctcctctctcggtggtctgtccgcccagcgcacgtcaccatgggcaagagccggacgaagcgcttcaagcgacctcagttctcccctacgggcgact

SEQ ID NO: 16033 - DNA, 2300 bp, Homo sapien
acaggctgcataaactaccaaggaagctgttgtttgcagctgaagggtctttgtgtgttttccgtatttctggtcgtgctatttattctcttaccaaaaaaaaaaaaaaaagtaaggtcaggcgtggtggctcacccccttgtaatcccagcagttttggagtctgaggtaggaggatcgcttaagtccaggagttccagaccagcctgggcagcgcagagcaacttcgtctctatgccatgttgacgcgtgcctatagtcctagctactcggaggctggggcaagaggatcgcttgaacccaagaggccgagcctgcagtgagctgtgaatgagtcactgaactccagatgacagagcaagagttagtctcgaaagaaagaaaaaggtagagcgacacttagttctttgatagttttccactatttgtcataaaaactttccaggatattgagctcccaaaatggaaggccaatatcaggcatcagggacttgttctggacgttggaccaaccttaaagggcccacatagaagctgttcacttactttcttttagtctcttgatttaaaatacttaacattcccctttccttggctttttaaccactgagatttgaaagacatgcaaataacgacctagtggacaatctttgctgatgctaaatcttcattttaggattaaaaggttttgggttttcttaaaatttaatgctgaactcagaagagctttctaaggctgttggtgcaccttagggcaggagagcgtctttgctacgccgcgcaggagtgtgtctgcttctctgtgcatctacacgtgtttgcgtgtccctgtaaagtgggttgagtgtgcggctgcggctttccgcccttggctcacactctcagtcttagtggtctcccccagggctatgcatggggtacaggtttctgtggcctcaggccggggtgaggggtcccccaccccggccagggcgcagcagggcggggcacacgtagccgtgcagggtctcgcgcagcccgcgtcaggaccccggggcacacgctcgggcagggggcgtgtccccacgccaccagaaaaagtgttataggctgtttttttttttttttttttttttaaaaagaaagtgttttagaaagcaggcagaagccaagacgtcaggaagggttgcgagggcccgggatccggcggccacagggatgggaggggcgaggagcgaggggcggagtggcacctcccacaacgcgctccctgcggggcgggcggcaacctccatgcggcctcgtccacgctcagcaccggggaagccgaggcggagaagccgcgcgcgcctcagaagctcccggacgcccaggtacgtgggagcactccacagatggcgcaagtacggttgggccaggcggttgcggccccgtcgcgccgcggcctctgtgacgcacggcgaggcctcccgggctgctgcgcggcgcagcgggggcggggcgagcgcgtgagggcggggcggtggggggggggggcggagcgagaggggcggagccggcagaggccccgccccggggccggaggagcgaggacgctacggagcaggcgcgtctcgctgccgccgctgccgccgccgccgctcgctcttctgtggagccgccgccgccgccgccgccatttgcacggggaccccagtgacaggggctcggcggaggggcggaggggcggagggagggggggagggcccgcggagcccccgagggcgggagcgacgccgccggcgccggccgggctccctgcgcgaccgcgccgcccgcggcgggccccgagcagcagcagcagcagcagcggcagcagcggcagcagcagcagcagccgaggccgggcgtgcgcctgaggcggcggcggcggcggccctgcgggcggccgggaggggcgggggcagcggccgccgccgtttgatggatccgaggatcgcctggtttcagccagagcagctcggaccgtccaacagtctgtggatgcagatctgggagacgacccaggggctgaggaacctctacttcaaccaccactgtcacagcagcggcggcgcgagcggcggcggcggcagcagcagcagcagcagcacggccaccggcgggagcggcagcagcaccggcagccccggcggcgcggcctcggccccggccccggccccggccggcatgtatcgctccggggagcgcctgctgggcagccacgcgctgcccgcggagcagcgggacttcctgcccctagagacgaccaacaacaacaacaaccaccaccagcccggggc

SEQ ID NO: 16034 - DNA, 2300 bp, Homo sapien
aagagcacagcaaagcataagcttcctaacagctattcccattcagctgctgtcttcaagaagcagaagggtttagataaccttagagaacataatcaaacctgggaaactcaaatcaaaacaaaacttcgaaacggaagttgaaggtcctgaggtacccagaggcatagcaaggaaaacgtccccactgggatatcttctggattcacctacagacctctctggagttttaagatccacgttttatgacatattgcatagcaaacaggccgaacgctgttgtaaatcatcctctacgaaaggcccaggttttgaaactgaaggcctgaaaaggctcctgcttaccagctgtgtgctgtacctgacacactgaagcctgagagtgccagtcacctgtcagagggaacacagctgccctcaggcagaacctgagtctagaactcaaggtttttgactcttaggctaaaaataaaaaatcagaaggaggaactatggattgcttaatcagtcacattttcactttctaaggtttcttgtagcaaaagttatagtctttggggattgggatgtagacacttttttttccttccctaaaacaatttttggcctgccagtttttcgagcttcctgctctggaccctgaagttgccatgcagttgcagacatgctcctccttcaaggctctgttaagctgtggctgcccttccttaccactgctgtgccccaggccaaaccccctgcccctccttcccctaaggcactttgcacctgttgctccgagccttctggtctatcccagttggtagagtccctgtgcttacctctgtggctcagtcctcgtgggtggtcagtgctctagggaaggtgagctgaccacttcactttcccttcccagccatagctcttcacagcctcaccaacttagaaaggaatgctgcttttctctctgtcccccgtcctgactatgttcaagtcattgctcagcccagtgagtttgtcctttcttccagaccagtagttttcccccagtccctcaggcttcagcccttgaaggcatccttagccccccaccaccatgatagtcaggcgctgcgcctatccgcagggtgtgggtatgtgtgtgtcttttgtttctggagcccattcctttccttccaccagcctctaggccttcatccaatccttttgcaactcagtgattcatgacttttccctgcatccagtctagtctctttgctggtccattgtttccatagttgccagtttaatcttcttaaaatgctgcatttttgaagtcagtctcttttggtccctctcagaaacatttaaatagctatctgttgccacagggggaaagcttgaacctcttagccagtcattcagagcctgccctctgctggggcctgctttcctctacagatgcttctcccactctgcctgccacagcccttgtagctggctgattgccctgtacctcgcaggctctggaagtcttcagctccttcatggagcctttgccagccattcttttcaagactttgctgttgttcactgcctgatttgttcatttgacacttaattcactgagcaaacattatgaaagatgtactgtttgctactgtgaggaatggatccccaagagataagagggtcagtccctactgccaggaaacttgcctgtgtcacctgggttcagtatcttgtgtctattagatcagaagtggaaaggcagaggccagcccgtatgcttgttttattttatttaaatcaccagcaccccagcaagtgttttgcacaggaaatttctcattatttaattattttgggttttttgattaaattctgtacattcccattttagcttatcttgagttataacattaaaattaaggtagtcatcagctgaattataagacttaattagataagattatttaagatagtgatttctcattagattggccctgttcatattaacttttctgtttttttcttcagtctgcatgaagaaatcagtgatttttatgaatacatgtctccaagacctgaggaggagaagatgcggatggaggtggtgaacaggatcgagagtgtaattaaggagctctggcccagcgctgacgtgagtcccttcctgggtagcttatgcttcggacagtccttgtccacgggctagaagcctatctgctggtatctcatgctagtcctcacatgcaagtagaagtgctctgtagagttgtggtctaattaaattttaaaggcaaacaattttctgcagtctttagaattgaggcttccta

SEQ ID NO: 16035 - DNA, 2300 bp, Homo sapien
gacaactgtattttggtctatgtgtttcatattgaaccagataagtttaaattatattcagaatgtctgcttgtgaaacagaatccccgcttcatgaagcttggggttagaaaaaaatgctcttgtcataccaaaaagtaccagtagagggtagcaaaaactgacatttctccatatcttggtgactcaatatgataacaacttctgataactcaatataataacaacttctttttctgtttcaggtccagatatttggaagttttaaaactggactttatttacctactaggttagtacactcatgaatctttcaaaggacttttcttagagtgtattcattttggctgtcaaatttgtaaggagtagaaacaaaacaaatttataaaacaaaatggggctgggcatggtggctcatgcctgtaatcctagcacttcgggaggccaaggagggtggatcatttgaggtcaggagttcaagaccagcctggccaacatggtaaaaccccatctctactagaaatacaagaattagccaggcgtagcagtgcgcacctgtaatcccagctactcaggaggctgaggcaggagaattgcttgaacccgggaggtgaaggttgcagtgagccgagatcgcgccactgcactccagcctgggcgacagagcaagactctgtctcaaaaaataagtaagtaaataaataaaggatttaccagcatttaatttgatttaccttgaagtagaatatcacttcacatcatcttaccaagacatagatggtacagagagatggaaaagggatcatgttgcaatggaatcaattagttactaattttagaaattgactgcctggcagagtattgctcagtcccataacttaacccactgacacagatgttaatgtagtatcatgataaaatgtctgattatatatcctcttgaatgtgagttcccgctgtcttgctcactcactcttacactcaccctcgctttcaaattaagaactcattctactagttatggctccagcatcctgatccagaaattcagggtacagatctcttctctgagaaagatcttggcctttcaggactgttgttcagtttcagtcttctcaaatgagacctcttgtgacgcacagccttggaggctctcttttgggaaatgataatgtttctccaaagggtgaatacttgctctctaagaattgaaattgtttgaacattccatcatggttattattattattaccttaaattttaatctctccagaataaagtcagcatcatgtttttccatttgagcttgatttggtatactttaccccaacttaaagtgtgctgaagtggatggaccctggcaatttccgttcttctcatagatgcccttggcctgcaaaagtcataaaatactcaacttcgagttaatatttcttatttaggttgtcagcatcagtaaaacatgaaaaatcacctttcttaaaaaatttaattaaattttatgaataggtagtacattcacatagttcacatttggaaaaggcacaaaaatcaatacagggaaaagtctcagtcccacctctgccccctggttctccttggaacagccgcttttaccagtttctcacatatcctttcagagatatctgtgcatataaaaggacatgtgtgtatattaacacaaatggtagcatgctggatacctgttctgcatccagcttaaagcacttcataatatttctgagttgcaattaatctcatccggataggaaaatcattatgtctagtaccacaagcgtttattaaagaaaatacatgaagtgctttttgtttttttttctttgaggttttacttctttcaaaatcaccctatttcctgaggcctgaattctgtgaaatgactgagaggaggagtttgttaaaatcaacaactactatttcccttctccacaaaaccattatcaccaacacatttagtcttcgttggccagggtgggaaataggttttaattgtactaatgaagtctataagcatgagtgtcagttaaaacaagtttccaacttcttccgaccctcttgtatatgtattctgtgttcagtgacatcgacctagtggtgtttgggaagtgggagaacctacccctctggactctggaagaagctcttcggaaacacaaagtcgcagatgaggattcggtgaaagttttagacaaagcaactgtaagttctgcagcatttcatattaaaatccttagttatttacctatgaaacttgaattaaaattaaagtttggtgagca

SEQ ID NO: 16036 - DNA, 2300 bp, Homo sapien
ttcacatagttcacatttggaaaaggcacaaaaatcaatacagggaaaagtctcagtcccacctctgccccctggttctccttggaacagccgcttttaccagtttctcacatatcctttcagagatatctgtgcatataaaaggacatgtgtgtatattaacacaaatggtagcatgctggatacctgttctgcatccagcttaaagcacttcataatatttctgagttgcaattaatctcatccggataggaaaatcattatgtctagtaccacaagcgtttattaaagaaaatacatgaagtgctttttgtttttttttctttgaggttttacttctttcaaaatcaccctatttcctgaggcctgaattctgtgaaatgactgagaggaggagtttgttaaaatcaacaactactatttcccttctccacaaaaccattatcaccaacacatttagtcttcgttggccagggtgggaaataggttttaattgtactaatgaagtctataagcatgagtgtcagttaaaacaagtttccaacttcttccgaccctcttgtatatgtattctgtgttcagtgacatcgacctagtggtgtttgggaagtgggagaacctacccctctggactctggaagaagctcttcggaaacacaaagtcgcagatgaggattcggtgaaagttttagacaaagcaactgtaagttctgcagcatttcatattaaaatccttagttatttacctatgaaacttgaattaaaattaaagtttggtgagcacagttgcattgcaagtgagtgattctttcattttgttaatgtcaccgtgcttgcacataaaaagttttctggttgtccacactggagtgtgaccatacaatctcggctcactacaacctgtgcctcctcggctcaagtgatccttctacctcagcctcttggggagctgtactacaaacacaacctgccatgcctggctaattttgttgtattttttgtagagacggggtttcaccgtgttacccagactgatctccaactcctgggctcaagtgatccacccacctctgcctcccaaaatgctgggattacaggcgtgagccactgcacctggtctgcatttcttttcacagcagcaaaatatgcaattttattatacacagtactcactgtagagatttttgtttgttttattcattttttttagagagatacagtctcactatgttgcccaggctggtctctaactcctggactcaagtgatcctcccacctcagccttatgtgtatctgggactaaggcgcaccctaccacgccctgcttatttaaaaaatttttttttgtagagatagggtctccctgtgttgcccaagttaggccattttttgaaaagaactgctgatagctcatgtaaataatcctgtcagctttttagaataatttttatattttatcttgtcaggttgttttttgggctatttgcaaaactgaccagtaatgcaagtgggttgtagtgtacaccttaagaatccagcaattttcttattagaaacagtttgatgatacaaaacatttaatacctggcattcctagttcttcatcttatactcagaaagtgttctccaaattattgaggaaggtttttgttcattttaaaattatcattataactatatgtcaactaataaatgagatgatgggcatattaatttatttaactgtagtaatcacttcagtatgtatatcaagataagtatatcaaaacatgtacaccttaaatataaacaataaaaataaataataaaaaattggacaccaaacaaaattctcggttgatagaaattatactgtaatatactgtatgggacccagtgctaaatatgcagcatatagtatttgtagcagaccaggtttactggggtgtgccatatttagaatactcagtgttcttatgctctcatgagatgatggagacctcatgtctagtaggcttccatcccctgattttatcatttaatctggttaaagcatttacattttacctttcttctctttataggtacctattattaaattaacagattcttttactgaagtgaaagttgatatcagctttaatgtacagaatggcgtgagagcagctgacctcatcaaagattttaccaaggtcagagaatttagcgtttatacaacaaaactattagaaacgtaattttaagattctgttgtggtggtgttctaatatttttatatgcatgttgctgtctctctctctctcttttaaatagagctaggg

SEQ ID NO: 16037 - DNA, 2300 bp, Homo sapien
cacatgtactcatttcttttgggtaaatacctgagattgaattgctgagtcattggggaagcatatggtttgcttttgtccacactgccaggcagttttcatcatggtggctccattttacattcccactagcagtacatgagagtgaagagctgcttctcctccttgtcaacacttggtattttcattttaattttagccattctagtggtacagtggaatctctatatggttttaatttgctggtggctaatgatgttgagtatctttttcatgtgcttattggtcattttggcatcctctttgttgaagtacctgtgtaagtctcttgttcatcttttaattgggccatttgtctttttcttattggtttgtgggaggtctttttttttttttttttttctgagacagagtctcactctgttgcccaggctggagtgcagtggtgtgatctcggctcactgcaacctctgcctcccaggttcaagtgattctcctgcctcagcctcccaagtagctgggattacaggctcatgccaccacgcctggctaatttttgtgcttttagtagaaacgggattttgccatgttagccaggctggtttcaaactcctgacatcaggtgatccgcccaccttagcctcccaaagtgctgggattacaggcatgagccaccatgccaagcctgggagatctttatatatgctagggaggagtcttttgtcagtcatataggatgtgactttctcctagtcagtggcttgtctttcccctcttttgatgatgatgatgtctgttccttctctgctctgggacatttgctagggagacatttgctgataggagggcgaccctgatggggaggatcccctgaggtctcccactccctcctgtggcctctggagcagcctggaaccctgtgtgagtcctatgcctgtctccaccagatggcagaccttagatcacctgctagttccctgcatggggcctggcacagagacagcacctaacatgttcagttcctcctgatcagtatgtgtgggatgtctactctgtgaccagctggggctggacgctggggacacagctgttgatattacagctgccctcccatctctgccctcctcaaggatataacctaggaaagacagaccagcaaccagtggtcacagcacagaggtgctgtgatggaggaaggtgcaggggttagaagaccagaagaggggtgtctgaccctggatgtgggaggtggaggaggtacaccattgctttgaggagctcgtaatcccaggatgccagtcacatgctcagaagggctccctgaggaccaggtgctgctgtggccagcgggctggaggcctccccctctgttttgggagtctccactctctcctcttagcctctcctgatctgctccctcgccactgagcgccccatgatcccagtggggaaactgaggcctggcatagcagaaggggtgctggggtttgattcccagcctcatggtgcccagggatgttgggggctctccagggactctgattttggaataggagccccaaggatgggcctgcccctgccctgctcccagcatgggagcgtaggtgagatggagaggcagtgggctgggctggaagatctttgacctctcctgggcccctctcagaggtggacggggccaccttactacatagatagggaaattgagtcccaggaaggcgcggggggcctgtctgtgagcgtcagagcccacaggaggctcaggccaggccgctaattgctaattgctcactaaggatgcatttgctccccactttgaacagttgtcttggggcttctaatggaggtttttggtgcttgttttattattattttttcaaaattgttccagcttcaagcttcaaatttccatgaagtcattggagcccgacagctcccaggcctggcagctcccaggctgcggagagcagcactgtggctgggggagggggccctgcacaccccgagaggctgggctgtgggctgtgccttagccttgctgccgccgccgccgctgctgccgctgccggagcaggaagtggtgggtcccagatgtgactcactctcattaggtagcgtggaaggagccttcggatgggtgagcctgggcgcgtctgaggaagggcaggcgggggccgggccacctccctgcagaccctggccggctgctggggccggggaggagagccaggtaaaagtggggtgtggggatggagtgtcaccagtcctagtggcttgagccccaggggacggggctggac

SEQ ID NO: 16038 - DNA, 2300 bp, Homo sapien
tccagttgtgtttcctggccccaggctctgcccattcttgcctcctcccagggtatcaggacatgctggaggtgacagggcagaaggaatggccatgaccctcagacacaggcctgtaccctggggaggagctcatgtccctggaaggcagaaggtacctgcagtgggtgatgccaccacccgccttctagggcccggatccctggaggccgctggacccagggcaccctgatcggggtgctttgtcttccaggccccaggctcttcctgccctccagggtgcccttcctgcccctgtaactggccagctttcctcatgctggcctctgaaacaacctagtcacactgcctcgggcgcagctgactgagatcattgcttcctggagtcaccgactggctgggcagggagaagcctagcaccctgggatgcagctgctctgcacagatggggaaactgaggccctgggagctctgcagccttggggctggtgtgtcttcctggtgggagctatgttggagttgcaggccctgccccattcacaagcacatcccttggcctcactcatgggagggatgtggactgggggccagtcttgtgggcttgtcttggtcctgctgctgttcttgggagtctgggtctccctcctcctgggcatctccttgctggagcaggggtccagggtgctggtgtaggctgggatgagacctccttctgtgtgtgtgcgcatctggctcctgggcccccaggcctgtctccggtaccccctctggctgggaggaggagcccttttaagctgtctgaaggagctattttaaggggggcctgggctaatgggaagtggcctcttttgatatacccagactccctggagacactgctccatcccctgggggcagggaccagcacttctgtatccctttgtcaggctcagctctcctgggcatgggtacaagagcagagctgccctttgggggcaggcaggaagtgaggctgagaccctggtactgaagtgtgtccccagtgcctgtttatgtcacgatttctcaggctgctcaccctggtgtctggagctgactggggtggccctgggtgatggtacttgctgtgtgcccacatctacgtgaagcccctgagaactggtattgttaccagtccattctgtgggttaggaaactgaggcccagagaggttcaggaacatgcccaaggtcacacagctcctccaaggtggagctgagattcacggcctgctgttggatctcagagcttgtgctcccaaccaccatgctttcctgccttccccttctgccctgccctggcatttcttttcctcacttggctcatttatgacaatctgccctcctcctggcatgagctcctcaggggacccatgcctgtcctgtgtgttgtagcagcagcagtgcctgcacctgctgcaggcaggagctcagtggcacttggcagatgggggtctggtggcaccaacatgtggcctctttcctggtggcaggatgggcccctttccatgtgcaatgggggtttatgaggttttatagctatgaggtcacgtcactgctagaataggccatggagcgaagagaagggtttcatccccattgctcaggtgagaaactgagtcctgagaggcaggtcacctgccagagctcatgcagttgggactggggattccagggttggggcccagtccttagctgccagttcagtgctggctgtaccccccagtctgtggagtatggggtttgatgtccctgtgtaccaggcagggttagatcctgggagctgggtagtgcatggctggacgtgcagccaggtagtgacaggtcagggtagcctgtgcttctgtgggaggtgcaggccctggggaagctaaggaacaaggccagactgggaggggaccaggcagccttcctggaagaggtggcagctcaggttggccctgaagggcgggcaggagttcgccaggcagaaggcatttggaggtgaggaggtgggcgtgtttttagattgccggagctggagatgaaagggtggggcttgtttggggaaccgaaatcagccaaatcacgcagccacagaggaggccagggaagctctagaggcgttttttggccaaggggtgagcagagatcgggcttggtgttttggggggtcctgggtaggtgtgggaggcctcgtttcgggggccacggggctcctgtggcgtgagactccatcacagtgacctcctgtgcccaatagctccgtaagggcagggtttgtggaaggaaggagtgagtgac

SEQ ID NO: 16039 - DNA, 2300 bp, Homo sapien
tggagactgatggggatccctggggagagagagcccagactagcacacaggagatataagggctggcaggcgtaggtgtgattcacaagcctttttggaatcaatgaatatgctaaggaatgaatggtgctggggaaagaaggaacccatatgggctgagcatggcaagtgtggggtcagctcacagtgttgtcacaaaggggccactgtgtccctctctgagactcagctcccttttctgtgaagcacggcttgcagacatctgaaatttgtatcagtgggctatttaaaaaaataaacaagatttttgctgggtacagtgcctgaaagcttaacacttcggaggctgaggagggtagattgcttgagcttaggagttcaagactagcctgggcaacatggcaaaaccccatctctacaaaaaatacatggcctactgcagcctaagtctccccaggctcaggtaattctcccaccttagcctcctgcatagctgaggtcccagctacgcaggagtctgaggtgggaggattgcctgagccctgggaggttgaggctgcagcgggctatgatcacaccacttcactccagcctgggtgacagagtgagaccccatctcaaaaaaaaaaaaaaaaagagagaaagaaaatgcagttttatgtggagcttactgtaacacagatgcagggggctaccctggctgaagcaggcatgggggcctgagcctatgcccccccaccttcccttcccattgggggcctgatgcatgtccccaaatctcagggctcctaggatcacagcttggaaccctctgtgcctggaggcatgagactcactggaaaatgaagtgaatgtggtgattgcaccaggaccatggggacagagcagagcctggaaacagacaccatctgtgtgtgatcacctgacttatgacagaggtggctccactgaaattcagagagaggatggccggttcactgaacactgctgggataattcaatatccatatggaaaaaagaagtgaaccttgatccctacctcacaccatacccagagtgaatcgaaatggatcagagacctttgtgtgaaagcaaaacagtgaaacatgcagagcagagctggcctgtagaagcttctgtgatgatagacattctctgtttatctgtgctgtccagtacagcagctgcatgtagccattgggtatttgatttttttttttttttgagatggagtctcactctgttgcccaggctggatgcaatggcacgatctcagcttactgcaaaatttgcctcccaggttcaagccattctcctgcctcagcttcccgagtagctgggattacaggcacacgtcaccatgtccggctaatttttgtatttttagtggaggggggttttaccacgtgggccaggctggtctcgaactcctgacctcaggtgatctgcctgcctcgacctctcaaagtgctgggattacaggcatgagccaccatgcctggctggctgttgagtatttgaaatgtggctagtgtgactgagggactgaatttctaattttattttaaattaatttaaatttaatttaaaatagtggctgggcatggtggctcatgcctgttatcccagcactttgggaggctgaggcaggaggattgcttgagcccacgagttcaaaaccaccctgggcagcagggggagacgcccatctctacaaaagagaatttaaaaattagctgcacacctgtagtcccagctacgtaggaggctgaggtgggagaatcacttgagcccgggagtttgaggctgcagtgagctatgatcgtgccactgcactccagcctgggcaacagagtgaggccctgtcttgaaaaaaaaaaaaaaaagcagccacatgtggctagtggctactatcttggacagtgcagtcctagaagacacaggggactagctttacgacaacaggacataaaagttaggttagggttaagatggataaatcagacttggtgctgtgaggcctgggccccgctctccctgatgctagccctcccctgacttggaccattaggtcaagttcctgtctgcttcgtctccgcagagctgaggaactgcgtgtggagtcagcccagtctggatgcacaggaggatgctggcggcacagtgagtgaggcctggtgccagagctgtgcggaccccttgttggccatggagcagcaggcccagaggccctctccccagccctgcttgcctgcctcggagaggacagaggcctaggcccacgggggagggtgttggca

SEQ ID NO: 16040 - DNA, 2300 bp, Homo sapien
ttcactatttgggtgatgggttcaagagaagctcaaatctcagcatcatgcaatatacccacgtaacaaaatggtgtatgtaccccttgaatctaaaattaaataaaaccaacatgctaaacaatatgatttcaaaagaccagaatacaaatgttttcctgtaaatttaaattctgtagttcatgttccaattttagaacatattataacttcattttttaaaaatccagtaaaagagggtaagattaatcatgtactttacaaatgaacacagatggtcctcaacttacaatggagttacatccaacacgcccactgtaagttgaaaatatcatgagttgaaaatgcatttaacaccctgataaacccattgtagggaattgtctgtccattattaattgtttttctgctaagtattatactgatgaagagctctatggcagatatggattaaaaatacgcaagcaatttaaaaactaaaagtttcagatgccccaaatcagtaggtagagaaaagaaaaggcaaagctcaatcacctgactgttcacaagccgcctggtcagctttcctccagattccttcacgatgcggtcaagctgctcctgctctctctctaaattattgcttttaaacttatcttcaagcatatctttgtctttcctgaaaatatacattaatactaagtaaaaaaaaaacaaagataagtaagatgaaaacattcaaatgaattctaaatatgaatacaactaaagtggagacatttgtactacagtcactcattgaaacttacttccttgatgacctgttaagggtctctaatttaagaacagaaacagtaaggcacacctaacatgttatttccctacctttttctgtccagtgttacttgtgttaaacgtttttctgggaacttacaaaaaaattagttctacctcaaacattactttgaagggagaacaatataccattgttcttttaaagtttgatttttaaaatttaaaacaagcacttaagtgtgtaaatcttagaacaaagaaaaacttgtcactagtttactttctttgcattatgacagcaaaaatcccaaactgctaactacaaccctccccaaagttggcagtgaggtgctgggcggtcagggctggctcccagtagtgtgaacgggcagatgcggctgccgtcagctgcacaggtggctgcctaggtggaacagtggttcagcgttgctcccaccagctgacattgggtggaaaacatgggcacgctgcagtgacagcccatctgcttaagacgcagcagtgcctgtgctcccactgaactccttgctcctttatggaaggaggtaatgactatgcattttttcttaaacaaacagttctatttaaataaactcactgaccatatcagtcccaaaagacactttataggttttaaaactacttcaataagaatacacattagaactgctttctgaactgtgtttggacaatcccatatagtgcttcatatgagaagaggggtatcacaccatcaaaatggactttcatgccaaaacaccaccaccaccgacacactagcacttggtcttcccaagtcaggccccgaataagtatttttcccccttactagcttgaagaagacagtttgaccttaacatcccaaagatcttttactttttattttctttgctgggactcttgaaggcgtgtgcttcggcatctccagagtcctctctctctctctgccagcagcctccgtcctccccactctgtgaggtgtctgttccatctttctgctttcgagttttctgcaagtcagccatgaagtctatgctctgcttcaggctctgaattctttcctaaacatattcgaaaatattcttattatatgtttgtcattaacttttaaagtaatgcatttttttccccacaggagtttatacttatcctgtcattaaccagggaagaaaaacaattaaatgtaatcatataccaagagagtattgtatttggaaaccatgataatgcctacaccttcaattcttaaaatttaatttccaacttcatagaaagctttacaactttattgccctatcagaaatttaacagaggagaaagtatgaattaagactaagtattctttgaagtactgaattggaagactaaaatttagtttaatggtgtgttaacattttgtgtttaacagacaggcttatcttttgacagttaagaactgttaggtgtatcaaagcctagggcatgtgagcgtgtgaagtccctctctgttctggtagcccagt

SEQ ID NO: 16041 - DNA, 2300 bp, Homo sapien
atgggtaagcactaagtaaatgttagctatattattagcaaagaaccagccctgttagccatttaatattgtaaaattgaagatcaataatgtgctgacttggaggcattttaattaccaaaaaaagaaaaagacattgctttcaaaggaaaattaaacttcactctttcctgggacttgtttcaaggtttagaaactttctctaattgaatttattttgtgcatgtcgtgttttttaaaaccccaaagcattcttaatgtaagttctgctttataaaattctagagtggaaataaaattattactgagaacttacagaaataattaaactcactaatatttttaatgtagcaaaataaaacgtgtttttaaaaatcaaataagattgctttttgttgttgtttgtgttttttgttttttgttttgtttttttgagacggagtctcactctgtcacccaggctggagtgcagtggcgcaatctcggctcactgcaacctctgcctcccgggttcaagcgattctaatgggttagctttttaagtgatactattgattttgtcaaggattcagagaaactttcaaacactaatgtaaattagtatgtaaattggtataccttttctggaaagcagtaattatcaaaagtctcaaaaatattcattccctttgactttgtttcctttctaagagtttatcctaaagagatactggttcctagagagatttatttataatgatgttgatggtacttttatttataatagtggaaacatggaaatctaaatgttcaatcataggccattaattaaatcatggtgtagacgtgggattaaatagttattaaaatattttaaatatctattgatatggagaggaaatgcttataatttattaactgaaaaaatgctttttactaaatattcagtataattccaatttgctgggttatgtaatggttggaaaagtactggaataataaacttgttaacactgttcttctctggatgagacattaggaggatttttattttctcctctacccatatttttatttgtccacaataaaatagatcgctttaatggttttaagattactttaaaagtccagtaaaaaacagcaagaactgtgttggtgaggatgtcaccatctgcactactaatagagcatggtgtgatgaggaaaggcccaacatgagtgacagcaagcctagtcttagttgctggtttagtgaccttaggtgagtcatttgttgttcctgggctgcgttgttcttgtttgaatggcctctggttctttctagttcttagtttatgttactccacagaagtcttccctgctgttgctgtgcagccctaaggaggttgcactctattttacccagtgataactttcagagtacaggcaaggtagtcagtagaaacaaatatgccttcttaaaatttacggagaaacctcaagcccttaactacaatgaaaatttcacagcacatcattgcagcgaaaaattaagcacatgtttcacagaatagaaacaagacttctttggttagcgaaaccattctgcactctgaggaaggaactgtgccaccaactgtcttctcctcaaggcttgttgttttcacacagagtgaaatgccagcgtcatccgtgagcacactgggctaccagaacagagagggacttcacacgctcacatgccctaggctttgatacacctaacagttcttaactgtcaaaagataagcctgtctgttaaacacaaaatgttaacacaccattaaactaaattttagtcttccaattcagtacttcaaagaatacttagtcttaattcatactttctcctctgttaaatttctgatagggcaataaagttgtaaagctttctatgaagttggaaattaaattttaagaattgaaggtgtaggcattatcatggtttccaaatacaatactctcttggtatatgattacatttaattgtttttcttccctggttaatgacaggataagtataaactcctgtggggaaaaaaatgcattactttaaaagttaatgacaaacatataataagaatattttcgaatatgtttaggaaagaattcagagcctgaagcagagcatagacttcatggctgacttgcagaaaactcgaaagcagaaagatggaacagacacctcacagagtggggaggacggaggctgctggcagagagagagagaggactctggagatgccgaagcacacgccttcaagagtcccagcaaagaaaataaaaagtaaaagatctttggg

SEQ ID NO: 16042 - DNA, 2300 bp, Homo sapien
cttttttcatccacatattgataagcagagatttatgaagaatatcagtgtttagtgctctttactgttgagtttataggtaatattccactttctccaaagaatctgaattacattctctcttatttcgagaaatagaaacttttcccaactttttatctggtgaaaattaggctaaaaccgtttatttcagcatatttctgaccttaccattgcttaatgggaaagaatttcacagttttttgttttttgttttttttctgcatgattttcctctgatctttctcttacagtaagaagagtagaagtgtgtccccagagtgtttttaagcaggttagggtttatcataattgaaaggaattggtatcttagctctttagaatttctacgttgccacttttttctagggaaagctcaacggcctaaagtaatatttattcagttcatttggcagttgaagtaaaatgtgtgtgtgtgtgtgtgtgtgtgtgtgtgtgtgtgtgtgaaaagtgtgcaggaagactcagctttttgaatgaccagtgccatcacccacagttcagtaaagcccagcacattatgttaagatttaaggaatctacaaattggcttaatagatcagtcctgtgttcattagaacaattcagtactcttgccagttcataggcccattatctggccaattataggccaaatggtcacttagtttgagtatatatagtaatctagtatctccgttcacttgcgtcccatccccccaaatacatatttaattttttttttttttttttgagaccgagtctcactctgttgctcaggctggagtgcagtggcatgatcttggctcactgcaacctccacgttcagggttcaagcaattgttgtgcctcagcctcccaagtagctgggactacaggggtgtgtcaccacacccagctaatttttttgtatttttagtagagacggggtttcaccatgttgccctgaccagtctcaaactcctgggctcaagcagtccacctgcctcggcctcccaaagtgctagaattataagggtgagccactatgcccagcctagtaattcttaatggcctggaagcttttccaaatatctgtaacaaaggtctttaatctagggtcctttggataccataatgagcctttagagggaccaagaacctactaaaattacatgaagacttttgtgttcagctgtgtgtgtgtgtgtgtgtgtgtgtgtgtgtgtgtgtgtgtgtacttaaggtctggtcccatagctttcatcagatgcttagagatccaagacctggcatatttacagtcatggcccaaactgaagatccacatatacttcatccactttaataccaaatttattgcgacccttcactcagtcttacgtacttgtacatagaactcagtctacttatttttgttctatttaagtgttctaacctgtcatcactattaaatagtggaatttgaattttttttgttttttaaacaaatttgtagggggcagattctcttttcttgggtttttctttcaacttagtaaggccttggcataatgaatcgcacatttatagatgtaaaaattacttaactatgaaagcatgcagtggggtcaagttctccagcacatagcggacttggaaatttaagccaaaaagacagttttggtaatttggctactccagttacatgttttaactccttgaggttgtatggtttatttcacattggcatggttttgcaacattctgcaaattatgtttagtttatgatagtatccaaacacataaaagtagtgtaaatgttttaacattttttgctcagttaatgtgaatttggcaggaaatactgcgataatttaggactgctccgttttcagtcaagatctgaaataaaatgttcaattcctaaatggaaatttaagatgtttgttttaaagctaggagtaatattttttttatttacatgaactactcagctaaaatcattacatatgaaatagaagtattttcttcacattttttttatgtgcagtaagattatactgaagaaacccatttaaaagtttcattctgggatctacagtttatatacaggtactataaaatatttaagaatttgggaaataatatagcatatttaaatacatttagcagtatttgttttgttggtgagtcttaaaacttaataaattactgttagtattgtttagtaaataaagaaagggatgttgctttttaaatttttagaggacctgtatattttcaacctgggggtgcagggt

SEQ ID NO: 16043 - DNA, 2300 bp, Homo sapien
tattctattgctctgaagccagtctccaggccattctacactcactgggaggtcatgaatggcagcaggcagaaatctctcaggggagtctgcccgaaccaggaccgtgcagctcaactagcattttctggtgccttctatgtgccaggcatggtattagtgctgagaatttaaaactagatgaatttgggcttccacttccaggaacatttttctgggaggtgttttctgctacgtactcttattcactttccattgatgtgaccactttgtgacctatgtagaatcactcttgagagggtagggaaattactaacttgatagtatggatgagttcaccagacctttttcctctgaggggcatttggacagtagtagtcactgtgctaggcactgtaagtaccaaggaggtacccagggtaatgaggagcagacaggtaaacccacaggttgagcctggagcaaggcaatgccacaatagaggccagacccacagtgggagttggcatagtggttcttaaagcaaaataagttacagacagtggatgaaaagctgaaaccaagctttgccctatgcttagggggcctagggggcctagctggcttgatttcagagcagcagaaggtctcttccccaacacaacccctcttcccacaccctgatctctgcctcacggacaccagagaggcttgttacagggaaataatagacacacacttttagctttcatgaaaaagcaactctcttcattagaagaacctcatcttccctggctaaccatagaagtctggcaggagctgccaatcacagactccacttctcttggccaagggggtgagggggtagatttggcatccaggccgaatcaatctcccatcccctgtcccataaaacatgtgacacaagccaagccaatcagagtccttccctgggactgttttccaggtgaagctgacaggaagagatctttttcccagttggtcaggacactataaagaagaggcctcagaagcagatggtggccatgtttccagccatataggaaagaaggggggagatggagaccgatatacagagagacaagagagagagcgagctggcatgccagtcaacagcattacatccttggttcctgtcttccctctggcaagctttattcttgccctttctagacatgtaaaccaataaatccctttttatttacttgaaataattcaaattggtttctattagttgccaacaatagggtcctaaaatataagcctataatttcaccactgaagttcaaggtaaagctacaaatcttcctgggagaggtgattcatgggtctaaattgttactaaagtataaatgactgataacagatcctttcttaagaggagactataattacgagcttatctgaaaacagacaaagcaccatacagctagaagtaaagacagtcaaaacgtctggtaaccttcacctatcagcacataagttttttttaagattagaatcttcagtcaccaatgtgctgagtttgctgggtctggcacccagtatggggttcagtcaatatcgtaaaagggaagaaacagaagcaagggaaagtggaaagaaaggaagagtgggggaaggaggaaggggaaaaaaagaaaagaaaaaaagagggaaggagacgggaagaggagaaggaagggtgatgagggaggaagaaaagagagaaggaaggcttgaagggaggcagtaaggagggaagaaagaaaggaaggaaggaggaaggaagggaagaagggaaagagaaagaaagagagggagggagtaaaaagaagggagggaagtggagacggagggagagacacacagagacagagacaagacagacaaattgaggggaaagggaggaaggaagaaagacgagagtctgagcggtggatcccgccccggccccgccctcggccccgcccccggcccgcgagctgcagcaccacctccggtcgccaggggccgccacccgcagccgccggcaccctgtgcgcgcggcgggccttctttcccgcctctgcgccggccgcgcgccccccccgccgccgctctcgggctccggccgggtctcgcgcgccgtcttctcgagaggggcatcgcgccgcccggcgcgcgccgcccccctgcctcgcggcgcggggtctcgcgggccccgctcccgccctccgctcgcctggcccggaccggaagcggcgccgcacggcctgggcctggcgcggggggcgggcaccggggcccggtcggacatgggcaagaagcacaagaagcac

SEQ ID NO: 16044 - DNA, 2300 bp, Homo sapien
tagttttgcactgtgttgggacaacctgatgtagtgaaaacaagcctgggcaatgaaatcaacagattggagttcagttcctaattgggtcatggatgaactttgtgaccttgggcaagtgagttcacctctctgagttgaataggttccctcctttctagaacaagtatgagtctgcatcagagagtggttgcgagggctacacatgatggaggatgaggactggcacatcagaagtactgaatgaagaattgtaacataaaaatgacaacagtaatatatttttgtggtttcagcactcttcaaatgaaaccacctggccaacaggattttagtgtacctgcttataacattagccttcgtttccaccaaaaagggtgttaaaaaaggaagcttggaacatgaaagtaagacacttggatgaagagatttatgactctggggggctgtgaattcctaatgtccttttgagacatgtagatcttccagagcgatgctgcccaatgcagtagccactagccaagtgcaaatggtcacttgcaatatggctagtctttgagatgtgttttaagtgtaaaatacacactgaattttaaagacttagcgcaatacaaagaatgtaaaatatctcattatatcttgaaattatactattttggatatatggtgttcccttggtgtctttggggactggttccaggatcctagaggatacccaaatccccagatgtcaagtccgctatataaaatgtcctgtagtatttgcatataacctacacacatccttctgaatactttaaatcatctctagattccttgtaattcctaatacaatgtaaatgttatgtaaatagttgttatactatattaaaaagttttttattctttatttttgctgtattattctttttgcatattttcagtccacagatggttgatgccacagatgtggaacctgtgaataaggagggctgactgtattgagttaagcgaaatatattattaatatttcatctatttctttttacttctaaaagatgtggcgacaagaaaatttaaaattacaaatgtggcccacattatatttctattgggcagtgctgctctagagagtcggcaaaaagggcagaatggagcctccattatacagatcacaaaactgagcacaggtaattcactccaaaggtcggggctggtctcactctgagctgcgggttttcttttcccacgccagagctgcctggtgccaggacgagcgtaacacggacccacagtgtccccagaagggggcaggcgttctgagagccacaaaggtggggtggaatcccttgatgtcgaccgccaccatccccctccccccgcgcgacctccccgcagagacctccccagacaaaacaaacaaacccttgggtctggcgaactgcagcggggagcggaaaccaaggaagatcaaagactcagcggttacccccttccgggccgcgcagtttggcagcgcgccccgacccgggcgggcacccacgggcccccggacgaggagatcccagagactggctgataacggggcgctttggacatttgtcgctgcctggagagggctgggctcacactggcccggggtgcgctgggggctcctcctggactccccaaataagaaactagaggagtgcggtggtggggggcgggtcacggggcgggtaatgaacactttctgcagaaggtaggtcgtgggaagactgggaaaaggcagcgctgccgaagcttgcacctgagcagctaaggtctccgctcccgacctcagtttccccacctgtaaattggagccgccgagtcccgccctgcccgtttagagagaacgtggagcggagggaagtgacagtacagttagcgatggccgggctgttctgtcccaatacgcctcctggacaagccgccccgccgggtcgccagccctggagctcggcccccggccccagaccgcggcagggagcgcggactgtgtcccgcccctcccgtcagcgccccgccctcgtccccgccctgccccgcctccggccccgcccccgccgcaaccagccttgcctttgatgcgccgcaccggccaatgggcgcgcggggaggcgcgggccgcggcggcgggctgggggctcggcgctcccgggcgtcagtcgggccgcggcgacggcggcaggagcgcgtcccggcgccgcctcgggctccgctcggctcgggggctgcttcgggaggaggagagccaagggaggcgccaggcccgcgggccgggcgcatggcttagggac

SEQ ID NO: 16045 - DNA, 2300 bp, Homo sapien
tcttaacactgtgcagggtgtgctactgttggcatcgtacaaaagaggaaactgagcttaaaaaccaaaactgattatgccgtttccctgcttaaacccctccagtggccccctttcccctaaggaggggtccaaaggcttccacgacccggctgctgccacctctcagtcccgtctctctgtggaactgctttcccttttctgagcctgccatgctctcacgctgttatccctgccaagaacactctttccagctctgcaattcccactcatccttcaggtcttcagtttaagcctcccttcctctgagcagcatgctgtcacaccctcagggctaggttaggcttccctgctcagtgagccttattacaccatcattatatcactcatttaatcatcagaatcttccatcagcccaatatctataccctgagatatatatgtctatagtgcagtgtctatcacactataggtgctgcatcatcagcagcatcatcaaaatgaaacaacggtaagtagcagaaccaggatttgaacccagaagttgtggaacaaagagaactaaatcccagtttcccaactcctcaaccactggcctgtccactctctcagaccacaatagctgacacctgttcctgcctgtccagcaatccttctcctccttctgatgatagcatctggctttcctccccagagctactcatcccccactctcagtctatctagtttatggagactgatcccactccagggtcacactgcactcagtacccctacctgacccagcttgtttcatcctgaaggccacgtggctggtcctaggtcagtatgaaagaagagtttatgaagaagctaatgaagctaggcttctgggccctctcacctacacgggccctttccaagtcaggatgggtctttgcaaggtgtttatgtggtcatatgtgtttgtatttgtaacattttccaaattaggcattttatcctcaatctattaagattgtcatctaaccattctgacatcctttgcctgtgtgaggtgatactaggggaaatacaggcatttctggacatgagctaaggagagactgagttggtgagatatttattttggtttggccccagaaagcttcaggtcccataaaacctagatctaccctggtcaagtgaccagtaaagtggtcaataaagtgagtccaacatgtgcaagaacccctgtgacctgggaactttcttccacctgacagggctgtgctcataggatgggagtgcccagagctgggaactgccacccttgccccctgtgggggagaagccaccaggggacagagggagagatgatggagagggagagagaggggcagcgagcgagacatgtgtgtgaatgtgtgagtatacgtgtgtgtgtgagtgtgtgtgtgtgcgtgcatgtgtccatgacatggttttagctccagaatccaaacaggcctttttaggcaagatctaccctaggatttttcaatttcatgagccaaaagtttaagtgagtttccaaaagaaccgaaagaatcctgacttaacaaatccgtctctctgagatcctgctttttaggaaaaaccaccagcaccagcaccacagcagtaattcactcacccagggcagtccctctagggtgatttccagctttttcacctgtgggtgtctgccccttcctgagaccagaaatgccaccagggacttcttctccaccatcctgcctcccagctgcattttactgccactagattttgcttatggaccaattgtaactgaggggaaacaaaaaagggggaaaagcgggtaggggaggaaatccttctcaacaaataacattctggcctttttttcctcatcagagcataaggctggtggccactcggctttgacatctgaacaggattgagacgaaacatctgttcagggagggagggggaagccccgggagagaaggggaaaggggagaaaaagccttctgtgggctaaaaatatcacgtcccttccactctcccccgcccgcccccacccaagttaaaacatgtgatgaaattcggcttttacaatctaaccccgagctacttgaaactattaaagcctctccggtatctgacacaagtcagaatttccactgttccagctgagcttttatgaggagcagacttgagagaaactgccaaggtaacaaagtccgcttgttctctgtcaccgctgcaactcagcttctggggggactgtaggggagtggagagtcagggccgctgacaccccccgacaggacaggctc

SEQ ID NO: 16046 - DNA, 2300 bp, Homo sapien
ccagctggcattctcttttccagagcctcgagtttgggtttaatgtagttagtaaggagttacttccaaaggtagtgggcttagttgtcaccgtattcttaattttattaatgactgatgtgcctgggattggattaatacattaatccttaggacagccccatgaggcagcttggtggcagctcaggaagcatgtctaaggctcagaagttcataactcccttgaggccgcacagagggcggagctggaattctggtctcccactcgatcccttcgccactggtgcagagcttaatcacggccatgggctgcccttgttttgggttgtgggtttctgttcagtgagaacgcaactcaatccaaagtgaatgaaaccaagttggaaggcagggagggaactggctttgagatgacagggtccaggatgtgaatgcagctgagactggttcttgtccctccctcttgtccctcggattgataacttgtactcaactacatgcttttgtcagggaaccctggctgctggccttctgggtcccctaaccataagaaaaaggaccttccgttagtgtaaagcccaaggcaggattctgcttggctgggcttcgatctggtacccatagctggaccaatcatgacatcccagatggggtcacgtggccaacctgccgcaagggggtggggtctgtaccggaagacaggaggggaggggtgcagatcggacaggaagtaatggcatcccaggccccgaattgctgcaaccctggaggccagcccggagttgagactactggttttagagcagttcctctgcctccctaagctccacacctgtcaggattctgttacttcttggtaactgggacttgcccaactttaaaaacattatttaaaaaaatagtaatgtgcacatgtaaaagattcaaatagtatatatacaaggtgtacagtaaaaagtaaacttccctccatcccaggcctgccagcatccctgatgccgactttctgggtgtggcctagggcccctcagtgtaatgtaggggttgtgagcacagactttggtgccagtttgctaggttcgaatcctgactccctctttgtagctctgtgcttcaattgaaatactgtgcctcagtttctcctttataaaggcagggatcatgagagtgcctgtcccttgtgagcactatgaaagtgttagctgttctttaccagaataaatgcatttctatatcttcccatatgcattttgttaatttttaaagtatttcaaacacaaagtttgaaacagaaaattgtgtaacattaactatgaacttaccacccagaatttacaaatgctgacattttgcaatatttatttcggatctatttttaagggggggaaccctgcagttactgcttaatcctcttcccaccccacccttttatttttacacaaggagcatagtgttcatacttatgctatttttttcagtaactgaatatatttggagatctccctccctaggtcatagagctctgcccccttctctctaacagctgctcagccttctgtgactagaggtgctgtcaccagcttgccccatcccctcctggtggtcataagggtcatctctcatcccaggctctggcgaacactgtgctgagagtccttgcatacagctctcccggtgcccacaggcaggaacacaggcgacagaaagtttccacgtggaactgcagagttcaagagcaagtgtgatttcaattttgatgagattgtacatgacctctaaaagaggttatactggccgggcacggtggctcacgcctgtaatctcaacactttgggagaccgaggtgggtggatcacctgaggtcaggagttcgagaccaacctgggcaacatggtgaaaccccgtttctactaaaaatacaaaaaattagctgggcatggtggtgcgtgcctgtaatctcagctactcgggaggccaaggcacgagaatcgcttgaacctgggaggcagagattgcagtgagctaagattgcaccactgtactccagcctgggcgacagagtgagactccatctcaaataaataaagaggttatactgaataatgaggaatcaaaggaagaagaagaaagagagaggaaggaaggttggaaggaaggaaggagggaaaattagaaggggaaaccatgattgctggtgaggttttgagcacattttcctgcaggctggtatgggtgagaggtttggtcttgtttgcaaatcttctgaaggccattccagaggagcagttgccactgcccca

SEQ ID NO: 16047 - DNA, 2300 bp, Homo sapien
ttagcattcttggttcccaggcctgcagacctggactagagtctacactgtcagctcgctggctctcaggccttcaaactgcaccaccggccttcctgggtctccagcttgcagatggcagatgctgggacttctcagccgccataattctaggagctcatcgcttatactaaatctcattatatgcaaatatatagacatatactatatgtccatatccatatctatctctgctcttggttctttttctccggagaaccctagtacaggagttttgccatctaagcaagcatgcttcagccctctggttgagtccgacctgcccttggccttcaggaaatggaaccacacaggctgcatccgtctgtgtctggcttctttcatgcagtctcttgtgaggttcatccacttccttgtgtccaagcatagcttgtttcataactgcctcatgttccacataagaataccccaagtcccttctctgttttatggttcgcagacacttgggttgtttccagctgggggacagtatcaggagctgttcctgctgtgcagttgtggtacatgtcttttggtgagcatgcttgcctatctgtctatagggtatattcctaagggcggcattgctgggtacttacaggacagtttacgttcagctttgaggaatggtgccaaatggttttcttaagtggttgtaccatttatactctaacaagcagggaacgtcatttctcttttcttttcctcccagcctccttccattttcctttcttatacttatttatccaacccacattactcacagtctctatagccttgtgtgtctactggtgaattaaaaggtcactagtggtgtcctctgggagtcctcttctcactcccccagttcagtaggcagatgggtggggagtcccccacgccatctgggtcctgaaaaggtgggagatgggatctgggaggagcaggttattcaatctctccccctggaaagcgacgtggcgcgggccttactggggaagggcctctccccccagaccgagagaggcgcagttaggcccgttctcggaagccatggccgatcctgctcctgggggcgctgatactggctatttgcagcgccctctcttgtgaaaccctgcggattccgcttgcgggaagtggagggcggtggcctccgccttttggggcttctgggctgagggaagaggatggaggggcagaaagggagtgaggtcccaaaccccaagtggaggtcgcccggggaccccccatcaaaacacttgctggggagaggttatagaggcagcaaagctctttccagcatgatttcaaatcccgtctaagggctttcagaagcctggagaaagtttcggtttcccagctgtttcagctttttccgcccgcaccgcggcgatgcgttcggagccgccgaggcggcagcgccatctgctgtctactttttaaattgcaggatcagatcctctcggtctctccagacctgccccgtggaaagggaataagattaaaccagtaaaaatagcttagatcacctgaggtcaggaattcgagaccagcctggccaacatggcgaaaccccgtctctactaaaaaaagtacaaaaattagccgggcgtggtggcgggcgcctgtaatcccagctactcaggaggctgagacaggagaatcgcttgaacccaggaggcggagtttgcagtgagcctatatcacgccactgcactccaggctgggagacaagaacgagactctgtctcaaaaagaaaaaaatagtttaaaggccaggagcggtggctcatagctgtaatcccatcactttgggaggccgaggtgagtggatcacaatgtcaggagttcgagaccagcctggccaacatggtaaaacccctgtctctactaaaaatacaaaaattagccaggcgtggtggcgggcgcctgtaatctcagctgcttgggaggctgaggcaggagaatcagttgaacccaggaggcagaagttgcagtgagccaagatcgtgccaccgcactccagcctggccacagagcaagactccatctaaaaaaaaaaaaatttaaaatgccgacagccactgttatgcaaagttcaagggcctctctcacacttagctgggggaggagtgaatacagcctttctgaagaaagaaaaattaagtaatagcaaaatcattaagtgtttatgattcataaatacagtttttgtcaactaaaaaaataaaatatgtagaagtcaaaaaagtgtctatgattcagaaatgccaccgtta

SEQ ID NO: 16048 - DNA, 2300 bp, Homo sapien
aaggactaatatggttctttaaagttgacaacttctattcgtcacaaaactccattaagagagtacaaaatgcaaactgcaggatggaaaaggatattgagaagcacataaacccaaatgaatacataaagaacacctacaaaccattaaaaataatcaagtcaataatgagcaatgaccttgaacagacacttcattggagaaggtataaggatggcaaataagcccatgaaaagatgctcaacatcattagtccttagggaaatgcaacttaaaaccttgatgagagaccactgcacattaatgcagtggtacactgaaaaacactgaccaaaccagacacagtggctcacattggtaatctcagtactttgggagcccaaggcaggaggattgcttggggccaggagttcaagaccagcctgggcaacatagtggccatgatggtctatccctccagaaacaaaaaaaatttattagccaagcatggtgacgtaactgtagtcttagccactcaggaggctgaggtgggaggatcatttgagcccaggagttctaggttgcagtcagctatgatggtaccattgcactccagcctgggtgatagagcaagaccccatctttaaaataattataataatgaccatatcaagtgcaggtaagaaggtggagcacctggaattctcatatactgctggtgggaatacaaaatggcacagccactgtggaaaatatttggcgtaatctagcacagttgaagctatctatactctgagacccagcaatttcacctcagataagtacatggacttggataaatgtgtaagaatatcatcagtggcattgatcatgatggccaccctaggaacaacccaagtgtgcatcaaaagacaaaacaaaaaatgacaaatggtgatgtatttaaataatgaagcaacagaaaaccaaacacagcatgttctcactcataagtgggagttgaacagtgagaacacatggacacagggaggggaacatcacacgctggggcctgtcaggggtgggggccagggggaaggagagcattaagacaaatacctaatgcatgcagggcttaaaacctagatgatgggttgataggtacagcaaaccaccacggcacatatatacctatgtaacaaacctgcaggttctacactggtatcccagaacttaaagtaaaataaataataataataatgtagcaacacaacaatggaaatgaaaaaaagtatctacacagaaatgcatcagtgaatcttatacccataaatgttgcatgaaagaagcaaggcactggagaatacacacagtatgcatggttcaatttatataagattcacagatgagtaaaatgaaactgaattgtttggggatctcataggtggtaaatttctaaggaaaagccaagaagtaacccccatctgaatcaggactgtgactgcctctaatagggaggaagggaatcatggctcaaaaaaaaacacatggcaaacttctgggcgagccagcaaagttctattttttttttttttgtctgatttctgtttcttgccttcaaggccacaaagatgggtgggcatgaatcacaccacactgccctggggtttcgcttccctgggactttctgttggtggtgatggatacagctttgctcagagaaaaggcaccagatggaactgtaattctaccccactgctcttctatgtcagtcactggctctgtgtcccaccagctctgtgatccaagcctcggttttcccatctgttcaaggggcatgacggcccccatcatgcctagctcatagagtagaataatgaatgttaaagggctctgggagctaatgcctgaattccagagatcaacggggactcgaaggacagccagacctctgcaaggcggcagggaaagtgaggctgagctaaatcccacagggctggccccacaccgccttgcccttccctgcgctacccggaagaagaggtgggtacagctggcaggctggcagttgagttcaatataccatgtttcaccagccaatgggctggggcgatcagaagcaggtcacacagcctgtttcctgttttcaaacggggaacttagaaagtggcagcccctcggcttgtcgccggagctgagaaccaagagctcgaaggggccatatgacactcctcccggacccctggacacacacagccctggagactggaggtcagtatttgatcccaagctcagctgtcctctgcctgctgtggcctgagtccccttctcctggggccctg

SEQ ID NO: 16049 - DNA, 2300 bp, Homo sapien
ctgggaggctttggttttcactctgagcatgatgggagcacgggtttggaacagaggagtcacctgctttgacttggggtctggcaggcccatctagctgtggggtggagaatggatcatggggggggtggggtaagggcagaaggagagcccgttgagcggatcattgctgtcattctcgggagagaccatggtgtcttgcccatggcccagaggtggttaaaaaaaagaaaaccagacattcagatttgggatatatttcaaaggccgtgtcgatagggtttggggtgcaagagaaaggtagagtcaaagatgattctgagtgtttggctcgagcttctggaggtttgaagctgccatgaactgaaatgggagttgcttagcggagagatcaagagtttggttttgtgcttgtggagtttgagctgcccattaggcatcaatgatgagtaagcagttgggaaaagttaagggcggaggttggagttgaaaataaaactttgggcatcatcaccatataactggtatttaaagccacaagagcaggtgggctcatctagggatggagtgatatggagaagagaaggggtctaaccattgagtgctggggcccccagtgttaggaaccagccaagaagacagaaagagtgaaaatcagagagttggggtgtcctggaggaaatgaagaaaatgccccaaagaggaaggagggaacaaatatgaccaatgcccctggcagagcaagcaggctgagggctgaggattgagcaatgggaggtcactggtgacagtttcactggagctggatggggaactagagggaatgggaggggatgggaggacttggggacagcagtacaggcaacagacaagggggcctgctgtaaagggagcagataaatgggattggagccaaatgaagaaggggagtgtcaagagagtgctttacttttacaatggagaattagagtgcattgtgcactggtggggggatttgatctcttagggagagaacagtgttagggagggagaatgcaggatagctgggggagggtggggggcttggccccagcagagactcaggacacttgggaagttgagcttccctgggcttcccctcctctcctgtctgcaaggggtcagtgggctgagatttcagcacttaagcaaagcatttgctcttggccccagagaaaccgggctggctgtggtctcaggaaggaaggaggtgtccaggctcaggcctgggcctgggtttcagggagggcccacgtgggtcgccccttgaccctctctttcagcaaggaagtgatcctttctctacatgggcctcaccttggggaggacaatggtgtctttgaagttgtagtaactgaagtagagatcaaaaggcaatgcagatagactgacagatttcgcctgaagaggggaagcccgaccaggtaataaaggagtaagaggaaggatgttaaggacaattttaggaaacagataatgagtgaatattttttctctctctttcccaatttaaactgaagcaggagaaactgaagctagacataatgattaacttcccaagctggtgagcttcctgagctggttagtgagaacagcactaaggccaggttctcctccccagatgtttaagatgagacaggacaatgcctgctcagagacagggcctggctgaattggccctcaggattctctctgctctgaggtttctggaagaaggccagggcagaggtgtggtgatgtagctgctgggaggacagagctccgagtcacgtggcttgggcgggcctccccttcctggtgtccacagaagcccaacgtcactagctggggtgtgtatggctcacacgtaggccaggctgccctaggcttggtgtgcaagggaggggcccctacttacttgtggcctgtcccctcgtgaatgtgtctcatgtccccagtggggtttttcagtgagggtcatggtctccaggatgcacaaggctttgtgccagaattgcttggaattgcctagttctggaaggctggttggccaactctggcctccggcttttcctttgggaatttcccttgaaggtggggttggtagacagatccaggctcaccagtcctgtgccactgggcttttggcgttctgcacaaggcctacccgcagatgccatgcctgctcccccagcctaatgggctttgatgggggaagagggtggttcagcctctcacgatgaggaggaaagagcaagtgtcctcctcggacattctccgggtaagaggagcaggcattgtcc

SEQ ID NO: 16050 - DNA, 2300 bp, Homo sapien
tcaggccccggcactgattcagtgaacgtatgacaggacagagcctggggacgaaagccctatggaagtagagacctcagcagcaccaaacaccatcaacagaaaggacacaaaaataggccgggcacattggctcatgcctgtaatcccagcactttgggaggctgacgcaggcagatcacttgaggtcaggagtttgagaccagcctggtcaatatggtgaaaccttgtctctactaaaaatacaaaaattagctgggtgtggtggcaggcacctgtaatcccagctacttgggaggctgaggcaggagaattgcttgaacctgggaggcggaggttgcagtgagctgagatcgcaccattgcactccagcctaggcaacagagcaagactctgtctcaaaacaaagaaacaaacaaacaaacaccccagcaacaacaacaacaaaaacaaaaagaagggacatgaaaatattctagtccagagtggcaaactcagatgccttaagggaccagtggatgtagatcgtgcagataagagaagtggtcccagtggtaacatgagaatgtttgccttgcctaaaaggaccccaaatctctctccttcacattcttttctccttcctccttatcgtatgggttaggcaaaaacaaatttcagctgaaattttcttccagacagttggactgtgacctctgagtcctaccagctttgttggagaatccagatgtagatgagaacggtgttgcctaaggccacacttcaagccaggcccgttgatttccaacttatggcttcctacagcagtgtggtcatgaagcctggaaaacaggaagataggagtgacaaaagagggacaggagtagaatgaggcttaggttttcaaaagatgctcatttcattttggatgactatggcaaggaagagtggtggcctgtctactgctactgttagtcatcactcatgtgactgtttttatgtattcattggtttaaattccctggatctccagaaacatgtcactttccactgggggaaatttgtgtcatgattaaaaacacacacacacacacacacacacacacacacacccctcctcctttctcagtgttaatcaccttctcctataattagcacttaaaatgtcaaaggagaagaaattaattaacaggagtatccagtgcagcaaggctctaggactgattataaaaagcacttccttaaatattttgagtgcttttgggaatcagaagcctcccttctaattgaaagatccttaactacaccctaagtcctggctggtggccaggggtgcggggctgagtgaggcggcgtgtggaaatcccttcttcaccatccttgggaaaattccctccaaactgggataggtggcaacagaggttcggaaacagcaagcgtcccaggctgaatctgcggaggaggaagagatgaacctttcctgagctggtactgcgtgccaggaactttagctcggtattttgccacaatcctgtaagacaaccgatactatgatctccattttacagatgaggacattgaggctcagcgtggttgtgacttcctcaggtcacgcagccactgaatgaaagcgccaaagattcaaactgaggtctgattctaaagctttgctctctcacggcatcctggaatcctatttcaaccttcatctggactcttaacccagcccaaacctaagcgtctacagttttgacagctgaggcgggagcacgggaggcggagctggtggcagcgcagcgccccgccccggctccagcatcagccaatggtgacgcggcacccacagcctttcgcccaatcagcttgagcttcccgcctccatccgccgctcttctctgccccgccccttcgctttccctttggttccaccgagcttgacagagcggaaagtcccttcggccggcgccgggctggcagccattggaggaaggtctgtcacagggaggcccaatcacggcccgctcaggagcgcagctcggcctacgattggctagcgcggcggctgccccctccgcccccgctccctccctcttccctgtgcggttcggaggcggggcaggtgggggcgggcccaggtagcaggtttggctgcgcgggggccgcgcgtcggaggtaaatactagggcggtgggtgtggggagccggggccggcccgggacgcgggctggggagccggggcgaggggcgacgccccgccgcccgaggttagtgaatgagcgggcggctggcggccggcgggcggccggatcccctcggcgcag

SEQ ID NO: 16051 - DNA, 2300 bp, Homo sapien
atgctacctctgcttttaccctcactgagtgttacacagatatttcagtcatgttggtttgaaggaggtgcctaacctgtatcctgtcttggctaaaccacatgtctcatgctggcttgtagagggagagacttttaggaacgttaccattatggaatacttcattatctagcagtgctttctaaaagaagtgttccactgtgtatagatttgccaggttgtttgatcattaagtgattaaatctaaaatttggttctttaggagtatttattttttaattgctagaataaaataaatatgatagtgctatcaattgcagccattacccagaataatggaaatggatacctctatctcaaggaaggatgaaatgaaagtactgtctttggaaaccagatagccacattcttatgacagggatacctaggaagtattgttttcagcagaaaattaattaaaataatgaagtaaagtctcagtttaaattaatgaaattgtgtagttttttaaccatcagttaaaataggtttgagaatgagcctacttcattggaaagattattattcttgtaaaaattttaaatgaggaccaggtgcagttgctcatgcctgtaatcctagaaccttggaaggccaaggtgggaggatcatttgagtccaggagtttgaaactgcagtgagctatgatcgcaccaatgtacccaagcctgggtgacagagcgagaccctgtcttaaaaataaataaataaaataaaaataaatgaaaatttgaaaaagaaataatagaaagaaattataatgcagttatatcatgatattcccttgctatgtagtacaagttttgatgctacaaaattgatttttaaaatatttttaatatagtcatattataatatctgatatttgcgatttgagaaatcagataactatgattaatgtgatgaacattgcccatcttcagaaaaaatatatgaaatgaagttgagtcagaggtaaaatgttccattatcacaatatggccatatcatagctatcatttataggcatgagccacacagctcagcccgaaacgctacttttaaaagtttattagtgtcagaatatgggacaggcctggtggcttacgactgtaatcccagtgcgttgggaggccaagacaggaggattgtttgagcccaggagttcaagaccagcttaggcaacatagtgagaccctgtctctacaaaaaatagaaagcttagctgtgtgtggtgatatgcgtctataataccagttactcgggaggctgaggtaggaggatcacttgagcctggaaggtcttggccacagtgaactgtgattgtgccactgcagtccagcatgggcaacaagagtgagaccctgtctcaaaacaaataaataaaaataaattaaaaaaagttagaatatgtatataagggtaatctttaaaagtttttactagaatctgattttataaatttcagtgtcttggaagcaaacattgtgttgtctttgaaagtactttacaattggatttcattaattaaatatgcacagttacagtagataaaagtaatacagtatgtatgtcttttagcccttttagatattttttgaaaatatttcatttgtgtgtatgtgtttactggtcaaatgaaaattttaaaagtcttcagtcttaattttcagtcatgtagaatgaagtctaaagtttatttttgctttttcactaggcattttgatttcctttctttttacagcatggacaccacgttgctgaaaacatgctttgggactgccactgaatttatcttttgcggttttatgacaaagttattagtagtttcccttttttgaattagtattttgaagttaatatcacaatgagttcaggcttatggagccaagaaaaagtcacttcaccctactgggaagagcggattttttacttgcttcttcaagaatgcagcgttacagacaaacaaacacaaaagctccttaaagtaccgaagggaagtataggacagtatattcaagatcgttctgtggggcattcaaggattccttctgcaaaaggcaagaaaaatcagattggattaaaaattctagagcaacctcatgcagttctctttgttgatgaaaaggatgttgtagagataaatgaaaagttcacagagttacttttggcaattaccaattgtgaggagaggttcagcctgtttaaaaacagaaacagactaagtaaaggcctccaaatagacgtgggctgtcctgtgaaagtacagctgagatctgggg

SEQ ID NO: 16052 - DNA, 2300 bp, Homo sapien
tataatggttactaactatataatggatctatatcgtggtatacatgtgaacatactttaaaaatgttatatgcagttaattacagttaatagtgggagttgtttttctttaggaaatttatatgctataatttaggaactcttctcagtgactaagattttccttctgaagtatctgtcatgggtgctatttaaagatatctgaatgacaacatcataaaagaacagtggtctcctctttcatcaagggatacttccaagacccccagtggatacctgaaactatggatagtactgaaccctacgtatactgtgtttttcctctacattcatgcctctgataaagtttaatttatatattaggcacaataagatattgaaaacaataatcagagaagagacaataataacaatatggcaacatcactactcgtgtacttcaggactattattaagtaaaataagggtgacttgaatgtaagcactgtgatactgcaatagttgatctgatgactgaggtggctactaagtgactaacaaggcagggagtagacacagtgtggagatgctggacggggatgggttacgtcaggggttatggattaggatggtgcaagatttcgttataatactcaaaacagcatgcaacttaaaacttacgaattgtctgtttctgcaattttttatttaatatttttggacagtggttgactgtgggtaactgataccgtggaaggtaaaagtgtggataagtggggaccacagtattagtacatagcttttctcttattatatcacttgatcgaaatcgtggttaattggtataatttttgaattaaaatattttcatattctattggatcatattatgagatgtttaagatatagtttaataacacatccccctcctctttcaaccatggaaaaaagttaccaagtatttacatataattcatttagtaaatttcctctttttttaagaaaagtcttttccttgtgtttaaaatgtaaaaattttcctatttctttctttctgtcctcaaatccactgtgggtgatatcgtttttgctgacacacagctttatcaggtatgactcctaagtgtcgtgttggactccacggatgtattgttgaatttttcaaaggaagaacttttcacactgcctcttctacattcccttgatcagtatttaggagtattctatgatcattgctgggctttaaggtctagagtggtctttgtattcaaaacaagtttgccacacttattacacctatatttcagaaataattgtgagtgttttcttcaaatatattattgttgtgtgtctctggctttctgtatttttaatctatgcataattctctatgttttcctcttttatatgtataagtgtttgtatacacatctgtgttattcttaacatatatgtttttaaaaacagatatatgttcttaaccagaactttctttcctaaccatgatacatattcctaaccaggcttttttcaaactgtgttcatgaaataatattaatctgagatgctaagcaaagtggcacaaaaatttttatcaataagtttattttgtttctccctgagcagttcacaatgcacattagcatattaaaggctctggttccgtgcagtaaagaaattgtttatctttgtttatctcagcatcttcaagaaatatttgagttcgaaacacttcataatacacaggggtgttctaagcctgctgatttgggaaatgctgtaaaaaaccgagtaagattttctttgtagtgttttaagagatcaaataaaattgactacaagtgattaaattttcaagaggttaaagcatttagctgaattgtattttgagagggtattttcttatagaaattacattttgaaatacagcattggttttttcccccatagtattatctttttcaatacttttgatggcctttaaaaggcatttgtaaaactaaaaattctgcctttttgtggaaagagggtttttttattttgttactgtcattccttgtttctcttctataagaatttgcctttatctttaaaaaacatgcttactgtttcagagagtgtgacgcaggaaaggaggcctcccaaacttgcctttatgtcaagaggtgttggggacaaaggttcatccagtcataataaaccaaaggctacaggtatggattaatagcatataacctttagtaatttgcataatgcctaacttgccatagcattaaaaaagattataagctattacttctgaacatgtatgtagacttttt

SEQ ID NO: 16053 - DNA, 2300 bp, Homo sapien
gtggggctctcatgccagagcatgctccaagccctgtgaatgtttccaaagtgaaagagtacctagggagagagctgggggtgctgggtggggccaggagtagggtgggaaggtgatttctgcctgaggagcaggacacacagcagaccagagtctttctctattcatgcattcacttattcatgtgttcattcattcgcttgatggattagccctgatcccaccttcagggaattaggagaaggctgctgtgttcaccctcccaagcccacccagaggggtgtggctctgagggcaaggagtgaagccaggtcaatagcctggctttgaagtgtgaacctgcctttataggctgtgtgcactggtgaaccccgaaacatctggaggccgtggtttcctcacttgcaagatgagaataataatcaaatctaccttgtagagatttttgaggactaaatgaaatgacacgagtaacctgctcagaacagaatgtggcacatggccattactcaaaaatcaaggtcacagtttattgctattaatattatttccatttcctgccctgacagatcccagcctgtgtctgatcttcatacggtctcacgctcacttcataccccagggcccttgctcaggctgtttccaacacctggagtatcccctccacctccttgcctgaggccagcctacttctcacctcctccaggaacaccacctcccatgaagccatgctccaaccctctgcatctgcagtgctgccacttagcactacttggggtcctcatctctacccggtactgggatgctttctggtcagggcctaagccctcccctttttcataccctcctccagccttacccaggtgcacgtcctggctatcccatgggatttgtcccagaaatcagctccaagctccattctctaaagcagtggctcccaactggggctgcttttgccctctcgtccccgacccagggggcatttggcaatgtctggagacatttttggttgttacacagtgggtgtggcaggggtgctattgtcatctagtggctagaggccagggagattgctaaacctcctgccatgaatagggcctcccacagtaaacacttaccccactcagaatgttcatagtgccccaaggtagagaagccctgctctcaggaggcacctgctctccttcagagagggtgagctctggggttccgggtaattcgattctcaggacaacgcacatcctggctgggcggacctctccgcgcggcagcctccagcacctggagctgtctgcccctgacgcggagccctccctcgcccgccccttgtcacagcatccgcggatccctgcggatttgtatgaagcaattgacctgtgactaaggccagctgagctcgccttgttcccgcagggcggggacaatacccctattaactggaaggcaaggtcccagcacagcagcgcagagcatggattggggaggggcgtggatgggggcggggagaaaaagggcagctccagagctgtcctaggtcgggggcggtagtccctagtactaatggttataattagcccaacatgaatatcagcatcttctcctagatgcctagtacatgagagctcatgctgattcacatccctgatgagatgcctccacctgccaacctcaggggtatagtccttgttcccacttaacgtaagaggaaactgacagagatcccaggcgatttacccaaagtcacccagctggtagatggagaagtagaggcaggaactcggattatctgaattatggtttgtattaagcactcattctgtgccaggcgcagtgaaagtaccagatggggagtttgtaaactgggcaaatgggggtcccggaaccccagaacctgatgaaaccctggccccgcctcctctgagtgtcggccccaacaacagcgcagaagaggcccctttctaccaccaggctccacccccagcgccattgattggactgtgcagaaggggtggggccttccaagcgagatgagccaatcagaacctctcttcaaggaactggaaattagaacagtgtttgggccaaatagatgggggtgagcaggggaggaaaggtcttgagggagcagcacgcttgcctgatgggtgcccaaagccaggggcaggtggaggtgagagaaggacaagctctgcaaacgttgcggaagcgctctgtccatggagaaggcacaggacttccatgtggggagcagcttactcctgctgagaactttggggagacagagtggagcagccatctca

SEQ ID NO: 16054 - DNA, 2300 bp, Homo sapien
ataaagtcagcagatgaaaaacagaaacattcatcggcacacacacacatttacaccttaaaagaaaagatttaagaagctaagagaaagggaagggtcctctaccggagcgcagtacaggtccggagtacacgaagtcggctcgggagaccggtgcccacttcgcgcgaaccgaccgtggcaccggccagactcaagggcgctcgcgaattggggcgtccttatgagccctctcctttcctgatcgtgagatagggcagggattgtgtatctgcacccccctcctcccccattactcagccgaagtttagtttagtttagtccttcgggcgcaagacttcgagaaccttggagcgaggagaccccgaggcgcgaggggaaagagctaggctgagccgcgtaccgagtctcaggttcgcgggcgcctgagcccggcagagggatcgggctcctggctctgggctctggggcgagggtagggaggttgcatctcagcttgagggagatggtgatagagcgaaaagttcgggcgccgcgctcggcaagtgcccaaaaagtggaggcgagcttcggcgccgccaggcagcctcggacagaacacctccccaccgccctccccccaccccgctttccggctctgcgccgccacctcgtcccggaaggctggggcgcggccccctccccagggcggggtgcccaggggtcccagggactggcccagtccagtgccgggtccgcccgggctgtgtctccctaggccggtgctcgctgctgcgctcagtgtgagccgcagcccctcccctccccccggccggagctgaactcggagcccaggccggtccccgctctccgcccgcccggggctctgcggcgccaccgctgccgccgcctccccgcggagtgacgcgccctgcagccaaccggggcagccgggggggaggtccgggaggggtcctgggcggagccgggccgcccccttatcccacgggctcggggctgcttctcccgaaaacttcagccctaattgtcctgggaatgtccgaggtagagaaagggagcgagggagcaagcaagaagctggaggatcagtgcccctggcggggaggggatggggtggcgggagaactgcccctccccccagccacaaacccatcaggttcccaaacctttcctggatcctcttctccgcgcccccgcgagcccgggatccaggggatggagaactcggggcggaggagcgccgagccaggcgggagggaggccgagccgtgggcgggaggcggaccggcgtggggctggctcttccccactcgcttatttttttttttaatgggggtgggggtgggctgctttctggtagctcttaaagaaacgaagaaacactcacgaaacgggacgccctcccccctgatcccgccgcgggactccctccccccgcgggccggcgcgcctcgcccccgagttgggaagttcgcagcgcgccggcagcccgggtccccagccctcgccgcccggccccaccccccacccggggcggctcaattccggggagggcatgctaatttgggtcggcccagcccgggattgtgggggggggcgaaggagggagggaagagggaggggagagggagagagcggggggcgcctgccggggcgccgggcccgcagtggagaggaggccggcccccggcggccgggccgcggagtcccgggcggtcgcaaagagggttaacccagtgtcgggcggcgcggcgcgcagagccagccccgcggccggcttattgggccagcgcgcggagagacaggggtctgcagcaaatcacgaactaattgattaaggcgagcgggtttgaatagcgctggcccggtgccaatcgcctttcaaagagcccctctatgattaatcgcaatgcattattgataatcataattatagcaggacacatgcgcgctgcgcccggggccggggagccggggagggggcgggcgggccggcgggcggggggagccgccgccgccgccgccgctcgatttccgtaattttgagaagatttttttttagtaattttttattctgccccagctgatgtttgagccagcatgtcgcggaggaagcaagcgaagcctcaacatttccaatccgaccccgaagtggcctcgctcccccggcgagatggtgagtgctccggcccgcgccgtggacacacacacacgcactcacactcacgcacactcggacccactcacacgcggctggcccccgcgccccctacctcaccgccgccgcggccccgattgct

SEQ ID NO: 16055 - DNA, 2300 bp, Homo sapien
catccagagttcatgaaagacatagctaatcaagcacaacactctttcctgctgaaccacaacacagtctcagaatatttctcaaggtgacactgcatgcagactctatcagttgatcagagttgcaatgcaagataagataacctgccctcctaggtctgggctcagccagtgatgtggttcctcttcttaggatgagtggccagatatagaagaaaaccttagtctgaaagttataaatattcaacttttcctgcagctccctcctccttctgcttctagtgaagcattccagatacagcagggacacctttggcaggcaaacacagttttgtctgtctcattccaggccaccacctcccttatgtccttatgccttctctctgcattcctcaaggatttgagttgctttctcatggtgcatcctctaatccctaataaagttctgggtccacagccatggtaggcagaattttgagatgcctctcacaattcttgcccccctagtgttcgcgctgtttactctcatgattaggttgcatactatgataaaggtgaagggattctgtggacgtaattaaggtcccagagaagttgattttgagttaatcacaagaaagattatcatggatgggtctcatctaatcaaatgagttcttcaaaggccaggacatttataaagaaagaaacagaaattctgcttgtcttgaaggattaaacagtcacatgctaaactacctgtgcaaagggccaagtgacaagagcctgagagcaacctctagctgctgagagaagtccctggccaacaactagcaagaaaatggaaacctcagtcatacagtcacaagaaaataaattattccaacaatctgggggagcttggtggtggacatttatctggttggtctccagatgattatgtaaatgaccaacatcttgttttcagctttgtgggtacccagctaaaacatgtcaggctcctgacccacaaaacctgtgagataatgaatttatggtgttaaaccactaagtttgtagtcattcattatgtagtaacagaaaatgaaggcactagatacagaattatctacctgaccctttctattgcctctcaaaaccagcaaatggtttcttttgagtgtcttactgttttttcctataggaaaattagcatagtataagaacatgaaccaaacagtgataatattgggggaattaaagaaatttcacaagctcttatgtcacaacacttatttctagtccatgtgaagactagagatgggatcatccctcccactcttcttcattcccctgagacagacactgctagtccaaagatggaatgggtgaaatccctgccttaggaaatacccagtggtgatgtaaggtgagacttgtcttagaggaaatcttaacagcctccaagccctccttggtgaattctcttatttgcaagtgttaaagtgatttaccctgccttttattccactctctgctcctttctatgtataccttatctccctcatgaaggggcactgctttcttcaaggcatttagtaagaaatgaacattattaatcatttacagtttgaaaagctccagacaagagtctgttttatcactgtgtcattcattgcttggggtagccaagtttaacataaataactatcacagaatttcttacaatggatcaaatggatcctctccctttttttggaaaaggctttttgagttatttttatttgggactttcattaacttatactctaaattggggaatgataatataataattttacctacttcataaggtttttgtgaagattcaatgagtaaatacatgagaagttcttagcaccataaagcacatagcagatgcttaataaatcttagccattatcatggtgattacattaaatatctagtaggcttccagcagtgttcaagaccttcaagagggcaagcaaacattcttttgtaccagctacgtatgtcacaatagagacctttaggttcaacatcacactgcccctggtcattcagcagtgggtggggcttggagccagactataaattgggacagctgagcttgcagaatccagacaaccaaactccatcaatcaagaggaacttaatccagggaggtagggtagggggttgagatcaggagcagtagtttagaaaagtctctattttgggcttttactagactattggggaaagaagggggaatagagtagatggttataaaatttcagaatcaaaaaagtttaatctgagagtcccagttgatgatgaat

SEQ ID NO: 16056 - DNA, 2300 bp, Homo sapien
aaaagtatttttaaaaatcaataaaaaatacaagctaataaaaaatacagtataacatctatttacatagcatttgcattgtattaggtattctaattaatccagagatgatttaaattatgggggaaaatttatgtagattatgttcaaatactatgccattttatatacacacacacatatacacacacacatatacacacacatacacatacatacagatacacatacatatatatttataactacctatatatttatttatgtttatgactacagtacatcatatttacataaaaaactctgggcagaataataactatggaaacagaaatggtaagtataataaataggccaaaacacaacaaaaggccccaggaatacagaaggaatcatcaatcaccacgtttcacaaagacgagcaaatataaagagtctcaaagtactacttagactaggtaacttgcaacttaaaattccaccactgaagattgctgcttccagatagaacatgactactcccaggaattatttgtaaaatgtaaatactcttaggaaacaggctccattaagtctccagatatcttaacgctaattagttatggaatctccttctgctgtaatggagaatcctgggagtcggggttgagtctagagaagacaacagaagcaggcttcgcctccttcatcattgtatccagaactgtttacatcagggccctgtgcttgctagatgttggtatcctgggcttggtgggtcacacctataatctcagcactttgggaggctgagtcaggaagatcagttgaggccaggagtttgagaccagcctgggcaacatagtgagaccctgtctctacaaaatttttttaaaaagcaaaaagtaaaaataaaaattgagaaccaacaaaagattgttactttgtttcagctttattgaggcctaacagaagtacactaaattgcatctacttaacatgcaccatgcgatgggtttatttttaatttaattttaagtcccaggatacatgtacaggaaatgcaggtttgtcacaaaggtagacgtgtgccatggttgtttgctgcatctatctactcatcacctaggtattaagccctacatacgttagctatttatcctgatgctcttcctcaccgcaacccccaacaggccccagtgtgtgttgttaccctccctgtgtccatgaaatatgcatacacctgtgaaagcatcaccacaatcaagacatttttacccccccaaaaatttccttgtgcccctttataatccatccttccctccgccttagcctgtgcaactattgatctgatttttgtcactctagatgaatttgcactttctcaaattttatgtaaatggaatcacagagtatgtgctctttttggcaaagcttctttcacccatcataagaattttgagatgtatccatgttgttgtgtgtggcaacaaactttttacttcactaaagtgatgatatcttttaaaccattctttctactatcataatcattttgtaaaagagaaggccttttaaccatcaaaaaagagaggatgtgtcctccaagtaagaacagttgttctccagaatgagaaattggcaatgtcatgctgacaaagagggggagtccctaggtaaaatagtataaacctcatcacccaaggccagtccttctcctggccatgagaggggaagcgctgcccctcacaaagccttatatgcctcattcagggagggagaaaagcagtccctcttgagacctgtttccatggtaaccagtgagcaattgacaatgtggctgcagttgggcctccttgaaggggaaaaatcttcaacaggaaccaggccactgagagatggaagaaaggacagctcatacccaaacctcacgaggaggctacaggaatcactggacagttcctttattgggaaagcccccagtgactttccaatgaaatggatagagaagggaaaagagacccttcggaatcagatgagtccatgaactggcagcagtcagggcagtgatgacatcacagaaggaggatgggccttagacagacatcactctttagaatccctgcaactttgagcaagttcgtgaatctcactaaggctcagtttcctccataaaattaatcaatatcagggcctctgcattggacaactccagagggcaccattggggttataccttgtgtttgcctaaccttcattgcagtgggcaggtgcatgctttctacaatgtcctaaggtctaaaggggtagagttctgtgtg

SEQ ID NO: 16057 - DNA, 2300 bp, Homo sapien
ttttcttgtttaaataatgtttttcattgaaggaaaacttggctccaggtgaagctctaactgaaaggcatctgactctcttggaaattcacattcattaagtagaattaaacaagtgtcacttattttgaaaatttagaaaaaagactatgggctctagagaattattgaatcaattgtgtgagttatgaaagatggcattttggaggagaagtgagatatgacttaaaaccatctgaagcttgtaaactactcagataaagtgtggatgctgttatcacttaaatagtgcaaacagtaggctcacctagaggtaggccagtggtttcttaacactttgagtgttcagagctctctaagaaaagttccttatccgtttcctccctaagaattttagtaaatggtaaaaatttagtgaaagttccaaatgaccctcatttagaaagtaaataatactctaggaaaatttgaattagaattcaagtcattaaaagcctatctgttagtaacttgaatctatcttggttgatcttgcccaaggctggctttgaaaacagattttgtcaaacattgcaggattcttgatgaagttaactgcaaaattatcttcgatattgtaatctaggggaataaaacaaggtttacaaatcatttccctgcttctctgataagtatgttaaatgatcagtgaacttagatggtggtagctggtgagtatggagcttagtcatctttaaattgggaaactatacccatatcagtttgtggttctgatctctcagagttcatatggtcaatgtgtgtgagtctctatggagtattcttgtgagcagggttacttgccataaataacaaacatcttctttttagtcttcttagtgatttttaagtatcaactattgctcttttttttacacgtttttaattttacggagagtatcaatttcccttttatctccacttaaagtagttttgacatttttacatttgctgttaatcttcagaaaattatttttagaaaataaagatgaccttttcctaatgctgcaagtatagaaattggagctaacttccatttgaatttctggagagccattagcaaagtaacattctggtaaaattaaaaaatcagcctcaaaaaaaaaaatcaattcagacagatcacacatatggcatgtgactatggctagggacctcatttaaaatatttgaatatgatcaacatcctgaatattatttaggttttacttctaaaacctctgaagatataaaatattttgctgatgtatgtatgtgtagtatagcatatatatagcattgcctggtacagagtgttctgtttttcattactcataattgctatttcgagcatatgttgtgaacgtattgaagatacttctgggtctcattaatcgatgttctaaatgctaatctctgctgtctagttaactccaagcaagtttacccctcccccgcttttggtggtgattcatctgttgatgatgcctaacaaaaccttcaaagaacaattatggatctgagttaagtcttgttgcattctctgcaagtacattctaggcagtgaattttcttcctgctttgcaggccattggagagaaaagagctgctccagactctggcaagaagcccaagactccaaagaaaaagaaaaagaaagatcccaatgagccacagaagccagtgtcagcatatgccctgtttttcagagacacacaggctgcaattaaaggtcaaaaccccaatgcaacctttggagaggtctcaaaaattgtagcatctatgtgggacagccttggagaagaacaaaagcaggtgagacaaagacccatcaaggctccatcaataaacctcatgatcatttaaaatattcctcacaccttttccaagtgcatgtgttcacttaatatgattgcttcttttgaaatccttttctaagcaatggaatttaaaaacccagacatataaatctaaacaactctccagttatattgatttctctgtcagcttatgggtgcatgttcagaacccattcagaggaaggttggaagaaatccaggcagtatcctgcaagcataaacttttgatgataatcttttcattttaaataatgtggaattttttcccctttgttcaaaaagggcactacaaagggattaggtccatcctgcttgcctttccattgatcatctttctgaacccttgtgctgtcctggtgggtttccaaactttgaagctgcctctgcgtgtctcattattgtcaccgggcatttgaaatttta

SEQ ID NO: 16058 - DNA, 2300 bp, Homo sapien
gggcaaatactaattaatggatacaattcacagctgattagctgtagtttcttcagtaattacattcgcatactaactgttcagaagaggatttctaacccagttcttatttcactctaagcttaatttgttttttgaattgtttaggcctttagtttaatagccattttatttttctttgttgttttaggtgctattagataataagtaagtttaatcttaaaaaaaatactctgtgataatgagctgtttgctttaaatggatttctaattccccaacaaaacctacatttaaataacgttgaggttgtgatatatgttgttaggcggtttggggggccaggactggtgcacggaatactcatctcgagcccaggttctcataaatatccaaaaggaacatttgcatggagacctgagattttaactctagcatcattcattcatcaaaaatttcatgatagaaaataaaatacttaaaatactttttcttgcatgtatttaacattgtagaaaaacaagggaaaatatgtgtgtgagtgtgtgtgtgcccatgtgcagccatgcacatgtttctgatatcacatgccttcagagaaaccagataaaggtctttcttaagcgccaattcatctttcagaaatccttataaagatatttacctaaatgaagctgagtgctcagtgagagcttgtcggatgactcattgtatgtgcatttcggtgtgttggctgttgtgggatactctggaaccattagagtcttttgtataaatcctgcttagttcttggatccctgacatgataaagtgtagcatgtcaatcctgcttctgggtgtaagtccttcagagtcagagattgagagccccccagaaataagtgttagtttattgaggaagaggattatatgagtcttccatatctatgtatctctctccatattctatttattctcaatatttatctgtgtatttatctatgtacctacccatttatctccatccatccatctctcactctccttgggaaaattctatctttaaataattactagctttatttatattagagaatagatatacacatttcaccctttggagatcaaacctatgttttatttgatgcattcaaggaaggaaataatacactttataaaaaggacattcttttaccagttaaaaatcatgaaaataatatagctctagattattatactcacagagcctttccatattaccagactgataatggaatgtttaaagcaacaaaatgtgccgatttagaccatttgaacctgaaaatacatttctgccaaaatccaagttttacgttttgataacaggtccctagaggtaaagagcttaagtctgaaatgctgatacggtcttatttgtgatgatatgaatggcccattgtgttagcgaatgaaataaaaattgatgtgttcatgagatcccgcttatttttaaacctctttgcacttaatgttacattgagagattaaatatcactgttttcagcaactctgatggatatagatatcgctttaagctctgtttggagattttaaaaatattctttagtcttacaatttatattcatgccacaccccattcactagaaaatagaatttgagtcctgggaattgaattttattccctttaattcatattttaacctacccacacttgtgacatctgttcttgaaaactaagctataaaatccttacatgcttttaaaatgtgtcaaggtgattttcttggaaactcttttccctctcacctctcacaaatgccaggtcaataagcaacacacactggtgaccagttggcttaatgtttgtaatcctttcccttcacagttagtcttgatgagaaacaaaactattttatagaattattgagttagcttaactctgtgctttattttctgagggaaccagctgacagtatagccttgaaacctttgtcatgttttgcatttgggctgataaaactctcttttatttagcaacaccagcattctttccaaatcacagccagaatgctttattatgccgcatattaacgtaaaacaatctgttttctttcagtttggaaataataataactatatgaatatggctgaggcgaacaatgcgttcttcgctgccagtgaggtaggtgactgtcttaatgtgtttgttcctgttttttgtgttattgagataatttaataggcttgaagggaaaaacaaagtatcaaatttatctctctcttatgtggcacaaggtaactactttggaggagaaaagagaaa

SEQ ID NO: 16059 - DNA, 2300 bp, Homo sapien
gataatgagcacgagggagcttaaaagaagcatagagcaaaatgaaaatataattaactcaatgactgtaaaatgccaagagaggtaaagataaggaaactaatgctgattacatatttaccatgtgcttgaggctttgctagatgcttcatgtgcaatactcaaactgtcatgaaaagccatttttcctggagagaaaactgggaccaagaatgccaggtcactttttcaagactgtgcagccagtaagcaatgaggttggctttccaaccagatctgggtgacttttaaggccaatatgcccactgcttcaggctgtccaaaatgactgaacattgtgtatcattgtggagggtcgttcagcctctacctaaatgcttccatatgggcgtggcccgatttctttgggatccttaccctggagacagataggatagacctaaggtcagaatatctctctattggtaaagttagatcttttgtccttcctccatccagctggaagtgcgctctagacgtcatgggcttgctggcaatttggggaatgtcttaaaaaatccctttcttggctgggtgtggtagctcatgcctgtaatcccagcactttgggaggcccaggagggcagatcacctgaggtcaggagtttgagaacagcctgaccaacatggcgaaaccccatctctacaaaaatacaaaattagccaggtgtagtggcacgtgcctataatccagctacttgggaggctgaggcaggagactcccttgaacgtgggaggcggaggttgcagtgagctgagatcgtgccattgcactccagcctaggcaataagaacaaaactctgtctcaaaaaaataaaaaaatcccttctcctttcagacaactcaagttgccccaagtcctggtggtaggccaacacccttacaattccagaaatgcctccttatcagctgaaagctccagcccattgacaactgctttctgaattgtgaggacgctccctatcctgtaggtaatacaataacagggtagaggctgcagcaagagagatgaagcctgaagcagtttggtagcagctaacaccccaaataccctgagcttcatctgtactcattctccccagcgctgtggatggctcctgtggactccagtttatctcagcctcaaagctaatagagttaaaccagctgctcaatttaaagaggaactgaagcagtgagatgttactgtattctgagatggggctaataaactttaatagatttcagctaacaatttggtataaattagacattgcactgctgctgaggtaataacttttggcactaaataacagaaaatcaagctctgtgatgtgcttcaaaaacaccttcatcgagcttccgagattcaggcagatttcactattgattactgctcactcttccccaagctttaagaaaacagcaaactgctccaaaatataccccctcaaaggggcccagactttttctctcacctgctcagtaactcatttacgttaaagagcccttgggcttgaaatgggtacaaggtggctggaagacttctaaggatgagtcaggagccaagatattagacaatccccttaagagcactcaaacacttgttcatgtttttctggaatcttccaaaatgttcaccagctgaacgaagtcatttccattagagtctgtttaacaatggttccaatgtgagctctgtgatgagcatgggttaggcactagagtcaatggagtatgtgacaagaggcctgacctggctttaggagaacgtgctcaggtcttggctatggcattaatgatctgcatgaccttaggcaagtgatttaacttccctgaaccagagttcccacactcacttgccttaaaaggatgtgaggtgggaggaagtttgagaatccctgagaaagtgcgttgtaggctgggaagtgctatccaaacatatgttgtgagattcaataggttgtgggacgtttgggtggtctagggtatactagggttctaaagctctgtgacatcatcatgagtctcagaaatggccagaatgttccttgctgcagatgcattggccccatctgcaggtcctctttgacacctaccttactctctccctccactcacactctgagaactgtgctcaggggcagcgctacaacttccacattggtctttacagggcttgagtgattatttcaagaacagaacgctgtgtggaaacctttaccatatttcgttgtatctaagacacattttttttttttgaaatttaacatctctaagg

SEQ ID NO: 16060 - DNA, 2300 bp, Homo sapien
ctcctcctccccctgctcctgcttctcctcctcttcctcctgctccttctcctcctcctcctgctcctcctcctgctcttcctcctcctcctgctcttcctcctcctcctcctgcttctcctcctcttcttcctcctgctctttctcctcctcttcctgctcctcctctccttctgctcctcctgcttctcctcctcctgctcctcctcctccacctgctcctcctccttctcctcctcctgctcctcctccttctgctccttcttctcctgctcctcttcctcctgctcctgcttctcctcctttctcctgctcctcctcctcctgctcctcctcctgctcctcatcctccttctcctcctgctcctccttgtcctcctctgcccttgatattcactttgaccagattacaccagtacagagagtccaaaggttaaataggcacacactcacacacaaactcacactgggctagaacaatgacagagcgtcctgggggagcagagtgggggccggggggagggggaaaggaggattgcaggcctaactttcacaaatcacctgaaatttccactgaaggcattatctccaaatgttgccacagagataaactgccaggattacaagaaaacgtgaagacgttcccatagaactctgtaatgcttatatccatcaccaggaatgtctgcccttggcgccctaaacatagattgattgattgattgattgattgattttgaggcagagtctcactctgtcacccaggctggagtgcagtggtgcgatctcagctcactgcaacctcctccttccgggttcaagggattctcccacctcagccttggagtagttgggattacaggctcctgccaccacgcccggctaatttttgtattttttgtagagactgggttttgccatgttggctaggctggtctcaaactcctgacctcaagcgatcctcttgcctcagccttccaaagtgctgggattacaggcgtgagctacggtgcctggccctaaatatagatatttttaataaatcctctacttatctcacaacgagctcaatcgctttgcattagatcgttgggtgtgttaaaagtattcatgtgttacattaaatgtgaattcaacaaaagcagagatttttgtgttttgttcttcattgtatcccttgattgtagaaaagtggcacatagtaggtgctcagttaatcgttgttaaatgaagacataaatgaaatataaaccattaaatgtccaccatatttgtaagcgttttggcatgtcttcattgaaagaataccaggcagctgggagccatagtttactccggtaatcccagtgctttgggaggctgcaggtgagaggatcgcttgagaccaggagttcaagagccaccagggcaacatagagagaccttgtctctacaaaaacaaaacaaaacaaaacaaaaaacaaaaaacacaattcccttaagccgccccttccccttccactgctcagagaaggccttccagcagagcagagcacgaggtcgctggcacacacccatcctccaccagtcctggcctctgtagagcaagccagcagagcaggctgtttctctcattcagggacggtttagggggtggcaggaaaaaatggttgctgataggcgaagggcctccctgggttggagagaaccccagcctcggatggtcccagcacatttaaaagagaagcagtgccaaaggtggggtgcactgaaagctgctggatgaagggaaagatccttgtgctcagcccggaaaaccggaggatggataccaggccgaggggtccctccgtgccccaagagaaagttcaccaagtttagatcccagtgccccgcagcgggtgaaggtggtcccgccccaggccggatctggccacagggctggcggcgcgctggaaaaccgcccacgtgggaagaagccctggctgcatttccgccctggactgcgctcccgcctgccagcgcggtccctgcgcagccgccccgcgcccactaggtggcgcctgcgctctagtgggcgcttcacaggcgcagcgacagcgacagcgacagctcgaacctgagtcccaggattccggggactggagggcagcgccggcagccaaggtaggattcctgagccccgggcgtctccctggagcctctgaggtcggggtggacagcggggcggccgctgggcaccgcttgcggtctgcagagataaccggaggagtcggggcggcagcacgtgttgtagccgtgggggggacccagagacccgc

SEQ ID NO: 16061 - DNA, 2300 bp, Homo sapien
agttcaacatgagttttagaggagacaaatattcaacccacagcacctacccataaccagagatagggtcacatgccatggtacttttactttttatctcttatcaagtatatttaaatacacttacattttgattataaacatggcttaaagaatttaactcaatttataattggttataatttctcagcaatcatgcagacttgagaactctcgctgtgagagatatctaactcacagattattctgaaatgccaattcctcctttatcaacaattcctctaacctcgctctcccttccttccttccttccttccttccttccttccttccttccttccttccttctttctctttctttcacagtcttgctctgtcacccaggctggagtgcctgggtgacgatcatagctcactgcagcctcaaactcctaggctcaagcaatcagcccccatcagcctcccaaagcactgggattacaggcatgagccaccgtacctggtctgttgtgtctattattgacccacaagggcagagatatttgtatgcttagttttgtctgtatctttagtgaatttagcacttaatgtgtccctagtacctgtaactgtgtgtggcacagagaggtaactcaacaaatatttattgaatgaagaaataaatgcatgcttgcaggaatggatgaataagtgaatgaatcaatgaatactaaattgaatagttaatgaaaattgacgatattattttgattttgtggtttttaaaaattttggaaccaggctgggtgcggtggctcacactgtaatcccagcactttgggaggccgagatgggtggatgaccttaggtcaggagttcgagcccagcctggccaaaatggtgaaaccctgtctctactaaaaatacaaaaattagccaggtgtggtggcaggtgcctgtaatcccagctactcaggaggttgaggcaggagaatcacttgaacccaggaggtggaggttgcagtgagccgagatcgtgccattgcactccagcctgggggacaagagcgagacttcgtctcaaaaaaaaaattggaaccaactgttttttcaggtttcagacatttctgtaaaccagtagaaaagctgggaggcagacaggcgtggtggcttacgcctgtaatcccagcactttgggaggccgaggcgggtggatcacctgaggtcaggagttcaagaccagcctggccaacatggtgaaacctcgtctctactaaaaatacaaaaataagctgggcatggtgttgggcatctgtaatcccagctatttgggaggctgaggcaggagaattgcttgaacccaggaggtggaggttgcagtgagctgatatggctctgccccactccagcctgggcaacagagtgagactccgtctcaaaaaaaaaaaaaaaaagaaagaaagaaaagctgggaggcctgagattttgtgtctattatacctaagggatgaaagagtcctgacctggagacccgaaacaatgtttggctgcttttttctttgtctcttgtaaaccaacatcagcaatgagcaggccacctcaagtgtgactcaatcaacgcgaggcaggaggcatgcaaaacaaaacagaaaactcctggcagccttaatatagcgatttttctagcaatctacatgactatccaggcccaatgcaccccattacatatgcaaaacatctgacgtttgtgtaacaagcccttaacccctggctgttattcttatttccaaactggggtgcatcattagataaatgcagaaatcaagaaccgtcgctcctagtcaagcgtctgtggctcagttctcagagccaggccaaaggagtaattatagctttcctctatagtgtacggggcaggaggctgatttaataaaggaagcctactgtctgtctccagcctggctctgactcatggaacgagggagtcccagagcactacccacagagggtgggtggtgagcagctgagggtgggaggtgagggtggccgctagcaaggcctgggcccagagccctgagaatgaggaaactccctgcttggccaggaggaacctgcagctggagccagaggaagtgaggctcagacagagcagctgctgttccagcaacagcagcaactgccgcacccttgaaaggaggcccctgccgtgtggacccgtaaaataaaatgggttagtaattttcatattcagaattgattgggggaaacgatcgaattgcttctaatggggatggccacctttgtgtgctgtaccagggtct

SEQ ID NO: 16062 - DNA, 2300 bp, Homo sapien
cactgcaccttgccaatttccagatttatttatgatatgattgaggaaagctgatcagaaatacttcagcttgtaggtaggaaacacagttattctggcatgtgagtatctgtatgctagctggtaaggtgcccaggaaaggggagatcagatcaaataatgaatatacaactgaatggaaagagtataagtccttacctgctttaatccttactggatacagagttaatcagttcttgttaccttttaaagggctagccctaaataattaagggacaatattgaattcatattaatttaatattaacaccctttcaattgatatttattactcaaaagtatctgggcttcctaattttttgataaaaagtaagaattctagatatcctaaatttaaattttcaaattttactaatgttttactaatatttcctgagctgtgacattctaaagctgactgttcctcaaaccaaacatcacttactattattactgattataaaaacatcttgcttttgtatggaaaacaatttaatatgcaatgtatcacttaatcattgtatcaagtatgtaggataggcagagggttttgttgattctttagtttttatatttcttcaggtccctaatattaaggagctttgtggatgatactatgcatcttctagagaagcagtcctcaacctttttggcaccagggaccggtttcgtggatggggtagggaaatggggtgtggtggatggagggagatgatttcaggatgaaactgttccacctcaggcattaattagattcttataagggagcacagcctagatcacttacatatgcagttcacgatagggttcgggctgctatgagaatctaatactgccgctgatgtgacaggaggcggagctcaggcagtaatgctggctgacctgctgctcatctcctgccgtgcagcctggtttctaacaggccacgcacccattccatctgcagcctggggtttcgggacccctgttctagagttgtcatttgtgacagagtcagtaaaaatcatttcagtaaattttgaagttttaaattttgattgattaaaatgatcttgatagcttaccctgtctcaaaaaaattttttttcctgagtcatttaaaaatatgtctactctagagttcttatttattttaaaatttttccagcgcttaatttttacttatattactagcttattttaacattgttataagtttcaaagttgtattagataaaatattttctttgagaagacacagacttccactgtaacttaaatcatccaaagtaacttcacctacttaattttttctcagaaagatctaccttgcaaatacttgccaagtaaaattagttggtaattagattgaataaaatcagttttgttttttttttgagacagtgtctcactctgttgcccaggctggagtgcagtggcacaattatggctcactgcagcctcaacctctcaggctcaagcagtcctcccacctcagcctcccaggtagctgagactacaggtacacaccaccatggccgagtagttttgaaattttttctgagatgggtgtcactcttgttgcccaggctggtctcaaacgatcctccttatctaaaagatacaacagaaaattagaagtttcaaaataattttacttatataatttttattcttaaagtagctttattgagatataattcagataccatacaattcattcatctaaagtgtatatttagtggcttttagcatactcagagttgtttatccattaccataaccaattttagagcattttcgttacccccaaaagaaatcccataacctgtagctatcactcaccaatcaccagtcctttctacccacccaccatgccaccagctctaggtgacccactaatctattttctctctatatatacttgcctacttttgacattttatataaatcgagtcatataatatgtggtattttgtgactgacctctttcacttagcataatgttttcagagttcatttttgttgtagcatgtatcagtacttaatttctctttattgtttttgttcctttttttctaggattttgacacttcatgacatgtcattatttagagcaataatgaatattgacctgttttggattagttgatgaccttcggaaatgatccaataatatctactatagagaagctgaatatactccatttggagtgaacagcccggattgttacagaattttcaagatgacagatccaatgatggacttttttgatgatgcc

SEQ ID NO: 16063 - DNA, 2300 bp, Homo sapien
tatttcttttacttttttttttaaattaagacagagtttcactcttgttgcccaggctggagtgcaatggcattatctctgctcaccacaacctccgcctcccaggttcaagcagttctcctgcctcagcctcctaagtagctgggattacaggcatgcaccaccaggcccagttaattttgtatttttagtagaggcgatttttcctccatgttggtcaggctggtctcgaactcccgacctcaggtgatccgcccacctcggcctcccaaagtgctgggattataggcatgagccaccacacctggccttcttttaccttttcttggtcgagaaaccaagtgctggctcttcctgctcctcagccatgcctcacctctgtctagttgatttctacacttttgaaagggcaccgggaaaaaaaaaaaaaaaccatcctagccttattatttggtatctctgcaattttgagaatgttactactttcctttgtcctcaaattaaactctgtaaattatgatagttgaaccaaacatgattaaaatataatggttaagagtgtggtctccctaacaagacccccttgtcttttaatccctgctccactattcagtagctgtgtgatcttgggcaagtcatttctctatcccccagtatcctcatataaaatgggaataacagtagtacctatcttacagggttgttctgaagattgagtcaatatataggaaatattaggaatagtgcctggtacatagtaagcactacattttagctcttattgtcataatgatttttgtaattgtttgctctctcagttccattctgtctctttgtaatgctactatcagagtatttctctcattagccagccccttgtctccattatcactgttattaccctattattaatcaggattacattagttattaaatgtaaaatagaataatccctggcacttagtaagtagtctgtaagtgttatctcattattgttattattttcacattgatgacatctcaagtcagatcctttcctcgtccttacttgtcctctgcctttaatctctcatgccatccagatgggtctttctagagccctgtttagatagtgttgtttctgttttgaggcctttggtacctaaaaggggcagaggggagaacccaatgttgttttatagtgatatcagatgactaaccaggaccaactgaaaaaatggcattgatgaaagaggtaaacttgaattttaaagcagtgaaattttgttttagtgatttaagggcattgcttactaaaatagaatcaatttttatagaaagaaaagttgtactgatgttcaaattcaagttgacttgctatggaactaaacctacagttttacctgaaaaactcatcagtgcagttaaaatagaaggttaggaggaaaggtcagaaaggttttttatgttacgaaaaaaatgtattcatccatgttaagacgatgaaacaattttaacattgttagtaatctttataaacagttctcatttgttcatttcaaaattttaagcttctttttataattcaaatgaaaatagcttcatttctgtattttcaaaataacactgttagctttttgttagaaaaattataagaaaccttatctaacttcttaaacttattttgggttcatttgcatgacctctttaaccctttgctaatcttcagctatttcatattttaaatattttagagtatcttggagaaaagtatttttttccaataaaaattgctttagattttgtttttttaaaatattgatagccacataatgccattttaccacagtttagttctcaggtgatttttttttttaatcagatttttatgtatattttttaaaactttactgcaggaaatggcagagtgagagttaatgtgttacatggagggaagaacagtccattgggggttaaattgcagagtctaatggaataataactggtagcaccatctgctggcctacttccgcagaaggagtcagtatttttaacgacatctctaatattcatgctgatgcattttgatgctttgtgcattcatttctttctgtgctttgttggaatctggctatctgcttacagctattgaggaaactcagctttttaggagtgtttacagcctttttcatacctaaataggatgaacagtagatataaacttgccaaggcagaaatgtgttgataaatcaaaatgtgtatttgtggagggttgtgcatctcttggttgcagcttgctaaataggccatttaggaatctt

SEQ ID NO: 16064 - DNA, 2300 bp, Homo sapien
agtgatttttccccagttagcaactcatgagttacctgacctttatccaaaattaaaattaaaaactttaaggtcaaatcatctcattgtgtgcgtctgacataaaaacctaaagatcaggaaaaaaaaaacttttttttttaaagagatggagtctcactatattgcccaggctggcttcagactcctaggcttaagagatctgtatcaacctccagaatagctgggactgtaagtagattagaaatgtattttataaggacaataaaatctgaaaagttcaacaatacaatgaatgctgtctataaattataaaagcatattttataaagattcctgcattttgatgttaataatgaacattttctggaaaataaaaaaaatttaatttttttttttttgagacggagtctcgctctgtcgccaggctggagtatggtggcacgatctcggctcacagcaacctccacctcctggcttcaagtgattctcctgcctcagcctcctgagtagctgggactacaggtgcgtgccaccacaccaagctaatttttttgtatttttagtagagatgaggtttcaccatgttggccaggatggtctcgatctcttcacctcgtgatatgaccgccttggcctcccaaagtgctgggaatacagatgtgagccaccacacctggccaaatcattcaattttaacatgaaaggttttcaaatgggcccttttccactttttaatgattcttgagttatgcaggtataaataataaaaattatcataaaaatgtggataaaatgaaaatcataattttaatttattaaatatattaatttatatgtaaatcaacatctttcttttatttttctaactcaaatacttactaattcttgtattttacaaaaaattcttctgtatcaatcatcactccaggtgatatctaagaaaagaaaatcagtaatggtgactcttttaaacaggccacagaatatgaagtgtaaaatgtaatgtaccagtacttacttccttttttacggttctagaagatagaattttgtctacaattgcagcatcttcttcactcggattctcctatgggagggaggaaagaaataatgacagaacacattctgaaagatcttttagttgccactttgtatgttgatgaacatactacaattcaacaaatatttatacagcatatatgctagacactatgttacgtgttagaaatacaaaaatgaaaaaaatatatcattgtcattgtccttttcatcacctgcattatctctgtagcaaacatattgtgctttttaatgtgctggtcattattctaagcattttacatatattaatttaatctattatcttcattattatcatttccattttacagattaggaaatttaggcatagttaaataagtacttgcccaaggtactcagctagtggctgagtggttgggtcataatgcatataagggggacttaaaaaatcatagacgagggaagcacatatggcattcaggcaaacgtgttcataaaacagaggactaagtgcttatggagaagtagcagaagatgacgccagaaaatccagacaaaggggtttatacactgctaaaaaggtatcgttatttttgtaaggtttaggaaactattagaggagttttcagtagaaaaataatatgattaaacttgtaatttagaaatattctgcagaaaagatagtttgaagaatttcaagaacatatatttaggaggtagaaagtgtagtgacaacctgaatgaagaggcaaaggaaaatgaagagagaatgaatccctaggtttctaatttgaatgactcaattaactaataatatggaatccggaaggataagttagagcaatttttagtaggaaaaacaatgcaagtatttatagaatttatgtcggtttaaaatgttttgcagtcataatcccaaatatgcttaccacaaacaattgtaaaggctgttcaccaggtaaaggagctgaattcttttttattttcatagaacctttaacctcttcttcagattgcttcccttctatatcttctgcgtatttttttcttttaatttgtcgatttgatcttcttttctgtaatgaaccacaagaatcagatttatataatttattttgaagaaaagtttttgaaaataattacccctagagttggcaattttgtatattaaattttcaacatgacactcaatgtactatcttttcctattttgtttttaattagaggaagattataatttgccatttgccacaggc

SEQ ID NO: 16065 - DNA, 2300 bp, Homo sapien
agtggatgccagctggctgtcctctaattcagttctacccagctctaattcaccatctacccagatatagcatcagatcccacatcttgagggttcagtcccacaagactgccccctcctttccaccagtcacaagtccaggggccttcagaacttctgactgactggcttcaagttagggttcccattacccaccactttgggtttgattaatttgctagagcagctcacagcactcaggaagacattcaagttttaccggtttattcctaaggatattttaaaggatacaaacaaacagccagaggaagagagacatagggcgaggtctgagtgcaggagcttctgtccctgtagagttggggtttgccattctcctggcatgtggatgagttcttgttcacctttctgtcagtctccacatgttcagctccctggaagtgttcagctcctggaagttcactaaaccctgtcctcttgggtttttatggagtcttcactatgtaggcatgattgattcaatcatctaatggccattggtgatcaacttgaccttctccccttccttccttcctcccctcctcccctccttcctttctgcccattccccttctcccctctaatcatgcctttgtccttctggtgaccagccccacctgaatctatcagtcaggaatattggcacacaaacaagcagcactttggggaacccaaggatatcaggagttgtatgccaggaaatgggaatgaagatcaaatacatatttcacaatatcacacctgattatcctgataattcttagaagtgtaattttgttgattagtaacagtataattttaaagcagaagacaatgggagaccttttgcttgtttctcagaaacttatttctcctactgagaccctactcatttggggccaggataatgttatttgaattctcattcaggaatcttcagaaaatttatgtcttatatatctatatataagtgaataaaattcttttacatataatgtttcacttctatgcttctagatttcttttgaaagaaatgttttgtaccatgaatatcaaaagttattttggatgctattataaaatggttattgttttttaaaaatatattcatgattgttgccacaatgtttgcacattgatcttgtattatgcaacctcgctaaaattactgcttagtttagctttcatggcagattccacaggattttctacatagacaaatcatgtcttctataatataaataaagacagtttgttattctttttctttttcttgtttgattatacttgttagtgcctgcagtacaatgttgaatagaagttgtcacagaggacatccttgccttattcctgatcttagggggaaagcagtcagtctttcacctttaaatgttatgctagttttggctttttcatagttgtactataacagtttaaggaagttcccttctattcaaaatttgatgagttttaattaggagtggatgttaaatttctcaaatactttttctgcatctactgagagtaccatgttatttttggtttttttatgttttatgtttttttaaatagagattgtgtctccctgtgttgcccaggctggtcttgaactcctaatctcaagcgatcctccccacttggcctccaaaagtgctgggattttaggcatgagccaccacactcagctgatttttattttttaatctgttgatcagcactgattaattctctactttaaacccaccttccattcctggttaaaaaaaaaaacaaaacctacttggtcatgatcttattgcccttatatattgttaagttccatttggtaaaattgcattatgaatatttgcatctttgttcgtgagggacattggtctgtagttttctggtgatgtctttgtctgattttggtatcagggcttcatagaatgagtcaggaaatataccttcctcttcagttttctggaagagttgtatagaattaatttgacctttaaatgttaggtaaaagttaatcataacactgtacactgttatgcctcttagggttatttttaaaccaatgctttttgccttcagtatgatatatggaagatttaaacaccattcattctttgtttttccacaaaggaccgtcctccttctaatatttggaagaaaatagatcaatccagggactataaaaatggcaatcaactcagggaatatcaactggaaggactcaactggctcttgttcaattggtacaataggtatgtagtatatcttaataaaaaaaattt

SEQ ID NO: 16066 - DNA, 2300 bp, Homo sapien
tctgcccccttcactctctgtatatgactgcttcatagagaaacccggggatggtaggtaaactcatccaagttcttgcttgccttcatatccaagcctacagatgtgttaatatcttcatccacagttattcttaccactgccctcatgtatcagacatgccatctcatctagtcttcttagagccttagagccttacttcaatcacttatccttctcttttatatctccaggccatccctgaagactattgccatcccttcagtctatgaacaaatttgagtttaaaataaaccttctcttggctctgcttctctctctctctctttctctttctctctgtctccccattcccccccaccaccaccaccaccactgcccccaccccaactcccctgcattctctgaaacttttaactttccaaatccatgaaatatttttcagccctaatttgctctctgcttcattggttagtagttggtactccttccttctttaaacattcccctcactctgaactccaacagtttccacagtgtgactctctcctagctctgcagtacctgtgactattcctttcaatagtctgctggttcttcctctgcctgccctgtagatattgtgtttgcctgccttgggttctgtctttagctctcttttcatattacatttgttctccctaagccatattctatactccccgtgccttcacggggagtcccatacttttaaatctaaggtcttgaactctgggcccatatttttatttgcctcttgctacctgagtgtctatctcaatgattctttaaacacaacagattaaaaattaatattatttcctgtttcttccccatcaaaattgttcttcctctgtattttccatcttggttaataacaacacaattcatttagtcacccaaactgaaatctggcttcaccctacaccccatactttggtaactaggtccattttattctaacccataattaattctggaaagttctctcctcttagtttctcctctcttagaccaggtgcccacactttcttccctgcacttaatggtactttctcagttactgtcccaacttctagtcacctcaacctctaatatccacaatagcaccagagtaaactttaaaatacaaacctaatcttattggatttgtttgaagagttccagtaatttccattgcataatagaatggcaaatgtcttctatttatgaccctacttacctcaataatctctcttccttttaccctcccctccaaaccatagaacaacttttggtccttcagttcatcatgttctttacacttctgctcattcactgtgctctctggcaaaaatgctactcattactgacctcctttctgaaagaggtcttctctcatctcttctagccagagttgaggcttactcttttgagcctccataataaaccatactgatgattcttaattggccacatatcataatcatctgtgaagcttatttttgaaattatagctgattttatcctattccatactcattgaatcagaatgtataggggaggggcctgagtatcttttttttcaagctttgtaagctcttctgatgtgcagccacaattgaaaaccagtgctttatctgtgcttcagtgatagcacattgcatgactatttatttatttgcatgtcagcttctgtaatagatacacacccctgaaaggcagagaacatgttttatttcttttgtatcccatcttctcatactgtcctgagatacagaaggtatttattaaatgattcctgaacaaataatatattgagttggccttgcccttcccttttcttttttaaaaaatcagacatctaatgggtggtatccttattttggagctatagaaatctttgtgcctttgcaggtttataataaaattgtaatcttaagcctaccctgcacttaagcaacttttacatttttataaatgcaactattttatttgatctttgattatttttgtatatttatctttaaagtatagaaaaaaaacccaatgtatgcatggataatgtatttgtttatttcagacgaaactgcatcttagcagatgaaatgggtcttggcaaaactattcaatcaattacattcctctatgaaatccttctgactggtataagaggacctttcctgattattgctccactttctactattgcaaactgggagagagaatttcgtacgtggactgatattaacgttgtggtttatcatgggagcctgattagcagacaaatgatacagcaatac

SEQ ID NO: 16067 - DNA, 2300 bp, Homo sapien
ctggcgctgacggaccctggagcggtgtctgacagaggtcggcaaagccaccggctggccccagtgcatcctcacatatgcgcgcagatccctggctccggtgctactggggtcgcacctggacgcgggttgcagacccctggcaaattgtggagctgggggaaggtaaggggaaatgtaaatcgcttttccccacatttcagagattatactttcctaggctatcacaattttcaaaattgttaaaatttttacagtatggctctctcagttgaatgttattgaaatccaccaaataacctcagttattaacgcctagaagctcccctggaggcttattactgccgccatacccctacacacaaactgttttggtttctccttccgcctatgtactcctaaagcactcagtatttacctgtcatcatactttattgaaagtacaaactcgtcacttgtctgtccaccccaactaagcttcttgagaattagaactttcctgtctcttcccagcacaaaagttttatgggtattctgttgaagaacttcaaatatgatctataaaattatgactcatttatatttcaaactccaacctctcccttgagttcctggctcacagcgactacagactgagcttagttggaattcagtagcacacaactgggatatccgcactgtacggcttttaacaatttttaaaattttggtactctcagcatcgcaaattcactgtgtccaaaatagagtagaatgttgttctacccacctatactctgccatccgctgaagtcctttccccatgctccagcactcaagccttgcctgtcacagtaaatggcagttctgtctttcctgttgctcacacataaaactaggctgctattttgatgtcttcatttttctctattctgtatctaattccttagcaatcctgtcagttctacctccagactgtactcagcatattcactgctctaactccagcttaaatcaccatcatcctttgcctggaatgctgcatcaaccttctaatcactctactttcctcctcctccttcctccctttcttcttccttcttgtaaatcatcatttcatccttctgcttaaaatcttctcatgttttcttattacacttaaaatggcaaactcttacccttgagccctgtagaatttggctcccatcagtttctccaatttcaccttctgcctccttcacactctagctgtgctcacttttttattcctcaggcctaccaagctcaattgcatcttagagaatttgttcttgctgtttcttctgcctggaatacatgtttcccaatctttataagactatccttatctgtaggtttcatctgagatgtcacatccaaaagaggttttccttgaccactgtagccaaagcaaatgttgatcactgaaggaataagggaatgaatgaatggagtggtgtataatatagcagagttgataatttaaggctaattcactatgtatctccaagcaaacagatttgtaatgcttttcctgcctaaaatctatacagctgattcacaaatacttgattgacaggttttatatatcactgtggctcatcagcttgtatgttgttggggccagaatctatacttacacttcattcaaatttgattttacagaagagttggggtttttatttttcttttaattaagagagctgtgaaattattacctataattctaaatctcatttaattcctcccaataggattcaagatggattgtcatcaaagttcacttctttaacaaaagtggtttatgactttaataaaatattagagaatggaaggatctgtggaagccctttacaaaaacttgtgatagaaagttttgatgatgagcagactttgcaacaactggaattgcaaaatgaaccaattttacaatgcttccaaaatgcagttagtgaaacaaagatgaagacatcagtcttctcccagagagtgaagaacaggagtgtgaagaggatggttcagagacagagactggtggccaggaggacctagaagatttacaggaggaagaggaagtgtcagatatgggtggtgacaatcctgaagtgggcaagaaagctagaaactcaagcaaatttgagctgaggaaaagcccagttttcagtgatgaggattctgaccttgactttgatatcagcaaattggaacagcagagcaaggtgcaaaacacaggacatggaaaaccaagagaaaagtccataatagacgagaaattcttccaactctctgaaatggaggcttat

SEQ ID NO: 16068 - DNA, 2300 bp, Homo sapien
cttggcctcccaaagtgtagggattacaggcgtgagccaccgcgccttgccaaattatttattattatttttttgagacagggtctctgttgcccaagctgtagtggcatggtcacagttcactgcagactccccaggcttaggcgttcctcccacctcagtctcccaagtagctaggattacaggcgtgtaccaccactctgggttaatttttctattttttgtagagacagggtttcactatgtcgcccaggctggtctcgaactcctgtactcaagcagtcctcccaccttgacctcccaaagtgctggatttacaggtgtgatccacaacgtccagcctatatacttaagatacttctaaaccatttgtgttcaacttctgttcttgccccatagtcaccttgagactcatcacttagccaactccaaaagcattgctgattactgtgaattttactaaggttttcttaagagggttccattgtctcaaaattgttcctgaaatatcctgttacctgtctacctgattttctcctatcttcagagttccatttcctgtcctcccgcctgtcattataccttccataagcccctacttttgtcccagcacttttccctctgtcagtttacatatcccaccaagcaaaacaaaaatagcaaaacagtaatgccttctgaatcctcaaattgctcaatcctcagattgctcctcaatctggaaaatgttttatatcaagcccatttataaatcaaggattggcaatttaaaaaattaaaataaagaaaggagaattggaaataaaatgaattggctgggcacggtggctcacgcctgtaatcccagaactttgggaggccgaggtgggtggatcacttgaggtcaggagttcgagaccagcctggccaacatggtgaaaccctgcctgtactgaaaatacaaaaattagctgggtgcggtggcgcacacctgtaatcccagatactcaggaggctgaggcaggagaatcgcttgaacccaggaggcggaggttgcagtgagccgagatcgtgccactacactccagcctgggcaacagagccagactctgtctcaaaaaaaaaaaaaaagtttaattcacgcagagccagctgaacggcagacaggagtttggttattcaaatcagcctaccagaaaattcggagactggggtttttaaagaatgacttggcgggtagggggccagggattggcgaatgctaatttgtcaggtgggaggtgaaatcacagggggttgaagtgggctcttgctgtcttctgttactgagtggaattgcagaacttgttgagccagattatggtctgagtggcgccagctagtgcatcggaatgcgcggtctgaaaagtatctccagcaccaatcttaggttttacaatagtgatgttatccctgagagcaattggggaggtcaggaatcttatagcctctggctgcaagcctcctaaatcataatttctaatcttgtggctaatttgttagttctacaaaggcagactgatccccaggcaagaatggggtttgtttttggaaaggactgttacaatctttgtttcaaagtgaaattagaaattaaattcctcctgtagttagttaggtcttcgcccaggaatgaacaagggcagctcggaagtgagaagcgtggagtcatttaggtcagatcccttgcactgtcataactttctcactgttaggatttttgcaaaggcagtttcgtgaacgtacagagacaggcccttgctattatccctattttttagataaggatatccaggcgatgaggaagttttacttctgggaacagcctggatacgaaaccttcacacgtcagtgtcttttggacattttctcgtcagtacagccctgttgaatgttctcacggtggggaggtacgtgtttaaaatgcggggaaggtgcttttatttcacccctggtgaaactaggggagctaatttttttaaacatgatttttggcccccttgaaccgccggcctggactacgtttcccagcagcccgtgctcaagactacgggtgcctgcaggcggtcagcgtcgtttgcggcggcgcaggcgcggtgcgggcggcggacgggcgggcgcttcgccgtttgaatggctgcgggcccgggccctcacctcacctgaggtccggccgcccaggggtgcgctatgccgtcgggaggtgaccagtcgccaccgcccccgcctccccctccggcggcggcagcctcggatgaggaggaggaggacgacggcgaggc

SEQ ID NO: 16069 - DNA, 2300 bp, Homo sapien
aaatgttgacaagaaaagtaaagggaaaggagttaaaattatttggctagaataaataatgtttgcttctctttaaatataaaagttttcccagactgtgaaggatgtttacattaagtgtaaccttttaaaaataaaatgggggaatgacaaaccaggaggaaaaaaaatttaaaaaaactagaactatttacattttaatatagatggcaccactgatacagaagcatctggtctagctcacttacagttttggggaattgactatttaaaatgaagcattctgagccaggcgggttggctcacgcctgtaatcccagcactttaggaggctgaggcaggcgaatcacctgagttcaggagttcaagaccagcctggccaacgtggcaaaaccccgtctctactaaaaatacaaaaattagctgtgcgtggtggtgcatgcctataatcccagctactcgggaggctgagtcagtagaatcccttgaaccgagaggcagaagttgtgagccaagatcgtaccattgcattcgagcctgggcgacaagaatgaaactccatctcataaataaataagtaaacaaataaaaggaggtattctggctgagtgcctgtaatcccagcactttgggaggccaaggcgggtggatcactctaggtcgggagttcgagaccagcctggccaacgtggcgaaaccccgtctctactaaaaataaaaaaattagcggggtgtggtggtgggtgcctgtaatcccagctacttgggagggagaggtggaagaatcacttgaacctcagagttggaggttgcagtgagccgagatcacgccactgcactccagcctgggcgatagagcgagactccattttaataaataaataaataaataaataaataaaatgacatattctcctagcactttgggaggccgaggcaggtggattgcttgaggtcaggagttcaagactagcctggccaatgtgccaaaaccccatctccactaaaaatacaaaaattaggcaggtatggtggtgtgtgcctgttgtcccagctacttgagaggctgaggcaggtgaatcacttgaacccaggagtcggaggtttcagtgagctgcgatcgcgccactgcactccagcctaggtgacagagtgagacttcgtctccaaataaataaataaaaaatgaagtattctaaagtttgaatagaagctttgtactgagtctgagtgaggccaatgtgatcatttatgggaagatatcttctttctttggagtatctggaaaataatttcagattgcacttgttttgctatttcttaggatatatatactacctaattctaattaagagaattttaaaaggccatgtgcagtggctcacacctgatccccagcactttgggaggctgaagtggacagatcacttgagcccaggagtttgagaccagcctggacagtatggcgaaacttcatctccacaaaaaatagaaaaattagcttggagtggtggcgcacacctgtggtcccagctactggggaggctgaggtggggggatcacttgagcctgggaggttgaggctgcagtgagctgtgctcataccactgtactccagtttgggtgacagagcaagaccttgtctcaaaaaaaaaaaaaaaaaagtaaatcactttattagagattttacattttaatcactttgtatactttctgttagctctttctgttaactatagtcataatgtatagcacttactgagcatttactttggggcagggactcttaagacttcaatatgtattacttcagttaatccctctgacaaccttgtgatactcatactattgttagatagagaaaattagccgcagagaggttaagtaatttggccagggtcgcacaaccaagcgtggagttcttattgaaactgactgcgggaacccatgtgctttactgtgactatatactgcatctctcacacactatctgaaaatgtgtcactatttgtttagcacttatccacaggaaatactgttaggtattatgtaggacacaggcattttttaaaacaccaaaccccacagtctctgtcttctgagagcttacagtacagtcagcgagatgaggcaggtatgaagattccagtgcatgcaatgcagtgtgttataaaagtcccatgactaccagagggaatacagatgtaaaacttaggaggaaaagaaatcactctggatgagccagtcaggtaagtttacatggaataagtagaaatgggtcttgaaagatgggtacgagt

SEQ ID NO: 16070 - DNA, 2300 bp, Homo sapien
ccacagtttgttaggatttactcctatcagtacttcttacaaactttctatgtatattttaaattttaaaaacactctgatgcacagctcttagaagtggacacagaagaaggaagaaatgcttctcaaaaattcagacattggtgtgaatacttaaaaatagactaagccataatgggttgtgtaccactgaatcatacacttaaaaatggttgaatggtaaattttatgttatatatataaccacaattttaaaaaactagcctgtaataccagcattttgggaggccaaggcgggtggatcacctgaggtcaggagttcgagaccagcctggccaacatggtgagacctcatctctactaaaaatacaaaaattagccatgccttgtggcatatgcctctaatcccagttacttgggaggctgaggcacaagaatcacttaaacccaggaggcagaggttgtagtgagccgagatcaggctactgcactccagcctgggtgatagagtaagactctgtctcaaaaaataaaaaaaatagtaacaatttgccccaaaccattgaattgtataatttaagtagatgaaatttatggtatataaactgttttaaaaaaataaattatgcttaactgaatccaaatcatgcatgtccaccttgcttaagaacattattgagttttaataattttttatatgtggaaaaagacagagatcaaaattgataaaaccggtggcggaatgctcctagatgacatactaccaatcaggtccccttatcaagtagtggctctgtagtaaaatcacatcttacatgagtggtaggtagaaagtggatatgatagaaaatattatagaaaaatataatatagaaaaatagggtaattccttaaattgcccctaaatcatgaaggttctttagtagtggaagacagagtcaggtctgatttgggaaagggggcgtggagaaaggaacactgcaagacaaaaaattccgttttaaaattttgctctcagtagtgttcactgaacacgaatgaaagttcactaatgaatataggtaagatatgacttctgtaattcttgtttgctttttgaattatgaagtatttcaaacactgtagttattttttaacataagagcttggacggaagtcagatctgagtctccttgagttaaatgctttgtttgatttgttttgaccctaggcataacatctccaaccacattatacgataggtacagctccccaccagccagcactaccagaaggcggctatttgttgagaatgatagcccctctgatggagggacgcctgggcgcatgcccccacagcccctagtcaatgctgtccctgtgcagaatgtatctggggagactgtttctgtcacaccagttcctggacagactttggtcaccatggcaaccgccactgtcacagccaacaatgggcaaacggtaaccattcctgtgcaaggtaaggaaggcagagttggatattgagttccttctctgtggcatgtattgaaaagttacccgaggtttggctagagtgacataggggacagaggagtgatggggagagagggtttgggagagcagaaattgtaaacctctgcccggagaacctcttattatcaacattttcttcatgctttttttctctgtcactaggtattgccaatgaaaatggagggataacattcttccctgtccaagtcaatgttggggggcaggcacaagctgtgacaggctccatccagcccctcagtgctcaggccctggctggaagtctgagctctcaacaggtgacaggaacaactttgcaagtccctggtcaagtggccattcaacagatttccccaggtggccaacagcagaagcaaggccagtctgtaaccagcagtagtaatagacccaggaagaccagctctttatcgcttttctttagaaaggtaatttttcacataccttatcagagcatgagcttgggaaatacaagtgttaaacaaagtttgaaatgtttttatctcctaggtataccatttagcagctgtccgccttcgggatctctgtgccaaactagatatttcagatgaattgaggaaaaaaatctggacctgctttgaattctccataattcagtgtcctgaacttatgatggacagacatctggaccagttattaatgtgtgccatttatgtgatggcaaaggtgagtaccatttggaattgtaaaggcaaagataggtcttcattactgagaacattttttaaccactgtcttgagatacagtt

SEQ ID NO: 16071 - DNA, 2300 bp, Homo sapien
tgcctgaactactgccatggttcctcaactgccccgtgagccttgtgcccctacaatctgttttccgcacaaagtgatgttttcaaaatacaaatctgatcatggctctcctctgcctaaagtccaggcagagatctagggaaaatctcagcccaagtcgatcatggcggactccttccacttgccgttgactgggtttcgttgtggccagagacttacttctggccattgaaacctgcaggcatttcttctgcggagcttctgggaaaggtagtcatgtatttcaaaagggaccactggaagaaagggatacttttaattttgtgagatcctgggtgtgccgcggccatcttgctaccagcctgaaagtgcaattccagggactgcaaggaaagcagagcctgaagaccagggcaccacctctggagacaatcctcccatgggagagaaatccccttgctaagtaagccggtttgagttggctttcctgccatgtgcagtctgatgctggtgtgcgtctgagtcatccggtgccaagtacgcagttgatgacatgcattggaagctcagtggatagatgtgagctggagaaatacctatgtgggtcctcggtgaaaactgaaggttggggaaaggaggaaagcagaaaaaaagctttgcagaggataatgagcttcaaagaagattgggaggaaatgggccacagaggtgccaaaggagaccacctgtggcctgaaaaaaggatttcctgcttgcctgcctttctgtattaagactcgtattaaaaggcatgataacattcctaaatgtgtcctaaggggacaaaaggaagtggctcagaagtgttttcagctaggggaggaagctgggtttcagaaccaacccttgggattaacatcaggagaatttggcttcctgccctttaataagtcacttaccagaatctcagaggcaaccaaaaatggaccaaacaacccggccagagaatgcggcttctgagtgtaagacactgaggcggtgtcacagacaggtcagtgcctctggtgtctagaaaaggggcaggggcttgcggggagagggctgtcgcgcaagtgtggaagtggagtgccgagattggacggactaaccacggggaggcaccgttggtaagaacaggcctggaaagcagctggcagcagtcacagaattaggccagagagagacctccatgggaaagcagacgggaggtccaaatgagagcgtgtgaattaaaaaaaaaaaaaaaaaaaaagaccaggaactatgttgctatgggagaggttctccaacttcagtgtgcgccagaatcagcagcgaactgtgacagatgtggattcctggtcctcagcctcccccctccccccagcccccggcccccactcggatgctgcaggtcggggccgacacacacagatttacaaagctcctctggctgctctagtgcccagggcccacttggagctgagctcccttcagctccagccttcagctcctgcactgatggagagaacgggcgtttcttgatgccacgccaagtgtccttctgacccctggtaccctgtgggcccgacgtggcggcctcgggcctcgcagcgccgcccaacgcagtaggacctagcgatgggagccactgggcagtcgcgcggcccggccctccccaaaagcttggcttgcagacgttagcgtatgccccagcccctgcgcatggcggttgcgctgtgggctgtgcgaataaacctccgggaaggtctccgtggtgactggcagacgccctggccaattgtgacccggcgcttgtttgtctctgccccatccctccccggggggccgatacttccatgactgacaggccgtcccaggcgctgttacgtaaggggagggtcaagtgcagtcccacccaaaccggggtgatttgatttgcaggaccgagtgtgttcttcccaacgcccccggaagaacgtctttgacgggcaggtgtgagagccagttggcgccgggaggccaggcggaagcctcgggccccaggatcgtgcagcagggggcggagcccgctgccgagggcagggcagggcagggcagggcggggtggggcggggcggggatcaagcaggggcagggctggcgctgcggcgggagatgctgtcgggccgcggcggcgcttggcagccaggagctctgcattgaaggcactggggtgaggcttactgcccggcaggctggtgggtacgcgagggctgaggtgtctgtaaatctggccgccagcctccacgggcccggcattt

SEQ ID NO: 16072 - DNA, 2300 bp, Homo sapien
gtatcctattgccactcctgtagttgtaaagactgtaacaggttgaaaggtgggtacactctggagtcacatgccttgggtataaattcttgtcttattgcttactagctgactgacctcagacaagttacctaaccttcttgcacctctcttccttcaactttaaaatggagatgataacaccatagagggttggtgtgaggattaaatgagataatatatgtaacacagatagtatagtacctgacacatagcacacagtgagtgttaattgcaatcattgtaagtagtgacattaatattattgtttgtaatggctcatcagcctttcagactaatttgtatcttactatcactgtttaataagccatcatttcattattattttttgaaggcattttttttctaatttaaataggataccttgcaattctggttcagtagagaaaatacatgtatataattttcagaagaaagaaaaaaaaactgatcttaaaaagttagtgcttctgtgtgagcttctgccgcagagtttgaggagttacctctgtgctgcttattaaccgcaaactggtttctccagtgccccttgctggccgtcctccctcggcttgagtaccccttttctgtctccattgcccacttctccttgccttatgacctactgatgacacagcctctcactgcctcaaaaacagtgctgactctgccgccttaggagactcaagttctttcctttccagagggccataaagtgaatgttaaagacatatttttcaaaagagcttccaaactagcattttatcttctgtttgaagaagagagactggaatgcttagctctcaggatctgataatatagctttatcactattctttcactagctttctgaggctctacttttcccaggatggtaatcactcaggtttgacttgcttcagcttctttcagggcccccttcaaagccaccagtcccccagggttatcccaggtcatgagtgacgagggaataaacagcactggccatggcatctgcttccctccagtcagcaagctgcgccatggctgtctaggatggagctcagttcccatggacaagtcctgggctgcgattcagtagcctattcagtcttatttgtctgcctctgtgttcgctttgtttctgaaatgtgagatcatattgggagacaacatttttttaccccaaaagtgtttatttaaaaaatttaaaatcaagttctgcttttgtgttagacctgcctttcctcagaggacccacttatttgtaccagaatagattaagaaatttaaaaaggccaggtgtggtggctcatacctgtaatcccagcactttgggaggccaaggcaaaaggatccctggtgcccagaagttagagactggcctgagcaacatagtgagactccccatctctactaaaaattaaaaaagaaaaaattagccaggcatggtggcatgcaccagtagtcccagctactatgaaggttgaggaggaaggaccgcttgagcccaggagttcgagcttgcagtgagcaatggttgtgccactgtactccaacctgggtgagagagcaagaccctgtctcaaaaaaagagaaaagtccacagtaactataatgactcccactctcccatggttgtttctgcaaacaccccccaaagaaacaaatgttcatgtcatttttgagaaagatagagaggtattgcaggtgccaagtgactggctcagggcttccaaccatggatgagtgtttcagtgctggccatgcactcctcgaacaaccatgggagtggatggccccattgactgttctccctcaacagtatcattgtcctaagggaaagaggcgtttacatgtatgtttttccacagccaaaagccaattgttattccagcaaatgttctcaccttttttaaatactcagaggtcacattatttaaagtagctcctagtttatgagaatccattttctcagacagcaaccctgttgaatattggtgataacctacaaagcgacagttagagaagtttgatgtatcttccccgacatgtctaaagttatagacattgtataataaattatatatagtacctttgcatgccaccccatgctatatttgcaaatatacacgtgtcactttaaaagggaggtaacatattgaaatgtgccttcaaacagtatttatttgaagtcatagtttaacactgacttaaggtccttttttggattcagttttttcttgttaacagtgttctgttgaacagatccacccctgagg

SEQ ID NO: 16073 - DNA, 2300 bp, Homo sapien
tgtttggttttgtagtttaaagctttttagactcccagattctgacttgaataagttgtttcctggtggaatttcagctctggtgtgtagattgaaggggagaagtggaggtactttttcagtcattcctctcagccttctattgctgagggcaaactagccctgggaaagcaatattgtgattcacgtcttagatttctcctctccacacaccagatttgtccactaaggagattatgacaacagctttattttttcctcctccaataaacttctcatggagtcagggtcccagatgctcaatccagattcagaaatgcagagggatgcctttgtggaatgtagagactccagcactaaaccaaacaaagcacagaaacactagcattttctttgttccagattacatcagccatggaagatttaacagtcagcacaatacttttctaaaatatctgtgtgccgtccatctccataatagttccaaaggaaccgtagagtagtttccaactctacctaataactccttttgttcatctctctcctgaagtatcctcccggtcctggctctttttcccttcaaggtttgtctctgactctgttctcattttctcgtaacagttagactttgttatactggctaatttggcctcaggtatctgcttcctcaaatcccaacagtttcaggatgagggccaacccaaatataacagaatcattactctgggtgggcgggtgaatgtattttagttaggacattcgtctatctacccattgctcactatagtctttagttatctaacagaattgaagaacatcagattaacatttttcttggttttatttgattttagcaccaatcgctacatgtatgctcagtctccaaggtttattgctaataacaggatcatctattcatacatgttctagggaatattgattttccattagaataaaagtttattttactgagaaattatgaagtgaaaatatgcagcttttgtcattgacaaaattatcttatttggggcttggcagctgctgttcatcttttaactgtgttatttccttaatataaatatgtatgtttttccagttaagtcagcaagcacccaaaactgctcaactcagttctacagattccacagatggcaacttaaatgaacttcacattacaataagatgttgcaaccacctgcagtcccgagcaagccacctgcagccacacccatatgttgtgtacaagttttttgattttgcagaccatgatacagctatcattcccagtagcaatgatccacagtttgatgatcatatgtatttcccagtgccaatgaatatggacttggatcgataccttaagtcagagtctctgagtttttatgtttttgatgatagtgatacccaggagaatatttacataggaaaagtcaatgtgcctctgatttcgttggcacatgacaggtgtatctcaggtaagcctatgtttttgaatctataaaattgtaaaaacaaaacaaaattataccttagtgttatggatatgattcgtttataactaatcaccctaacctcttctcagtctttaaactttaggcctatattactatattttaaaaattattttcttactagtcgctctatgtgcatcttatcccagtattaagttaaaattaatactaacttaatggaattaaatacttaaggtatttaattaaatatttaattcaattaaaatatagaaaatctaatataatttcattctctcatctcctttttgcaattattattgtatatatgtatatagtatgcatctctatgtattatataccaacagtacaatgttataatcattgctttataaaatcttatattctttaaagaggttaagagaagtaagagaagagagaaaatatataattatagaagactttgatatttacgtacatatttgcatttttgatattctttatttcttcctgtagacttgagttactgtctgatatcagtttcttattccaatatagctccatttccttcccctcctttgtgctgtcaccatatatttggtcttcctatgttatgagcccaacaattattgttgtatgcagttatcttttaaatcagttaagaggagaaaagataaaatgtatatttatactgtgttttgtaattacctatgtaattacctttattggtctctattcctttgtgtggatttgagttaccatttcctgtctctttccttcagcctgaagaacttcctatgacatgtcttgtaagttaggtctactggtagt

SEQ ID NO: 16074 - DNA, 2300 bp, Homo sapien
caagttttactaaattttaaccatcatattttatctgtcccctcaattcattgattgactccataaacatgatcaagcccctaatgcatcctaagcaaagtgctgggcagggagaatacaaataggaaaaactgaggcactaccctcatggaactcctaagatgttgacaagtaaataaatggttatgttttactatgaagagtgtaaagctaagaaaatctaaaggtatcaaggaaacattgaggagagaatgcctatttctacctcaagattcaggcaagacttcacacagtaggtatggagtctttaaagatgacagaattcactactaagtaaaagtaatataaggcattccaggcagtaagtaaagcagggaaagatgccctaaatatgacgtattgcagtacatttgagaaactgcactgtagatccatccaactggaattcaggaaagtcaaaaaaaggaggagaacctggagagaaagctataaggaacaaaattgtgaaggccctgttttcaccctgattgatgaggtagaagcttattaacctgaagagccaaggcggatggattacttgaggctaggagttcaagaccagcatggccaacatggcaaaaccccatctactaaaaatattttaaaaattagccgagtgtggtggcaggtgcctgtaatcccagctactcgggaggctgagtcaggagaatcgtttgaacctgggaagcagaggttgcagtgagccgagattccgccactgcactccagcctgggtgacagagtgagaatctgtctcaaaacatacaaaaaaacaagacagtatgatacattctgttttgaatatgttgtgtgggatatctagatacatagagggttaaacaaaactttagaaatataggaatggagttgagaagataaatatgaatttaaaatagtaatatggaagcctttagcatattaataatgacaaaagtcataaaagttgatgagatcactcatgagaatatgtagactaagaaaataattaaaaacagaagcccagaaaactagcagacgaagagaaatcccaaaagaatgagaagaaggataggaggagaagcagagaagatgatgacatacatggaagtccaggttagacagagttcactaatgggagattgtcatcagtgtcaaatgtagtaaagaaatcaagtaatacaaggaccagcgttcattgcgtctagcaattaattgattattgttggctttttctggagcagtttcacagaaaagcaaggcagatattcacgttggtgatatttggttggcctctgtatataacggtgaaaccatcatcatgatcaggataataaacttatccatcaccccacgaagaagaaaagtataaatcttaataagttaaaggaaaggaggcagcagaaagagagactgactttataggagtgaagacaatgggtggagcagagacagggaagcaggtgaaatccaggtagttatctcagctgttcattaagagcgcttttcttcttttgatatttttctcccctttttcctggcttaggctatattaaaactgaagttgcaattttgttgctgcctaataagtgatgtcaaaacagaaatgataaatttttgtacgataaagtattatttacagaaaaacagtgtagtcatagaatttaaaatagagactgttcaccagaagtactcattcttacacttcaaaagccagttttcattttctcatgtcaatattttgaaatctctaaactgtgtgtcttctcttgcagcccaattaaaggatattgcctatggcaccaagcagtacaaatttaaaccagaaatcatgccagatgactctgttgatgaatttgatgaaaccatccacttagaacgaggcgaaaatctatttgaaatccatatcaacaaagtaaccttttcttctgaagttttacaggcatctggagataaagagcctgtcactttctgtacctatgctttctatgattttgaactacagacaactcccgtagtgcgaggccttcatcccgaatataacttcacttctcaatatcttgttcatgttaatgacttatttttgcaatatattcagaagaatactatcacccttgaggtccaccaggcttatagcacagaatatgaaacaattgcagcatgtcaattaaaatttcacgaaattcttgaaaaaagcggccgaatattttgtacagcaagtttgattggtaagtacaatgtataagccttgggtgtttgaattactaatttggtttatatatcgt

SEQ ID NO: 16075 - DNA, 2300 bp, Homo sapien
gtcactttaaaaataataatgatgatgatgatgatgatggtgttaacattcattgaacgcttactatgtgccaggtactgttctaagtgttctgttataggaatgaagtgtctcaccatatccttgtgaggctgttactcaaatgattcctgctttacaaatgaggaagctgagacacagattagttaactcacttaaggtggtagttgaaagtattaatagttgtgtctggtgatatttttggttgtcacaacaaggaagcgggatgctactggcatctagtgagtagaggccatggatgatgctaaatatcttacagtgcttaggagacataataatgaattatccagcccaaaatgttaataatagtgtagaagctgaaaaaccctgcacaatgctgcaatgcctctccaacaccatcttatgttatccttctttgctcactatgcttcacttacattattctttactttcctcgaaccccccatacccttgtcttgctcaaggcctttgtattagctggttccttaatctttggagctcagttcacttcctcagacaggttttccctgaccatcctatgttagagtagtcttccttacatttcttcactgtttatttcttttcttttcttttttttttttttgagacagggtcttgctatgttgcccgggctggccttgaattcatgggttcaagtgatcctcccacctcagcctcccgagtagctggaactacatgtgcgtgccaccaagcatggcttgtatctcttatagcaactgcctctatctgaagttatcagataaaattattgtttgtctccactaaaaaaggataaacatcttgagacgggtattagtcttgttcacaactgttcaggaacagtgcctggtacagggtgggaaccaacattaatatttattgaatgattggctgtgcgtggtggctcacacctgtaatcccagcactttgcgaggccgagacgggcggctgacttcaggccaggagttcgagaccagcctggccaacatgatgaaaccctgtctctactaaaaatacaaaaattagctgggtgtggtggcacacgcctgtaatcccagctactcgggaggctgaggcagaagaatcgcttgaacctgggaggaggagtttgcagtaagctgaggtcttaccactgcactccagcctgggcaacggagcaagaacctgtcacacacacaaaaaaaagaataaagaaaaaatatttattgaatgaataaatgaatatcaggtactgagattaaaatggcaagcaaaacccccgcctttatgaagctagcaagttatggaggtaatcacatgataaacaaataatatataattaagcaaacaatagaccactcaggaggtttagggtctaccaaccaactcctaatccagggcaaatgagcaaactgtgttagggacctacaacttgcaggatctggatagagatggcaattagcagcatcaactctcaccttcatggctgggatataacatttcaaattggtcctggacgtggggataaagggcggcctgtgattcaggcctgaggatgtggaggtgtcttgggctgggctgctttcacgccagcagaactccagggccaactccagggccttctccaggcggcagagcggaccctaggaccccggcccgcgctgcagtggggagggtcagcaacctccacccaccctcatcctcccccatcctcccgggtactcaccgtgccactggccctgcagctagctaccgttgctatagcgccgacagcgtggcgggcggctggccgagaggagcacgggagaaacatggcaggctcccgtagcctcctgggaaatgtagttctccttggactctagcctgtttgctcgcggggtagcggactacgctcttccagctgtcggacctgggaaattctcctgtgctaaatcccgtggcgctcgcgggtgtcgccgcggtgcatcctgggagttgtagttttttctactcagagggagaatagctccagacgggagcaggacgctgagagaactacatgcaggaggcggggtccagggcgagggatctacgcagcttgcggtggcgaaggcggctttagtggcagcatgaagcgcaccccgactgccgaggaacgagagcgcgaagctaaggtatgtcgggctcccggggcctggagatcttcgtgcgctgtgagcaaggatcagggaaccggaagggcttggtttgatggcgagcggatgcgcggtgttaaactaagggatgacagggccttgtca

SEQ ID NO: 16076 - DNA, 2300 bp, Homo sapien
cctcacaggcaatggttatggtttcaatagagtaagagcttctttggtgcagtgattctatttcagccaaaattataatcccaacttatggcaaataataggtgctcaacaaatcttcacagaataaatgaaatactttaaaaataaacctgaaagatgagaaagacatcatgcacaacaccatgaggtgacatttgtttctttgcactgtgtagactaaagcagaagggtcgccctctttgtgcttatctttaatatattatccacatcatatgcagactcaagcatgaaaacttctggtcccttacgaaatactgcaataactcaggtcaatatagagcagattttatattttaaatccttaggtgtattgccctaaacagactcacgtgtaagatgaaattctatgaaagcaagaactgtgtctacgttatttaacactgttattcactgccaatatttgcctaacatagagtaggcagcaaatgacatgtgcaaaggccctgaagcccgataaagtatagtgaagagtgacttttaagaaggccaaagtgactggtaggcagagagcagagtgtcatatccaatggggttgtgaaagcaggtagggtccagatcatgcaggatcttgtaggcaatgtgaagttttgcctttatcctaagagcaacagaaagccatggaatatttttaaacaggtggttggcagagtaaggagaaaggaaagggacataattatatttgcatttcacgaagatcttactctatggtgtgcagaagagaatggtagttgagggaagggagagaaggtggaagaagagttaagttagggtgtagagtgagtgtaggccaatcaataggctattccaacagtctattaaaaagataatggtagcttggtccaaggtagtggagatgaaaaaaaaaaaaagtgggcatattcccaatatacgtagacaaatcaacaggatctgagtttgggaatgagagaaaggaaaacactcaatgcttctgagcctcagttcttcatctgtgaagctgggctgttatttatactccatctgtataatatctatcttgcaatctgctgtgacaatgatatgaaataatttaaatattatgcacttaatacagtgcctgacccacaataaatgctttttaaaatctctgttgccattattatggtcatcccatggaatggcaactaccagaagctgaacatcaaaggtagagaggagcaatgtagttaaagattcatatccacagcgctaaaagacacaaactgttatcagccggtcacggagacaattgttccaaagaaacacagctgactgcacagatatttcatctaagccgatctcagtcctcagagaccattatgagaaagcacagctggtatgatcacagtcatctgagaatccggtaaactgaggcacagggatggcgacaaatttaaccaaggaatagatgcagaagaaggacaaggaaatgggtatcttgcttctcatttttgagccgatccaacaagactcggcctgcatcctgaagagcacgaatttgtaacatcccctctaatatctccaggtcccttgctgacaaggccctgtcatcccttagtttaacaccgcgcatccgctcgccatcaaaccaagcccttccggttccctgatccttgctcacagcgcacgaagatctccaggccccgggagcccgacataccttagcttcgcgctctcgttcctcggcagtcggggtgcgcttcatgctgccactaaagccgccttcgccaccgcaagctgcgtagatccctcgccctggaccccgcctcctgcatgtagttctctcagcgtcctgctcccgtctggagctattctccctctgagtagaaaaaactacaactcccaggatgcaccgcggcgacacccgcgagcgccacgggatttagcacaggagaatttcccaggtccgacagctggaagagcgtagtccgctaccccgcgagcaaacaggctagagtccaaggagaactacatttcccaggaggctacgggagcctgccatgtttctcccgtgctcctctcggccagccgcccgccacgctgtcggcgctatagcaacggtagctagctgcagggccagtggcacggtgagtacccgggaggatgggggaggatgagggtgggtggaggttgctgaccctccccactgcagcgcgggccggggtcctagggtccgctctgccgcctggagaaggccctggagttggccctggagttctgctggcgtgaaagcagcccagccc

SEQ ID NO: 16077 - DNA, 2300 bp, Homo sapien
tcatattcagcaggcatctaccagcggggctcaaagtccagggaagtcctcagtccagtctaacaaactgttattaaatttttttaaaggtttaaggtgtcgaacatttgagaaaacagagttgctgcccttgtgctgctcacatgtgtgttagcacatgtaacagacatatacatgaataaggcatgatgtgcagtggcaaatgagggggtagaaaatacatgttctgagggtgctgcagagaacagaagtcagattcagaaaactgggcaagactttatggaagaggagtgcctttcaattgtgccttgaaaggtgaattagattttaacaggcagagatttggtgggtgaaaaagagggacagagagccccgccttttttttttttttttttttttttttttttgagacagagccttttttttgagacagagtctcactctgtcacccaggctggagtgcagtggtgcaatcatggctcactgcagcctccgcctcccaggttcaagcgattcttctgcctcagcttcccaagtagctgggattacaggtgcccgccaccacgctcggctaatttttgtatttttggtagagacagggtttcaccatgttggccaggctggtctcgaactcctgacctcaggtgatccgcccgcattggctttccagagtgctgggattacaggtgtgagccaccacgcccagctgagagcctctttttttaaacaattttttttaagggacaggatcttgctctgtcatttagactagagtacagtggtataatcatagcttactgcagcctcgaactcctgggctcaagcgctcctcctgcctcagcctcccaaatagctggaagtatagctctaccaccacacagtctagctactatgcccggctaatttattatttgtggagatggggtctcactttgttccccaggttgggacggagcccattttagacagtacaaacaataggcacaagagggatggctctgtaacgttagtagggcatatttgcagaaaagtatgtggtgccttgtaaccagtacttccggtacctaggtggggtagaactagagaacaagtagaggggggagaatggggccagctgatgaagagctttgaatgatacacttagaaatttggcctttgttctggagacagtggttggagctggattcaaagatttttgagtaggaaagtgatccaatcgacccattcttcaaaattagaactggtagcagcattgtggatagactagagaggagaggctggaggcatggggacctgctgcaaaaattttgctgcaaaattatgaggttctgaaccagggcaataattggagggaattaaaaggggtggtaaattcagagtttttgttgattgttagtttgagactcagtcttactgtgtcacttaggctggagtgcagtggtgtgatctctgctcactgcaacctccgcctcccaggttcaagtaatcctcctgcctcagcctcccaagtagtggtattacagatgcgcaccaccatgcttggctaattttcgtaattttagtagagacgaggtttcgccatgttggccaggctagtgtcaaactcctgacctcaggggatccgcctgcctcgacgtcccaaagtgctgggattacaggtgtgagccactgcacccagcctgttttgtttttagataggtacatagaattcaccatcagtctggatgacagagctgagagatgatgaagtcacaggcaattttacaagatttcttctagtcttagttattagatggatggtgataccatttactgagctacacccaagaaggaagtttaggggcaaatgagtttgagcagccggtataccgaacatctcagaagagctgaaaataccagtttggaacttggtagagacgtcagagccaagcgtagatttgggagtttgatttatgtctgcagtaggcattcctttcatgcctatcatgtgccaggcagtgttctctcatatgttaactcaggcttgaaagcacttagcacatggcaggcatctccacagagacagtggctgagcgattggagtgagtaagagagaatgtagtttcaagagtaaaggagaacaaagtagggtgacctagtctgaaggacaggcgcagaacagtcagtggaacagccagagatagcagcgagagaggtgagaagaggaccaggagtaggtggtagaatggagtggaggaaagtcagcgaatgtaatagtgtcgaaccctgcagggaagttaagaagtggccataccgttgca

SEQ ID NO: 16078 - DNA, 2300 bp, Homo sapien
attttgaaaattcatgaatctagcatcagtgagccagcttttctgaatgtcagagctggctggatctgaatagtgcgtgccttttttaggcagaacatgtgctgtctttcagtaacctctgcttaactcattcatgttatgtgcctggcccagtgagtatttgaatttgcaacctgtggatcctgggtttcatgcactggaattacctagagaagctgaacattcctccttgtgctggagggctgaaaatgttgttgccacagaagctgcttgagtgtccaactgggcatatcttccagcacagtagatggaatactgggataggaggcagaatcagggtccttttcctggctagtgtcaggtggattatccaggcttcttcacaatggaggtactattttctgacttacctgtttgtatcagttaacatttttgatagcaacagaaacagattctgatgtggtttttttttttttttgagatggaacctcactctgttgcccaggctagagtacagtggtgtgatctcagctcatgcaaactccatctcccagatttcaagcaattctcctgcctcagcctcctgagtagctgttattatatgtgcacgccaccacgcctggcaaatttttgtatttttagtagagatggggttttgccatgttagggaggctgatttcgaactcctgacctcaagcaatctgcctgcctcagcctcccaaaatgctgggattacaggcatgaaccactgcactcagccctggtgaatttaaacaaaatgggactttattgaaaggatattgggtgactgacactatcaaaggaaaagcgaatgatctggcctcggaaagttctggaaactagagatactctgaggaccatgggtggaaggaattaagggaattgataaattgcctcagcattttcccccgtttctttatcattcctctcaagagtctgaaatcctggaaaagaatcaatttggtctggcccacatccttcataggggaagataggacaccttggttgacagtccctctaagactttataccatgaaagaaaagactttgtaagaagagatttaggtgatgttgccagacaaaggggatgaggtatggatttaagcaatagaaacaacaaatgttcactactcctcttctcaaggttgtcatgaagatattaaatatgcgctgtcaaatgctatcaaagagtaagggagtagtgtttcaagttacaggagaaccaggttatgggtatgctctttaagtaaacaaatatattggcgtctgttagataaggaatatattgaatgacttagaacacagacaatttcattgaaattgtagtggcaatttcattccttttagcaattgctttggttataaaatctccaaagaagccacactaactttaaattataaaacaacatctataaaaatctaaagatgttctttgagatactcattcaaagaaatggtctttctgatttttgtgttcccatttttttctttgcaagatcttgatttgcaacaggcaaggaaaatgagtgaatcttcccccttcttcccccacaaaacattgctggcatgggtagaaatttaaagtaatgattcaaataagagaggcagagaaagcctcagctgggtggcaggaaacaagagagtgaaagtcagaggctgctcttttttaaaaaggcaaaacaaacaactcacagtgaagtgtacgtgaaaatcatttctaataatagctcatggtaggcaattcccaggaaaaaaaaaatcgttggtgtgctgagaaaattagagtaagaatgcgcagtatcttgatgtgttacttaaggcaatggagctttagagtttaccttatgtgccatgtacattgattaaatacaaaatatatgccggccatttttggccatcatttactgcattgatttgttagcaggggaactgtaataaaaaagccattgatttactgtccttatttgcttatgggcttttttttattattaatttttcactttttctttctctgttttggatcatttcttgtagacaaatgctgtgcttcatgaagttaaaagagaggggctccccgtggaacaaaggaatgaaatcttgactgccatccttgcctcgctcactgcacgccagaacctgaggagagaatggcatgccaggttagttctgttgtgaaatgggatttgttgttcttgacaaacaagaactatatttggccaagcccttccttatggctggcctcatccctttcctttgagggcccatgaaaaataagcacg

SEQ ID NO: 16079 - DNA, 2300 bp, Homo sapien
agaagccggcaggtaatgtcaacgagtgaagcaggggttggtgtaatacattagggagttgtggggacaagaaagaactagaaagcacacccccggtctaagaggacaaccagcactctgctcccagccagctgctgccatgagagaatatgggcccactgttgtgtacggctcagggtttttgttttctgtttttccaaaagaagccagaaatccagatgtttgtatgaaaggtatttttataaaaattttgacaactaatataaaacactatttgaaaatgtatttgagggctagctttggcctacaagccactaggttgtaacttcagctttcaaaaattgcaaaaggtagagccagctgcttagtggccataccttctcattctccaagggaggtgtttggagcctggtgcattctaaacaatgactgttctgtggcttaaaaccctattgtgaagaacacagttactctgaaattgagggcagcttgtctcatttatatcatttctttttagtgacacagatccttcgttaaggccaacttttaagggagtcaagttgcagaaaagtttacagggcataaccaccctcaccttgcttttcttactgacttttaaccatcacaaagtaattactttccctcctctatccctcccttggaatgggtctttttttttttttttttttttttttttgactcactctctcgcccaggctggaatacaatgatgccatgatggctcactgcagactcgacctccccagctcaagtgatcctcccacctcagcctcctgagtagcagggtctacagcgcccaccacgatacctgactactttgtatttttttgcagagacagggtcttgccatgttgcctagcctggtctcaaactcctgggctcaagccatcctcctgccccaacctcccaaagtattgggattactggcgtgagctactgtgcccatccagaatgtgttactttttaaagtacattgtgaggcaggacagtattcacattgcctttcccagagcccctaaagcatcaactgaagatggtgtccctactgcagtcaaacagaaatgctgagtaatgactggtttaataatgatcagatagacgagaaaaggccttgactaagtcagtgatattgggatatgattattttaattattttaatattgattcttttggtgtcttttggattgtttagctgtcgctttttctcttggcttttgaggtttcaggacacggagtaaaatgatggaaatgtgtttgtttttcagggcagagaggagtgttggtaagtagagaaattacattgtgtcctcagctgccattgatgtccttccaaataggtgaagtttagtttaaaacctgccgttaatttctggcctctggcaagagtggtacaaggttacctgtttgttccagtatgtgtagggaggggctgggggttggggagagagaagggtggcaattagtcaatgacatttatgacccatttataaaatacaaatgaaataattggttacaaaatcatgacaagccttcacttgtcttttacaaacttgttctcaacacactgtgaaacttaatggacaccctttgtagaaagtgaggaacaacagccattctgaagagaccgattcaaagcgttcaacctgagactagctgtggtggcgaagattctctgagtatgtttctcattctcatctcagatacccgcattattatcgcagatccagaggcagggaatttgtagattcctcagccagggaattgccacagttttggtgtaggatgaccagacatgagaaagaaaaaaattttcccacaaatctttaaatgcatgggaccctttggggtctttgctgagattagagcactgtgtgtttataaataaaagaagaataaacaaaggcagcatgcactggcagtcccctccttcctgccctgttaaaatgctgtgtgaggtggcatcgagaaaatgaacgccaaggttgacaccaaatgtagggcccgagtgatttttctgtttttcaaatccgctgtcagttctccacctctgactcttagtctttttctccttccccacctctagagagaggacatttcctgagtaaaatgaaaatcaaagctaggagctaatcatatttttaaagtcagatatgttgggggtataactggaagctaatttttaaaagaatcctgccatatctttgataaggaagttctatggcttaaagagtgtaaccactagttttagcagagatgtttcctttagttttgaaacattc

SEQ ID NO: 16080 - DNA, 2300 bp, Homo sapien
gaggcgggaggggcgagctgaccctgcactcacccagtccccgcgcctctcgctcccccgcccggcgcgagcaggagggggcgggcagggactcgcggcgctccggctcccgcccctgccccgccccgccccgcgcgcgggatccgcgggggtgggcggcctcgcccgtaaggcgcccaggcgattggcgactcggggaagagacgcggggaaaagtcgaataagagggcgcgacgtcagacccgagatttggggaaaggcgagggagggggtggaagggcggggatggacagacagacaccgacacacaccccccgcgcggcaccctaagtgtccacaacttttggctgccttacttagcccagggcgcagaggctggaaaggtcgcggggagtatcgtgtgagtaaagagagagatttacaaaatagaagtagtgagaaaggaagaagtgaagggaacggaccggagagcaaaagccctcgtgagaaagggaaagagaaggggagaggagaaaggagagtttcatagcgtccagggcagtgcaggagcccgaagcagcggaagcgatcctggggggaagaggagtgcggagaggggaggggagaggaagggcgaggagggggagtgaaaactagaggagggcgaaggaagcgaggcgcgacactgctggggagaggagggcagtgaggagcgaggagcgggcagaggcagctccggcggccgagaggagggagcgcggcgcagagaggaggggcttgcgccccgtagaaatgtcaatcagagcccggagccccgggaatctccgccaatctgttcggacctgacctggctcctcgccgccgccctcgccgccgccgtcgccgccgcggagcagatcaataggcgaacgcggagcacagcgcagcgcgggcggcagcgcggccccaagcccggcccagcccccgatgcgcgccggagcccgcgggcggcgctgagctgggcggcccgggggtcggcccccctctccgtccgtgccccgcgggccaccatgtccttcccccagctgggataccaatacatccgcccgctttacccgtccgagcgcccgggggccgctggcggcagcggcggcagcgcgggggcccggggcggcctgggtgccggagcctcggagctgaacgcctcggggtccctgtccaacgtgctctcgtccgtgtacggggcgccctacgccgcggccgctgcggccgccgccgcccaaggctacggcgccttcctgccctacgccgcggagctgcccatcttcccgcagctggtaagagcccgcggagccagggaaggaggggttggcgctggggcgcagggcgagctgagcgcgcgggggccggactagaggggtgcaggccaggaggggggaggcagcgatggctggggctcactcgcgctccctccgcgcgtgtcccttccttctccatgtgcgtacagggcgcgcagtatgagctgaaggacagccccggggtgcagcatccggccgcggctgccgcgtttccgcacccgcaccccgccttctacccgtatggccagtaccagttcggggacccgtcccgtcccaagaacgccaccagggagagcaccagcacgctgaaggcctggctcaacgagcaccgcaagaacccctaccccaccaagggcgagaagatcatgctggccatcatcaccaagatgaccctcacccaggtgtccacctggttcgccaacgcgcgccggcgcctcaagaaggagaataagatgacttgggcgcctcgcagccgcactgacgaggagggaaacgcttatgggagcgagcgcgaggaggaagacgaagaggaggacgaggaggacggcaaacgcgagctagagctggaggaggaggagctcgggggggaggaggaggacacggggggcgagggcctggctgacgacgacgaggacgaggagatcgatttggagaacttagacggcgcggccaccgagcctgagctgtccctggctggggcggcgcgcagggatggcgacctaggcctgggacccatttcggactccaaaaatagcgactcggaagatagctctgagggcttagaggaccggccactaccggtcctgagtctggctccagcgccaccaccagtggccgtggcctcgccgtctctgccgtcgccccccgtgagcctggacccctgcgctcccgcaccagcccccgcctccgccctgcagaagcccaagatctggtccctcgcggagactgccacaagcccggacaacccgcgccgctcgcctcccg

SEQ ID NO: 16081 - DNA, 2300 bp, Homo sapien
tgacacctaggaaacatcccggaaaataacgttactctcaattttgtaaccccaagtttcttcgcgtgaaagtgagcccaacattccctatgccactctctgtgaggtttaacgggaaacgaaatcaggcgtcgaagagatatttcaaagccagggcggcccctgatgacgcctcctccggcgaggctcctgagaaggcaccaggctccccagcaccaggcagaggcggaagagaaggtgatagggaaactactcagatgcagtctgggaataccccgctttccctcattgcccccaaaacctggtcctccccaaactttcccttgtttcctccccgcccccatcccgcccgcgcaaggtttttggcgttcacacctactagggccgtgggcttgtgccaagacccacggaaagaggtgggaggtgggaagtgggaggtgggcggtgggggtgggatcaaaactgggtgtctgccgtggaggtggaagaatttttcattccagagctgggctccccagagctgtgatcagagacagccggggccaagaccctctgatctcctctgatcccgccactctggtggaattcgaattcgattcctggatccatccatgcaaggtgacggtttccgcctccgagctggggctggccactccacggcagagtcaccacccccgttttgtctccggggcgtgcccactgcaggcctggccggcttgtgggtcgccgccgcggcctaaagctctgagcccccagccgcggcaatgctgggaatttcaatgccgctatcgactgcacgccctaatccgtgaaggtgggcgcccgatcctgagatttcaagtttgatttaggaaatatcccatcattaaaccaaaactcttgctttccatccccaccggaggcggtgggaggatccttgcagagagaaaagaggttagcgccgggaccgggagaaggggtaggggtcgcgcaaggaaggttctccacagacaaaaacgccaatacagaaacttctcgaagagctctccaaaagttcctagggcctccgtcccccggcgccctgctcctcccccattcccagccgcctggggcgcgggcctgcttcaccgatttgtggcggctccctacccttccagtgcccccgggctgccacccttcagcccccggagccagcccgccatttttagtaagggattcgcacacggacccgggggcggcgttaagtggctaatctctgggtttggtcctgctgggttgggggctgcctcgcccccgcaaggcagcgaggtggcctctggagactctgttaggacgcactccctcgctccccacccccacgccggctgctagctccctccctaagctgctgaaagtggccgggagtcgagaggtgcgagctgtaaaaggggcccgggcacaggggagctcccggagccagcctcggcccaggtcccgcgcctcagcctggggacaggctcggaggggcgggaggcgggaggggcgagctgaccctgcactcacccagtccccgcgcctctcgctcccccgcccggcgcgagcaggagggggcgggcagggactcgcggcgctccggctcccgcccctgccccgccccgccccgcgcgcgggatccgcgggggtgggcggcctcgcccgtaaggcgcccaggcgattggcgactcggggaagagacgcggggaaaagtcgaataagagggcgcgacgtcagacccgagatttggggaaaggcgagggagggggtggaagggcggggatggacagacagacaccgacacacaccccccgcgcggcaccctaagtgtccacaacttttggctgccttacttagcccagggcgcagaggctggaaaggtcgcggggagtatcgtgtgagtaaagagagagatttacaaaatagaagtagtgagaaaggaagaagtgaagggaacggaccggagagcaaaagccctcgtgagaaagggaaagagaaggggagaggagaaaggagagtttcatagcgtccagggcagtgcaggagcccgaagcagcggaagcgatcctggggggaagaggagtgcggagaggggaggggagaggaagggcgaggagggggagtgaaaactagaggagggcgaaggaagcgaggcgcgacactgctggggagaggagggcagtgaggagcgaggagcgggcagaggcagctccggcggccgagaggagggagcgcggcgcagagaggaggggcttgcgccccgtagaaatgtcaatcagagcccggagccccgggaatctccgccaatc

SEQ ID NO: 16082 - DNA, 2300 bp, Homo sapien
ggtcaggagttcgagaccagcctggccaacatggcgaaaccctatctctactaaaaatacaaaaattagctgggagtggtggcaggcacctgtaatcccagctacttgggaggctggggcaggagaatctcttgaacccgggaggcagaggctggagtgagccaagatcgtgccattgcactccagcctgggcaacaagagcaagactccatctaaaaaaaaaaaagtacaataacaacaacttgagaagcaaacagtttatccagcagattcaatcctgtcaggggttggggcagaaatatctggaagtatctagaaatatctggaagatggaggtctgtccaattcctgggcctgctgaatctgccctgaggaaaagcactgaagaacaacttcagccatgagctcatcagacgccacctcctcggttccgcagagcagagggatgtgacaggcaaaccttgctgtcacagcactcagtttagggatgacctataactagtccctttaaccatctattcctaagcaattttgtttattgaaaggtaaaagtaacatttgataacctcatcattattattatgagatggttattatagtctcataattattaacaatactagcattttctcaccgtttaccatgggtcaggcacagtgccataatgtaagcctctaatgctcataacaacagaagaggagatacgtattattactatagctattttatagatgagaaaactgaggctcaaagggttacttgatgatcaaactaatccagtttagaaagacagatccggaatttgtatccaggtagtctggttccaagaattttttattttattttattttattttattttaaagagatgggaactttctctgtcacccaggctgaagtgcagtggcaagatcctagcttagtgcagcctcaaactcctgggctcaagggatcctcctgcttcagcctccagagtagctgggactacaggcgtgcgtcaccacacccagctaatttttgtatttttttgtaggtcttgctcttctgtccaggctggtcctgaactcctcggctcaagggatcctcgggcctcagcctctagaatagctggaactactggcgttcagtaccactcccaactaatttatttttcattctcgtagaggctgggtcttgctatgttccccgggctgatctcgaactcctggactcaagcaatcctcctgcctcagcgtcccaaaatgctggtattacaggcataagccaccacgcccagcccgggaatcctttcttttaaccactgcagtactccacctttttcctactagatagtaagagaggttctgctctttccacatccccctgaactctgatgtctgtttgaatcaagatggagaaatgtggtttactaagagactctgcaaatgtggggcctctttctgagccacatggggtgggcagcctccaggtcacaggacgctgctgctggcatctggaagggccactccgtgcgaacgtgctcagggcagccctgcgtttttacaggaaacatctcagttaaatatgcaagcgtgtttcattgcaggggctcaggaaacttgtttatcttccttaaacactgccagagtggctctcgtttgttatctggggtgtgaaatggaggctgacaacaattaatacctcctcccaggcagctcggcggcgctctgacgggaagctgtgtacttccgagcaggcggctgaggaggtggcaggccgagccgtcactcaggatccgaggggggaagagtgacagcagcagctgaccgcccctcccgccgcctcctgagaggcccccatgataaagcatcctgctttgtggtgtaatcaacttgccatacatgcattacctcctaatgagcgccgtgtttaaacaagtgtatagaacacatctgtccgggccttgggactcgaggctgtgtgaccaatttcagcatctgaaagttaaattaatggtaaagggtttaattgtgagtaaacaataccacattaaggagcagtaaacacagcagtggggacccaccgacccgctctgccatcacagatgcggcggcctccatgtgaccgttaatagtccccgccgcctggaagttctgacagcgccctgaagcccatttgtcatctaaatggtccgtccccttcttaaacatcattttggcccaaggtccattcatggggcctgccgggtgttcctgggaagatgggcagaaaatcccaaggcaagtgggaaaagcctggtaaagttccagcttctccatggag

SEQ ID NO: 16083 - DNA, 2300 bp, Homo sapien
ttttgcctttgcaaaggtcctgccaagatgctaagttggaaattgaggattctgacgccttgtgcgcgcccgaagctcctccttcccggggtgtagtcggtgggaggactggcaggagcttctgggcggccgcagccaacccggccgccaggcgcgcctcgccctctccctcttcctcctcggctctctctcccgctcgctggcgctcctctcgcccctccctagcgcccgcctcccctccgcggccccccctctcacccctcctctttgcctccccttttcccctccccggtctctccctctctctcgctttctctcagactctcgagcgccggccccaggatgacaatcacatcccaggagcgccgatctcttccaactttcctcttctgctaactcggggcggagtggcagtcccgccgccccgaagcacaaagggaacgaggccgcgggctgtgcgccggcgaacgctctgcgctctcctagccacagtagatcgcggacttagcggatttcttgttctccggcaggctgggctccgaggccattcgttgcccacccccctctggcgtcttccccaagccagggggcccggagagccagctggagatccggaatgaaagtctctgggagagccgatggatggcccgcgcccagggcgcaggaagtccgggatgactgcccctctgcgccggcagcagcaggtgggcgagagacaggcctcagacgtctgcacgtctccgcctcgccttccttctaccgaccccccgccggacggcgagggagaagacactggttcctggaactaccggggtagcctttttctagagtaggggtggtgggcaagaactgccagacagagaatcagctacacccgaggagatctcgggaccgtccccagctccactcccacgcctcgcagcctctttctcccggttttcccaccgcacgcagctcgcaccgccaagtcggtggtggtggagggtgcgggtccccttcccttttgtttaactaagtcgccttccccttcgcacgcactctcgcatccgcccacgctccactgcaaacactgggcagagcagtgcccaacccaaccactgtttgttcagcgaggcgctggcgaagcaaacacacacaactgagtcagaggcagagcccttgcccacgacggccacacagttagaatacaaaacagaccctctcctcttctctccacctcccgccaccacaagccacggacgcactcgaactctgggacagacaggggcgctggtgaaccaggacagaagatggcacaggtttgggcacgccgcggaagctcgggatatcgggaacttcgcataatggggccacacgcaagccgaagcataactatatacaaagtttctcgcattgactttgacgggcgagatgtactttatttcgcgatctcacactaacccagcgccgcaccggcacccgctcggtgctgcgctctcgtgcacgcgcgttggctcctcccctccgtctgctcccctcccccagacaccgcccaccaagaggcctgagcggttcagactacattctccgagagcccctgggtccgcccagcccagtgcctgacacctccttcacctatgattgggcgctggcctccctgggctccgccccctggtgacgtaaccccgctttcctccgagtctcggcgccagaggggcggggaggggcggggtctcgatcgcgctattgtcatggagacgggaagctggctgcagcggcggcggggaccgtggggccgaggtggctgccagccggccaatgtctaagcgaggcggagcggcccaggcggcccgagcctgggggagcgcgcagccggccagtggcggcctcgccggcggcctcttcccgggctcgcagtaggcccgagtcgtcgccgggagctcctgggagcagcgtccccgccctgctcccctcgctcccgcctcttgcggccccacggcccctcagcgcccgcccccggctccgcccgccgcagccgcagcccctggcgctaacggtcggtaacggcccgcgcgcgccgcccgccgggggctcgcgccagccacgagggagcgtccgcggcccgcgcgcccgcgcggcggaggagaggtgagcccccgcccgggccaggccctctggccgcgccgtccgcccctctagtcgtgtcccctcgtgggccgaacggacgcggcggtgccccgcgcccgaccagacgtcccgtgggctagggcctgggcctcgggccgcgtcggcgccggtcgagcctctccgggtgtcggggt

SEQ ID NO: 16084 - DNA, 2300 bp, Homo sapien
ttggccggctggcagccacctcggccccacggtccccgccgccgctgcagccagcttcccgtctccatgacaatagcgcgatcgagaccccgcccctccccgcccctctggcgccgagactcggaggaaagcggggttacgtcaccagggggcggagcccagggaggccagcgcccaatcataggtgaaggaggtgtcaggcactgggctgggcggacccaggggctctcggagaatgtagtctgaaccgctcaggcctcttggtgggcggtgtctgggggaggggagcagacggaggggaggagccaacgcgcgtgcacgagagcgcagcaccgagcgggtgccggtgcggcgctgggttagtgtgagatcgcgaaataaagtacatctcgcccgtcaaagtcaatgcgagaaactttgtatatagttatgcttcggcttgcgtgtggccccattatgcgaagttcccgatatcccgagcttccgcggcgtgcccaaacctgtgccatcttctgtcctggttcaccagcgcccctgtctgtcccagagttcgagtgcgtccgtggcttgtggtggcgggaggtggagagaagaggagagggtctgttttgtattctaactgtgtggccgtcgtgggcaagggctctgcctctgactcagttgtgtgtgtttgcttcgccagcgcctcgctgaacaaacagtggttgggttgggcactgctctgcccagtgtttgcagtggagcgtgggcggatgcgagagtgcgtgcgaaggggaaggcgacttagttaaacaaaagggaaggggacccgcaccctccaccaccaccgacttggcggtgcgagctgcgtgcggtgggaaaaccgggagaaagaggctgcgaggcgtgggagtggagctggggacggtcccgagatctcctcgggtgtagctgattctctgtctggcagttcttgcccaccacccctactctagaaaaaggctaccccggtagttccaggaaccagtgtcttctccctcgccgtccggcggggggtcggtagaaggaaggcgaggcggagacgtgcagacgtctgaggcctgtctctcgcccacctgctgctgccggcgcagaggggcagtcatcccggacttcctgcgccctgggcgcgggccatccatcggctctcccagagactttcattccggatctccagctggctctccgggccccctggcttggggaagacgccagaggggggtgggcaacgaatggcctcggagcccagcctgccggagaacaagaaatccgctaagtccgcgatctactgtggctaggagagcgcagagcgttcgccggcgcacagcccgcggcctcgttccctttgtgcttcggggcggcgggactgccactccgccccgagttagcagaagaggaaagttggaagagatcggcgctcctgggatgtgattgtcatcctggggccggcgctcgagagtctgagagaaagcgagagagagggagagaccggggaggggaaaaggggaggcaaagaggaggggtgagagggggggccgcggaggggaggcgggcgctagggaggggcgagaggagcgccagcgagcgggagagagagccgaggaggaagagggagagggcgaggcgcgcctggcggccgggttggctgcggccgcccagaagctcctgccagtcctcccaccgactacaccccgggaaggaggagcttcgggcgcgcacaaggcgtcagaatcctcaatttccaacttagcatcttggcaggacctttgcaaaggcaaaagcagagccccccggtgcaaagagcgaggggaaaaaagagaaagcagcaagggaggggaggggaggggaaaaaaagcccagctggggcgagcgaggcgcgcagaggagcgggcgcggcggtcgcagccggaggcgcgcgggaagccagcgaggaggcgccgcgggccggagccccggagccggggccagaggagcggcggcccagggcagccagaggccaggtgcccgcccgctcgccctcgcagggcgccgcccggctcgttggcggccgcggcgcggcgcgccccatgcccgtgtgtggccatgtcctatccgcagggctacttgtaccagccgtccgcctcgctggcgctctactcgtgcccggcgtacagcaccagcgtcatttcggggccccgcacggatgagctcggccgctcttcttcgggctccgcgttctcgccctacgctggctcgactgccttcacggcgccctcgccgggctacaactcgcacctccagta

SEQ ID NO: 16085 - DNA, 2300 bp, Homo sapien
ggaagacgccagaggggggtgggcaacgaatggcctcggagcccagcctgccggagaacaagaaatccgctaagtccgcgatctactgtggctaggagagcgcagagcgttcgccggcgcacagcccgcggcctcgttccctttgtgcttcggggcggcgggactgccactccgccccgagttagcagaagaggaaagttggaagagatcggcgctcctgggatgtgattgtcatcctggggccggcgctcgagagtctgagagaaagcgagagagagggagagaccggggaggggaaaaggggaggcaaagaggaggggtgagagggggggccgcggaggggaggcgggcgctagggaggggcgagaggagcgccagcgagcgggagagagagccgaggaggaagagggagagggcgaggcgcgcctggcggccgggttggctgcggccgcccagaagctcctgccagtcctcccaccgactacaccccgggaaggaggagcttcgggcgcgcacaaggcgtcagaatcctcaatttccaacttagcatcttggcaggacctttgcaaaggcaaaagcagagccccccggtgcaaagagcgaggggaaaaaagagaaagcagcaagggaggggaggggaggggaaaaaaagcccagctggggcgagcgaggcgcgcagaggagcgggcgcggcggtcgcagccggaggcgcgcgggaagccagcgaggaggcgccgcgggccggagccccggagccggggccagaggagcggcggcccagggcagccagaggccaggtgcccgcccgctcgccctcgcagggcgccgcccggctcgttggcggccgcggcgcggcgcgccccatgcccgtgtgtggccatgtcctatccgcagggctacttgtaccagccgtccgcctcgctggcgctctactcgtgcccggcgtacagcaccagcgtcatttcggggccccgcacggatgagctcggccgctcttcttcgggctccgcgttctcgccctacgctggctcgactgccttcacggcgccctcgccgggctacaactcgcacctccagtacggcgccgaccccgcggccgccgccgccgccgccttctcctcgtacgtggtaagtgagcgggatccgcggcgggcgaggggcagcaggggccgggcgggaggacgggggcggagggggacacgggcctaggcgccaacaccgacctcccccgccaagcttcgcggccccttcaaacttgggcgattgtctccgccagcttcgcccaggccttggactcaagagttgctcgcaaaagagagccgcgtcttgctcggatcgctgagctggcgggaaggggttctgtggggagaggtagctgcaattaaagagcagcatttggtgtaaacgtaagctccgggctgccctgcaaattttatatttttggttttgccattttggaaaagtagttcaaaagaaatagactcgaaatttgagcagaagcgtgctaagtctatgtaaatgtgtttggcctagcctttaattagtcctccaaaatgttgcaaatccgtaatcctatcttcgcaatccgatttgggagtattaaatttctgaaaagtcggtcgagctgcggtgcatccgggatttttcggccgggttgtaacttcggtctggggtagtatttttggagggtgggagtgcgtgggcatggctcagctttttgtttgcatttcttagctgttgaaaaaagaaaaaaagagccttgacttcccttgttttccccccttgcgcccaacgtgcgtccgctcccccgccgagcgcggagtcgcctcagttgcccaggcctctatctgcatggagggccgggccgccgtggccagatctgcgcacggggtacggacgtgcccgggcagatgggggcctacggggtgacaccgaggccgggacagcttcaggggccccagaaggacctgacccagaaattgaggtccccgctgccttctgaggagggggaggagttgctcctaggtctgaaccccgccagccttgccccgtaggaagctggagtgcgggcctcgtccacccacagaccccggggagcgcagggaaaagggtgcttcggtcgttccgatggcagtggagaccacggtccacactcacctctctgcgtctccaccgcagggctctccctacgaccacacacccggcatggcgggctccttggggtaccatccttacgcggcgcccctgggatcgtacccttacggggacccagcgtaccggaagaacgccacaagggacgc

SEQ ID NO: 16086 - DNA, 2300 bp, Homo sapien
tcagtgctgaacaaagcaatgaaaagctgccggggtggagaagcccaaggctgctgaagtgggagtctgtgaaccgtcaggaggacaaaagcaaattccactgcagcttcccctcaatcagattttccaagaaacagacatcttctcacctgaggtttctgccagacagaggttgatattggcttaacccactggcattgttttgttacgagggtcccaaaataacaagaagagtaggcacatttcataaaaaccatttttaggaaaccccattaaatgctcaaggtggtaacaatcaaatgtcagcaaaacaggggaggtttaccgtgggtgcagcctctccctgggaaggaaatgttaaatcaaggtcttgcaaggctgggaagccggaggagacatggcaggccttcctccctgggaagtattctgatagaagctgcaaaaaaccatcaagcaactttgaggacaatagaaaaggtgtcttaacataaaacctgctcttttgtttgttcgcttgtctttccagaagaagaaaaatgccaagatatcttcatagtcctacttcccaattttcttccccactgttcctcaacatcctcttttctttttaaaaaattgtgttgcttttctcaaatcctagagagcaaagacaagaagtaggcctggaggccctgcacacagcattgataaaacagaggtcttataaatcagctaaaaatcaataattcctatatggtagtttctcctttgcaaccatatcgccaagggacagggctaatgctttttctccaccaccagccccatttttctgtcataaaatttttaaaaaaaattctgcttaggaacaaatgggcaatcgaagttgctgagtcagtatttctactatctaattttattactttacaattgacataccttccctctggaaatgtttgcaattaattaattagcagtaatcttccccaagggatgaatttaatgaatactctccaattcttactttaaaaaaatagcatagatgtatccaagctgcaaatgtgtggatagttccaaagtgcattttgaaaaatcaagggatctatctattactgtgaatttttatcactaagtcaatctggtgaggactataattctttttctaactaggagtttccctggatgaacgcaaggtttctccaaggtaacagcagcagcagcagcagcagtagctgtgtttgttagtatttagaatggagcttgtcctcatgttaacaatctcttaagcagaggagtctctggtttgtggcttaagctccttgagcattctgcagaatgtgtttttaaaacggggtgtggggacctagagatgtcatgctaaagagatcagtgtaaggtgctagtggcaaacttggagttgaggtacgccccgtccaggaccccagaccttgccccgcctcatacaagaacccagagccgttgctatcttctgggccacaggctctcgcgtttcaactagaaaataaaactgggcccttgaaccaacccctatggctccttggaggagttgcagcaagagcctggtgcaactttaaaagtataaagcgcttttaaaagtataaagcgcggtgaccccggtaagtgaaaggcaaggctttctgaggtttctggcctgcaaatcccactggattcctgcagtgcccaccgaagaccttcccctaccagaccgacagtcccttttcacccctagacgtcgcgggttggaggctctcagaagggcagctggggccagagtactgagccttcagatgtgcagtctaccgtgctcgcaaattggaggttccatgtctcggggccaggcctagaggaggcagccccttcctgggtaccaacgagcctcccccacccctgccgccgcccacccatcagtgcccctttgaagacccctgggatggagtgagggggtggtcagaccgctgggcccagccgggcgtccaggaggagcgcagggaatgggccgccctcccggagcgctccactgcggctctccagcgccacccccagcggagcgcaggggctgcagcccggaccgggagccttcttcaggctccctggctgccccgcggccactgcgggaggcgcgcgcgcgaggcagccaagccttgccttcggaggagatgcccagggatcttagcaagcagcctgcggctgccagggatcggacctggcgagtttcccgacggaatctgagggatcccgaacctcggcctcgagggggcgctatccggcctactcgaggaccaggcagctgcagagaagctcca

SEQ ID NO: 16087 - DNA, 2300 bp, Homo sapien
cccatttttctgtcataaaatttttaaaaaaaattctgcttaggaacaaatgggcaatcgaagttgctgagtcagtatttctactatctaattttattactttacaattgacataccttccctctggaaatgtttgcaattaattaattagcagtaatcttccccaagggatgaatttaatgaatactctccaattcttactttaaaaaaatagcatagatgtatccaagctgcaaatgtgtggatagttccaaagtgcattttgaaaaatcaagggatctatctattactgtgaatttttatcactaagtcaatctggtgaggactataattctttttctaactaggagtttccctggatgaacgcaaggtttctccaaggtaacagcagcagcagcagcagcagtagctgtgtttgttagtatttagaatggagcttgtcctcatgttaacaatctcttaagcagaggagtctctggtttgtggcttaagctccttgagcattctgcagaatgtgtttttaaaacggggtgtggggacctagagatgtcatgctaaagagatcagtgtaaggtgctagtggcaaacttggagttgaggtacgccccgtccaggaccccagaccttgccccgcctcatacaagaacccagagccgttgctatcttctgggccacaggctctcgcgtttcaactagaaaataaaactgggcccttgaaccaacccctatggctccttggaggagttgcagcaagagcctggtgcaactttaaaagtataaagcgcttttaaaagtataaagcgcggtgaccccggtaagtgaaaggcaaggctttctgaggtttctggcctgcaaatcccactggattcctgcagtgcccaccgaagaccttcccctaccagaccgacagtcccttttcacccctagacgtcgcgggttggaggctctcagaagggcagctggggccagagtactgagccttcagatgtgcagtctaccgtgctcgcaaattggaggttccatgtctcggggccaggcctagaggaggcagccccttcctgggtaccaacgagcctcccccacccctgccgccgcccacccatcagtgcccctttgaagacccctgggatggagtgagggggtggtcagaccgctgggcccagccgggcgtccaggaggagcgcagggaatgggccgccctcccggagcgctccactgcggctctccagcgccacccccagcggagcgcaggggctgcagcccggaccgggagccttcttcaggctccctggctgccccgcggccactgcgggaggcgcgcgcgcgaggcagccaagccttgccttcggaggagatgcccagggatcttagcaagcagcctgcggctgccagggatcggacctggcgagtttcccgacggaatctgagggatcccgaacctcggcctcgagggggcgctatccggcctactcgaggaccaggcagctgcagagaagctccaaggtcaaggccctgggccaggccagggcttggagagccggaatctagcccgagtcctggggaggctgaggcggggaaccagatccccgaggacaaagatgggcgggccagtgggatccaccgacgctgcccggagctgctccaacgagagccgggcctgtggcgtgaacaaactttacttcagcgcaggggcggaggaaccgggctggaggcttctcccccgggcctctgctctcctccacctgccagtgctcagcctccgcccagccttcgcccaccccagctccctccccctcccccacgcgcctctgttcactcagactcctgtctcccctctcccctcctccttctccctcttgcctttctcccccacttttctcctgtctcttcttttgtattctctcctccctcgccgccccggttgcctctcgcctcctccgggccgcaggggaggaggtgagcgcgctgcgcccggggcctgcgcggctcagagggaggcgtttctcctacttctcccgggtaatttggagaggttgtgtgtgtgtgcgcgcgcgcgtgagctccaggcgaaaaggggtaggattcagcgccgagcagagagggtcagggtttttgacgttcctcgccagctgcacaaacctcccggagcaagtgtgagtgtgggtgagagtgcgcgcgcgcgcacgggctggctgcgcttggcacgcttggtggcccagggtcccggggcccggggtcccgtctggcggcccgggattaccgtgacgtcacattgagcctctggccaccttggactggga

SEQ ID NO: 16088 - DNA, 2300 bp, Homo sapien
tctaaagggagcagtcactactcaacttcagcaaattattgccatatggaaactggcatccagtattgccagatttttgggaaatttttttaaaaaaagaaaaccagaaagtcagatttttacatgaagtttcccaaatttcaaaatgctgttcaggctggatttagcccacaggccacgagtttgcagcccctgctttagtgagataactttttccattttcactctcagctctcagctctccaacttggctctctggctatccacaggacgtggacatgagcccagtggggctgggccaggaggcaatcccccttcccaactgacctcagtctcgccctctccaaaacagccaaggtttgtcactgggtcaggctgaagggcctggctccctcctgcggggcaaggtccctcccaagagggtcctttaaaactgactctggaaagtcagagcacacacccaccagacaagcctgaacttgtctgaagcccactgagacccaagccgcagagacttttctagctgtgatgatcaagacataatcgtgacctccaatgccccccacaagtatattgctcctgattctttcagcccctgaccttacttctcaaactgttccctgctgacccccagtcctatctgcccccttcctaggctggtccttactgacccctccagctccatcccctcaccctgtgccccacctttttcagatagaaaaaactttcttctccagtgcctcttgctgtttttcatctctgggccattgtcaatgttccctaaaacattccccatattccccacccagcactccacctctttagctcttcaggtctcagctcagaagtcacttcttccaggaagccttccttgattgtctttactagtttaggggctgaagtcaggcgttcccaacagcctgctggagttccccatcacagcttatctctcaactgtctttcctgagagagggagaagacattcctcagagacggttgtcacagggagaacttcaaaattgggattcgacctgagaggccacatggattcttggcttggcgcaggaaaggattcaagagtgagtggggaattcgtggaactgagggctcctcccctttttagaccatatagggtaaacctccccacattgccatggcatttataaactgccatggcactggtgggtgcttcctttaacatgctaatgcattataattagcgtaaaatgagcagtgaggatgaccagaggtcgctttctttgccatcttggttttggctggcttcttcactgcatactgttttatcagtggggtctttgtgacctctatcttattaaaccagtcttgcccaatttctatctcatcctgtgaccgagaatgcggaccctcctgggagtgcagcccagcaggtctcagcctcattttacccagccccctgttcaagatggagtcgctctggttccaacgtctctaacgcggggcccctgactgctctatttcccaaggtgtatctagcatctcgcactatacgaggccaagttaaggcttacacatttgcagaaggaaagaggtaaggaagcaacctgggaccttccactgtctctgtttccatctctctctttccatctctgttcatcccagaatctctctgtccctatccctaaatatcgaaaatttctgtctctgaccatctatcattgtggctgatcatctgtttctgaccattccttcccgttcctgaccccagggagtgcagggtgtcctagccaagccggcgtccctcctagtagtaccgctgctctctaacctcaggacgtcaagggcctagagcgacagatgtttcccagcagggggttctgaggctgtgcgcccagatcgcgagagaggcaagtggggtgacgaggtcgtgcactgagggtggacgtagaggccaggagtagcaggcggccggggaaaagaggtggagaaaggaaaaaagaggagaaaagtggaggagggcgagtaggggggtggggcagagaggggcgggcccgagtgcgccccccgcccccagccccgctctgccagctccctcccagcccagccggctacatctggcggctgccctcccttgtttccgctgcatccagacttcctcaggcggtggctggaggctgcgcatctggggctttaaacatacaaagggattgccaggacctgcggcggcggcggcggcggcgggggctggggcgcgggggccggaccatgagccgctgagccgggcaaaccccaggccaccgagccagcggaccctcggagcg

SEQ ID NO: 16089 - DNA, 2300 bp, Homo sapien
ataagctccttactccttcctaccagtctacccactcctaatctcctacatagaaattctggagctactgctgaacagaaattgaaggcctggggtttttctgaggccctttctggctccgatagtctgattgatagtatatatattgcttctggcctcttatgatggggctggtgaggaaggtgcgtaaggagtgaactctacaggtgacctcctcagtgagcctgatgtcattgtttctatctcttttttctgtttttgagatggagtctcactctgtcacccaggctggagtgcaatggcgcaatctcggctcactgtaacctctgcctcccaggtttaagtgattctcctgcctcagcctcccaagtagctgggattacaggtgcacgccaccatacccagctaatttgttttgtattttggtagagacaggtatcaccgtgttgcccaggctggtctcgaactcctgagatcaggcaatccacccatctcggcctcccaaagtgctaggattattggtgtgagccaccactctcggccccatcttttctatcttttatcctcccatggcctgtccccttgactcagattctttttgtttcttcttcttctttttttttcttttttgagacagtgtctttctctgtcacccaggctggagtgcaatggcatgatcatagctcactgcagacttgatcttctgggctcaagcaatcctcccacttcagcctcctgagtagctgggactgcaggcatgcaacagcacagccagctaatttttaattttttttagagatggtggagtctctctttgttgcccaggctggtctcgaactcctgggctcaagggatccaccctcctcagcccccaaagtgctaggattacaggcgtgagccactgcacctggcctggcttaggttgttgacagttggaaagacatctttctgtgcaggtatctggctaaagagtctcaagggtctgccagtcccaacttgaagaccccctagactggggaatcttctatcatggctgtaatgcactgttattaatgttccctgttacactgagagaaaagtcagtggctccacaacataataatgcttaaaacatgccatttcttcagtgtttctctatgaacactacacatgcattattttatttaatccttgctacaattctatggagttagaatgaatctcccattcctagacaaggaagcaaactcaggttaagtgactgactcaaggccacacatctatgtggtagggctggaagattctgacattcagagggtaactttggagaaccccagggctcagactcagattttcatcctggccttcctacctgctgtgagaagagttgatcagttgggatgagttgattatcatctccttcctttaactctcagccactcagggttgatcaactgtcctcagataatgggacaaacccctgccctcccacccccacgagcacccacataggtccaaacaggcttgaacttcctcagtgtgaaagggagccacagcccaatacatttcccttttctgggtcaggttcctcatctagcgtggagggcaactgtaatttttgccttttctggtaatagtagctcagttttcctctggagaaccatctctcccctgtcagtccattatgttttgagtgaaacaaattccactcctagtgccatcatgggtgtattaatattagctcacttaatggaacagcccaggggaagtggttgctcaatggcattactggatccaggttaggattatctgagaatacatttatctgcattttacggaaggcaaccgaggttcatagagatagtgatttggccagcgtcacaggcccagtaaaagggattgaaaatccaggtccgtccgaccctaaagcagggaactctgcctagtgtctcgctgtggaatgttagggatcctggggtacccttcagggtcttggctcggaaggaaaacattcccctccgaggggatggactatattaccaagggggtggagccagatgcctgagggggtgtggccagagcctggggcgtgtcacagccgaaggggcagggcggcagcagcaggcgtctaagtaacttcagcgcctgcgcagaggctccccagcgtcgccctaggctgggactctagtaggtcttcggctcagttttggctgcagcgcccgcgtagatcgcttcggccgggttctacgcccggctcaactatgagccggtgcgcccaggcggcggaagtggcggccacagtgccaggtgccggcgtcggg

SEQ ID NO: 16090 - DNA, 2300 bp, Homo sapien
atgccaaaaccattcaatggggaaaggacggtcttttcaacaaatagtgctgggaaaattatatatccacatgcaaaagaatgaagttggacccttaacttacacatatacaaaagttaactcaaaatggatcaaagatctaaacataagagctgaaactataaaactcttcagtgaaaacagaggaaaagcttcatgacactggatttctcaatgatttcttgaatattacgccaaaagcacaggcagccaaagaaaaatagataaatatgaccacatacaaattttaaacttttgtgcatcaaaggacactaacaacagagtggaaaggtaacctacagaatgaaagaaaatatttacaaattatatatctgataagggattaatatctagaatatttaaagaactcctgcaactcaacaacaagaaacccaacaaataaccagattttaaaatggccaaaagatttaaatagacatttttccaaagatcttctttggtcagtaagtattaatacattaaaagatgctcaacatcattaatcattagggtaatgcaaatcaaaactacaatgttataccactttacagccattaggatggctattattagaaaacaaaacaaaagagaaaataacaagtgtttgcaagcatatggagtaattggaactcttgtgtattgctggtggggatgtaagtggtacagtcaataaggaaaagcgtatggtagttccttaaaaagataaaaatagaattatcatatgattcagcaattccacttcttggtatatacccaaaagaattgaaagcaaagactcaaacaaatatttgtatacccatgttcatagcagcattattcccaatagccaaaagggcaacccaagtattcaccaatgggataatggaaaaacaaaatgagtatattaatgcaatacaatattattcatcattagaaaggaagggaattctgacacatgatacaacatggatgaatcttgaagaaattatgctcattgaaataagcaagtcacaaaagaacaaatactgtatgattccacttatataaggcatgcagagtagtcaaatcatagagctagaaaatagagagatggttaccaggggtgggggaaggggagaatgggagttattctttaatgggtacagtttcagttttgccagatgaaaaaagttctgaagatagctggtggtgatggtttcacaatgcaaatatacttaatgccactgaactctatacttaaaaatggttaaaatagtatattttatggcatgtgtattttatcacaattttaaaacatttaacatttttataatgaaaaaggaataaatgaaagagtctgtactgtctgatttaatttatttaaggtgcaaaaataaatctatggtgttagatgtcaggacagtggttatccttggaagacggaagtaactagaaagaagtatgaagaggcctctgagatgtgtgcagtctgtgaaattctttgagctatccatttgtgatttatatgatacattttttacatgaatgttacatttcaaaaaagattttagcaatgtcgatcacagacaccacagcagccctatggaatcagaatctctgggagtggaaattcaggaccttgcattttaaaaatctcccttctaaatttttcttaagactactggattttgagaatctttgctaaaggaagaggattaaatattcttccaatgcccaagatttcttcaattctattctaacaataaatatttcttagagaataaatttttgatttccttgcatcatttacctttttcctgttaggaaaatgcacatcattttttaggtgctgagacagaggactaagaaatcaatgacataaaaatgcatactttaatattttttctttaaaactattatcctaaggtgtcctacatactataatttataagtatctggaagagtgaaaacaattttattgaggccttgtaaaatatggcaggtgctaggacctcatggaactcaggtatcttcagtaggatgtgaaacatcacatcatggggcgtggtgcagtgtaagcaggtaaagaaaagccagttcttccacatgtaaactacttgaactccatttcatcttttttcataccatctctaagattgctgccgcatttgcttgttaaactgaaagcatgtttcttgcaaaggctctattggaaggagcagatcgaggtcttggagaagctcttggaggcctctttggaggaggtggtcagagaagagaaggaggaggaagaaatattggag

SEQ ID NO: 16091 - DNA, 2300 bp, Homo sapien
accatgacttggtggagggagcagaggctggaggccaggagacttgggttctcatttccactctgtgacttccaatctgtgggaccttggacaagtccctttagtccacagagccacagtttcctgacctgatacgtggaaagatgattctcttcctgctttccttacaggattgtcatgatcgtccaatagatcaaaggagataaacacctttcatgtgtggaaacctacagttctgagctcttgtcctcaaacctctgctcaatcttttccctcacctgccttctgtcatcttccccagaagccaggggaacccatacccctctaggtttcccttcctctcccctctgcatcctgcccagaggacatttgtcacgattgtccctctggtacagatgctctaaacaccgccacacaccaccattctttcattcattaactcattcacttcataggctggttgatgctctagtacgttccaggtgccagaacacgtgctgtaaaagacagacaaggtccctgtgctcatggagctcacataccacccaaggggggacataaagttaaacaactaggacaaattcggatagcgatgtaacaaatgaataaatagggtgataggatagagtgagcgtgtattttcgatttgagtcgtcgggaagggacctctggactgagacctgaacaactcaggcagagaaaacagcaagtgtaaaggtcttggggtgggtttgagcttaggatgtttacagaatggaaaggtcagtgtggctgggctgatccaagccccacccaacccacttagcacggccacctctctgaagcctccttggatcaacaggatgcttcccttgctgattcagctccaccctacttccacacatctgtggtcacaacacatcctgaccacactgggttgtgatagactctatacactggtctgggagctccttgaaggcaggggctatctcctctctagccagcactgttcacgcacacagcagatgatcagcatctgctaaagggattaatacattaatcaatagatgagtgaatgaatgagaaaacgactctcaggtccaaatggctcactcctttacttgtctaattgttaccttctcaaattccctgaccccgtatgcaaactgcagccccactgtccccccattccctcacccatcatataacgtgtgtatttattatgtttcccgtttcctctgtctccgccagcagaatgtaaactccatgaggtcaggaatctccgagttatgttgcgccagtgtaatccaagagcccggaacagtgcctggcacacagcgggcatatggaagaacaaatgtgtgaaggtgtgaatgaatgaataattgaaagaataaatagtagttctcagcctcacagaacacgggtcacaacctcaaatgacctgctaccctgcccataaataacagagatgcaggagtaagtgctgggctgtgacctgtcaacatgctaagccgctcaaacaaaactgcccaacagcccgctggccgcctatttgcagcactgggccctgagccgcacattcccatttcgttgataaagaaactgaccagatagtttaagtggcctgctgcggaagacagagctggtgctgcaccggtcgctgcttccccagtccttttttggcctcctttctgacgcgacgcagaccccagttctggagagtctgtcactcgctccccgtggtgggagatcagaggcctggtgtccttgggagcggcgagcggtgctcggcgcaggatagaaagggagtgcgcgcccgagtcccccagatccctgggaacccgcgccaccctcccgcccctgcccatccccggccgcgctgtcagtctccattagcgctaacaggctccagacggagcgggccgggcgctgggttaatgcaatcggcgcgttacctggggcgcaggctacattaccagcccggcccccgccaggcacggccagaaccagtcagcccgcgccctgccggccgccccgcgcctccagctcttccccggccccgcccgaacgccacacggcggagcccagccccagcccgcgccctagagcctgccaaggcgccgccggtcgggggccggcagggcgcaaggcaccagggatcccctcgccgccggacacgtgagtgcgccctgagcgcgggacagggctaggtctgcctgggaggcccgggccgagacgcgccagcagagggctagcgagtttgtagtgcagtgacgttaagtgtccgagaaggctcctgtggctgttgaagtgtcgcg

SEQ ID NO: 16092 - DNA, 2300 bp, Homo sapien
tcacataccacccaaggggggacataaagttaaacaactaggacaaattcggatagcgatgtaacaaatgaataaatagggtgataggatagagtgagcgtgtattttcgatttgagtcgtcgggaagggacctctggactgagacctgaacaactcaggcagagaaaacagcaagtgtaaaggtcttggggtgggtttgagcttaggatgtttacagaatggaaaggtcagtgtggctgggctgatccaagccccacccaacccacttagcacggccacctctctgaagcctccttggatcaacaggatgcttcccttgctgattcagctccaccctacttccacacatctgtggtcacaacacatcctgaccacactgggttgtgatagactctatacactggtctgggagctccttgaaggcaggggctatctcctctctagccagcactgttcacgcacacagcagatgatcagcatctgctaaagggattaatacattaatcaatagatgagtgaatgaatgagaaaacgactctcaggtccaaatggctcactcctttacttgtctaattgttaccttctcaaattccctgaccccgtatgcaaactgcagccccactgtccccccattccctcacccatcatataacgtgtgtatttattatgtttcccgtttcctctgtctccgccagcagaatgtaaactccatgaggtcaggaatctccgagttatgttgcgccagtgtaatccaagagcccggaacagtgcctggcacacagcgggcatatggaagaacaaatgtgtgaaggtgtgaatgaatgaataattgaaagaataaatagtagttctcagcctcacagaacacgggtcacaacctcaaatgacctgctaccctgcccataaataacagagatgcaggagtaagtgctgggctgtgacctgtcaacatgctaagccgctcaaacaaaactgcccaacagcccgctggccgcctatttgcagcactgggccctgagccgcacattcccatttcgttgataaagaaactgaccagatagtttaagtggcctgctgcggaagacagagctggtgctgcaccggtcgctgcttccccagtccttttttggcctcctttctgacgcgacgcagaccccagttctggagagtctgtcactcgctccccgtggtgggagatcagaggcctggtgtccttgggagcggcgagcggtgctcggcgcaggatagaaagggagtgcgcgcccgagtcccccagatccctgggaacccgcgccaccctcccgcccctgcccatccccggccgcgctgtcagtctccattagcgctaacaggctccagacggagcgggccgggcgctgggttaatgcaatcggcgcgttacctggggcgcaggctacattaccagcccggcccccgccaggcacggccagaaccagtcagcccgcgccctgccggccgccccgcgcctccagctcttccccggccccgcccgaacgccacacggcggagcccagccccagcccgcgccctagagcctgccaaggcgccgccggtcgggggccggcagggcgcaaggcaccagggatcccctcgccgccggacacgtgagtgcgccctgagcgcgggacagggctaggtctgcctgggaggcccgggccgagacgcgccagcagagggctagcgagtttgtagtgcagtgacgttaagtgtccgagaaggctcctgtggctgttgaagtgtcgcggacctgagctggggagggggtcggcacgctgccctcagcctcggtgagttcaatcccagccatttggggcaggcgagagtgggtgaacgaggaaaagtgctgcagggtcttcagccgcccccagagggctgtcagaagtctccaactcttgagttccggcgtgccccaacctctgtttccaaatttttccagcggacgcgcgcccttttctgggaaccctgcgtccgctcagcgcgcgctcatcccagtgtctaaggcgctcccgggtggtcttgggagttgcaagtagggaggaacggccgggtaaccacctcttttccctttatccaagcagagcctcggcgtgcccccaggaccggtaaagttcctctcgccagccgcatccatgcttctggcgcggatgaacccgcaggtgcagcccgagaacaacggggcggacacgggtccagagcagccccttcgggcgcgcaaaactgcggagctgctggtggtgaaggagcgcaacggcgtccagtgcctgctggcgccccgcga

SEQ ID NO: 16093 - DNA, 2300 bp, Homo sapien
tcttgatcccgtacacactgttccttatcatcgcggggatgcccctgttctacatggagctggctctgggacagtacaaccgggagggggctgccaccgtttggaaaatctgcccattcttcaaaggtaaagaaggggtgggagaaagtcacggttgttcataaaggcttccctgttgcccttggggaatctgctccagtggtgagatctaaggtagacctcctgtcatgtgggattcacaggtattgacaaggtcaacagtgtcccccattccaagttacgtggagagcattcagtgtgttgggaatagcattagcatagaaattctggaaacctgggttctaatccagcttacctgctgagtacccagagaatctatttcctgtatgggaaatttttacgtaagtatcagaagtacccagcacatacaccactactctctccttttgctcccatggcaggcgttagaagttgatcatggatctttttgagcccagccggaaagctgattcaaaatccttagtacaatagccacaactagttgattgcagctgaaatataacatgaagcctacttgcatttgggactaagaacacatctgcagaaagtaggcagagcaactgctatttcttggcccctatacagctgggagaagggcatggaggaagagttagtctctcccaagcactggttggagaactgggcacagatggcaacgagggccagtgtgactcccatgagcctcttctccgctggcacgtgcctcctgagtacctcttgtgtactcagtcctgtgggagatacagctggtgcaagagtcttataagacatgtgcattcgttactttttttgttgttaattgtcagaaattcaactcaaactggcttcagtataaaagagaattgacttctgttacagtaaagtccggggattggcttcaggtatagatagatccagatgcccaaataatgttgtctggaatctatcgctcttcttgtgtttcagatctgttgttttctgttagcatcagtctcaggtaaattcttctcaagtacctgcaaagatggccatcagcaaccccgggcttaaattttaccaagtttaaattttaccaaaagcaaacaagtaaacaaacaaaaacccttatagagtcatagtttccttaaaggtcccagagaagattctcattggtttaacttgagtcatatgcccatctactaaccaatcactgtggctgtcaggaagcagtgctctgattggccaggcatacatcttgcgatggaggaagagtggggagtagcctcgccaacacctcacaggctaatcatagcttaaggctaattccttgaaaagcaatgttgggcaggtaaacaatacatctaccctagaaaaaagctatagaactacccctaaaggagcttgtgatacattgaggaacacgatactggcacccgaagcaggtggctgagagtaggacccagaaagcacacagggctgaagttccaatcagggagtgcttgcttgggtttccccagaagcagttcggagacaaggatataagtgtaaagagttagtgcgggaagtgatccttagggagcagcaactggggatagggaaggggaggcagccataaagggtgtgcaccaagtcaatgccactctgggcagggagctcagtcccatcaggggagaatgtgaacacctgtcagtgttatcctgcccagggggcgagggagctggatactcacgatccagctcctaacgtggctgcccactgggggcaagcaggtggtgagtgggcaggggagctccagtggaaagagagagctctcgggcaaagagatggcaggggcctatggactctggcaatctgctatagcacgtttcctcaatccccgggccacggaccaataaccggcctgttaggaaccgggccacacagcaggaggtgagcagcgggtaagtgaagcttcatctgtatttacagctgctccccatcgctcgcatgaccgcctgagctccgcctcctgtcagatcagccgctgcactagattctcataggagcgcaacccctactgtgaactgcgcatgcgagggatctaggttgtgtgctccttatgagaatctaactaacgcctgatgacctgaggtggaacggtttcatcttgaaactacccccaccccaaaatctgtggaaaaattgtcttccatgcgacaggtcactggtgctgaaaaggttggggaccgctgttctgcaggaaacgagagacagagggaatgggagtgcagtggtggagccac

SEQ ID NO: 16094 - DNA, 2300 bp, Homo sapien
ctgtactgtttcagcagtcagtcttatttgacctttccttagctcctaaccaactttgattagattctcattagcaaacggtcattttgttttcaattctctttatcatttcttcattgtagattgtacaagggaccccaatattctcagaccaccttggattgtttgtttttcttacttataaaaaaccaggcctggcgcagtggctcatgcctgtaatcccagcactttgggaggccaaggcaggtggatagcctgaggtcaggagttcaagaccagcctggcgaacatggtgaaacactatctctactaaaaatacaaaaatttagccgagtatgatggtgggcttctgtaatcccaggtattcaggaggctgaggtatgagaatcacttgaacttgggaggcggaggttgcagtgagccgtcatcgcaccattgcactccagcctgggcaacagtagtgaaactccgtctcaaacaaacaaacaaacaaacaaacgaaacaaaacaaaacaaaagaaaaaaaacccaaacactttattgatagctaacatattacaaaggagtgactatcatcaagcgacaactcagcaaatgttacccgttgaacgcatccagtaacctcacccagctcaggaaagagcatgatgaatgtcctgaagtcctcatcatgtcctctcctagtcagtaaccccctcaaccccatcccagggtacacctctcctgacttctaatcctttaggtcagttttgcctgttgttgaattttatatgactggagtcagacggaagtgctcttctggctttgacttctttctctcagcagtgtgtgctagagccatccctctggaggtaattgctgtataatactccacttaggccaggtgtggtggctcacacctataatctcagcactttgagaggctggagcagttggatcacttgagcccaggagttcaagaacagtctgggcaacatggcaaaacccagtctctaccaaaagaatacaaaaattagccaggcatggtgatgtatacctatattcccagctacttgggaggctgaggtgggaggaccacctgagcctggggaggctgagtcttcggtgagccgtgatggtgccactgcactccagcctgggcaacagagtgagagcctgtctcaaaaaaaaaaaaaaaaacaacaacaacaaaactccactttataaatatatcctaatttatccattccactgttgatggatgtttgagtactttgcgatttggggttattatgaaataatgctgccataaacattctagagcatgtcttttggtgaacatgtgtacaatattctattgagtcaatacctagggcacaggataagcctatcttcagctttagtagctattccccaataggagaaatgttcacttttgtctcagtctctagaccaggtattctcagattcagcaatatggaccttttgggaaggatcattttttgttattggagactgtcctgtacattgcagtatgtttagcagcacccatagtctctatgccagtagcaccacctctcctcaagtcatgacaatcaaaaacatctcagatattgccaaatatcctccggggtgggggtcagggacaaaacagtcttccctcctgctgagaactgctctttatagtgtgagttctgtgaggacagaaaccttccctatttattactccaaggccaggcgagcaataggcacttaagagatttttgtcttttaaaagcagccatgagcgtggaatctccccagatgatttgcctcttctaggacagagtggtcctgggcacaggccatggctgatcaggtcaggcccatgtggtgcatggcagtggctagggtccctgagttaggggagagtggccaggtcctgtctccatcagcatgcatttgcagggactggtctgtggtcacggcctctgtcgtcctccctgacgacatttaccctggtcccctcccctctcctctgggcaggcgtggtgtcctgcaccttcacgagagcagcgggattcatgacatcggcctgccccagtggcagctcttgctctgtctgatggtcgtcgtcatcgtcttgtattttagcctctggaaaggggtgaagacatcaggaaaggtaatatctctgtgtttctctttcacttacttgggtgatcaaccttggggggtgtgattatttctagcaataattatgtagctggtggacaaaaaagatggagctggaagtgcaaggcctgggttcaagcccctgttctgccactgacttggacaaa

SEQ ID NO: 16095 - DNA, 2300 bp, Homo sapien
tttcttttgggaataaataacggaattgagttgagcctatgtattagtctacttaggctgccagaagaaaatatcacagactgggtggcttaaacaacagaaatcaatttaagattgtgagacagcattaatctcatggggttattttgagaactgagactgagttcctgcatacaaaactctcggcatagtgtttgccacacagtaagctctcagtaaatatttgtcaatgaatgtatgaagaaataaaagtggaaaatgcaaataagtaaaaacactgacaagattacagccaggaaatggctgttgtaattctaattagctatatagccttccaatattttcccatgcaaataaagacatatgttactaccaaaacgggaccatattatacctatctagattttcaaaaatatttcattattttattgaaatataagtcacatgtcataaagtttacctttttaaagtgtacaatctagtggtgtttagtatattcccaaagttgcactaacatcatcactatttaatcccaggacatttttaccacccccaagataaaactcatgcccattagcagttattcctcatccccgtctctttccccttccccagaccctgtcaaacactttctgtctccgtagatttgactattctggaaattacacataaaaagcatcatatgacatgtggccttttgtggctggcttctttcctttaccataatgatttccagcttcatctacattgtagcatgttcttcttatggctggatgatatgcctctgcacgaatacaccacactttatttacacattcatcaggtcatggacatgtgggttgtgcccactttttgactaggatgaatgacactgctctttgtgtacaagttttttatggacatgctttcagttctgttcggtagacacctaggaggggaattgctgggtcatatggaaactctatgttgaatttttggaggaactgcctacaccgcacaacagtttataacctgttattttttcctttcacaacgcatcctgtcttcattgttaataagtagctgtgcacatcactattttgagtgaatacatcatatttccttagccagcggtatcacagtgtgtttagtgaattccctattgttggacatttaataatcccatgaaagaggtttgagtgacttccttgtgtccccagcagcttgtaaatgacagttttccaggtgtgcccagagcactctgtatccccttaatttggtgatttcacattgccttgacatcacacctactgctcctccaccctatatgtgttgtctacaatggtgaaccccttgagaagctgaaccatgtcttgaattgacctttgtatccattatacatggccaggtgcctggcattttggtaaatgttcacagaatggatgggtacatgaatggatggatgattaaagccaggagctattgagagatggaatcatttttacattctgtccaaaaattcctgctttggaaggtagtgatttacctgagattggaagtgtgtgagaaggcttggctagttggcaggatactgtgaagctaattcaggcatcagaaagtggactggataaaatttaggatcgcttccaagcttgaaatcctggaacgctatgaaacacaagccctgggagctgagatatgtcctaacttacccagctgagctgtgaggtgtgagtggctctaacattttccagttgtttctgaggacctcagatcaaagcttccctttgcctaaaagcatctgcctgctggtgcgggcctttgggggccctcagagagcactaaggttagagtcctgcaagggtgacaccgttatgccacaagcagttgggcgagtttacagctctctgtaatctgagagtagagtccagattggtttgatgaaagagggtaaactgtgagtgggcgtggcttgaggccccactggaagcccagggagatctggggaaagggagggcttttctgatctctcccaattagaggattaggcaattggcagtgcagggcggtaactgggggccagggtggcgccagggctggacagcacagtccctctgagctgcacggagacctcgcaggcccccggaactgtcgcccttccaggatgtggctccctgctcttgtcctggccactctcgctgcttccgcggcttggggtgagtccttctgaagtcaaatatgcggggcactttttgaaatccttgttctgggccgaactgggcgcagatgcgtagaaaggcaaagacacaaaaggtccggct

SEQ ID NO: 16096 - DNA, 2300 bp, Homo sapien
tcctcatctctgggccttagtttcttttgggaataaataacggaattgagttgagcctatgtattagtctacttaggctgccagaagaaaatatcacagactgggtggcttaaacaacagaaatcaatttaagatcgtgagacagcattaatctcacggggttattttgagaactgagatcctgcatacaaaactctcggcatagtgtttgccacacagtaagctctcagtaaatatttgtcaatgaatgtatgaaggaataaaagtggaaaatgcaaataagtgaaacactgacaagattacagccaggaaatggctgttgtaattctaattagatatatagacttccagtattttcctatgcaaataaagacatatgttactaccaaaacgggaccatattatacctatctagattttcaaaaatatttcattattttattgaaatataagtcacatgtcataaagtttacctttttaaagtgtacaatctagtggtgtttagtatattcccaaagttgcactaacatcatcactatttaatcccaggacatttttaccacccccaagataaaactcatgcccattagcagtcactcctcatccccgtctctttccccttccccagaccctgtcaaacactttctgtctccatggatttgactattttggaaattacatataaaaagcatcatacgacatgtggccttttgtggctggcttctttcctttaccatgatgttttccagcttcatccacgttgtagcatgttcttcttatggctggatgatatgcctctgcacgcatacaccacacttcatttacacattcatcaggtcatggacatgcgggttgtgcccactttttgactaggatgaatgacactgctctttgtgtacaagcttttgtgtggacatgctttcagttctcttcggtagacacctaggaggggaattgctgggtcatatggaaactctgtgttgaactttttgaggaactgcctacaccgcacaacagtttataacctattattttctcctttcacaacgcatcctgtcttcattgttaataaatagctgtgcacatcactattttgagtgaatacatcgtatttccttagccagcggtaccacagtgtgtttagtgaattccctattgttggacatttaataatcccatgaaagaggctttgagtgacttccttgtgtccccagcagcttgtaaatgacagttttccaggtgtgcccagagcactctgtatccccttaatttggtgatttcacattgccttgacatcacccctactgctcctccaccccatctgtcttgtctacaatggtgagccccttgagaagctgaaccatgtcttgaattggtctttgtatccattatacatggccaggtgccaagcattttggtaaatgttcacaaaatggatgggtacttggatggatggatgataacagccagggactatggggggacggagttcatttttacattctgtccaaaaatccctgctttggaaagtagtgagttctctgacaccgatggtgtgtgacaggaggctggaccagttggcaggatattgtgaagctaattcaggcctcagaaaggggactcgatgaaatttaagatcgcttccaagcttgagagcctggaaagctatgaaaacacaagccctgggagctgagatatgtcctaacttacccagctgagctgtgaggtgtgagtggctctaacattttccagttgtttctgaggacctcagatcaaagcttccctttgcctaaaagcatctgcctgctggtgtgggcccttgggggccgtcacagtgcactgaggttagagtcctgcaagggtgaacccttatgtaacaagtagttgggcaagtttacagctctctgtaatctgacagtagagtccagactggtttgatgaaagagggtaaactgtgggtgggcgtggcctgaggccccactagaagcccagggagatctgaggaaagggagggcttttctgatctctcccaattagaggattaggcaattggcagcgcagggcggtaactctgggcggggctgggctccagggctggacagcacagtccctctgaactgcacagagacctcgcaggccccgagaactgtcgcccttccacgatgtggctccgtgcctttatcctggccactctctctgcttccgcggcttggggtgagtccttctgaaatcaaaatgcggggcactttttgaaatccttgttctgggccgaggtgggcgcagatgcgtagaaaggcaaa

SEQ ID NO: 16097 - DNA, 2300 bp, Homo sapien
tatacacacacacacatacatatatatacacacacacatatatatatatacacacacacacatatgtatacatgtaatgcttgttaatttccatttttagcaaggagaattcttcgcctctctggttaatgatagacaattacatctaactcaatctggtaaagtcctattcagtaatttaaacagtttctttagatagcataatcacttcaaataaatccatagcctctcatatttgctccccaccccacccgcactccttgccaagatggtgtctggctgtgtgagttatgggatgctaataggaccacatgagtgggagggcagagggagcttggacccacttgcagaagtccttgcgttgttgtggtctccacagcaatgtcccactgccggggttcctgggaggaggatgaattcttaagtggtgagctcatggtctgtcctctcatcttgatcaaagcccactgattccccctgactgactcagtgccctacctcaccctgcccagtgctcaacactgtgctccagcacaggccaggttgtggtttcactctgttctcgagtccatgaagcatctctgtagccccctgccttcctcctcctctagctcccagccaggttggtagtcacctccaagttttcttcgaagccacacggtgatgtctggatcaatttcaaggaatttgggatccaagggaaataggaccaccccctgagatctctcttagcccaaccacttctgctctgctgtggctgccccaggttggttgagatgtggaacccttctgtcactatcctcctggagaacccttcactacttagcacacttttcatccttagcacacatttcagcccatcactgcaccccatcactttacctcatcgctgtatccctttaggacctatgtctaagagggggagtcagggcactttgcatcacacatgctttccctacctctgttcccttctcctttccaaaatccactgtacagaaaggccggattttcctgtttgtcttactttggggatcttctccaccatacaccaccctttcgttgtaatggttgctagaggcaaagggaatgttttgtggtatagaaatgcaacatatattggcttgctcttcccaaaagctctttcttattgcactaggtagatacaattttctttaataacagcttttaaaaaatgtcaatttaaagaaaaaaaatcaagtaaattgatagtcaatttggtagtgggaatggtacaaattgtgaagacagaaggtctagggctgagctttgggaagccacagggcacaagtaagaagctgtgatgaatatgtacatggaaaagtcctaggtgtactccaaggaggaagacagtcatggctacaatttgttagaaaataagagaggttggaaaagcaaagcactaaaaagttcaggagaatcaggggaaggttctcggaagaggtggcagttaaattggattttaaagaagaagctggagaagaaagacatccaaaatgggggtggtggtgttggcaacaagctagtttgtgtgaagtgctttaaaacagttgggtgagcagtggtgtacagacttgataatatttctggtcagatgaagggacagatttgaaggccagggagaatcttttcggtggcaactatgaagggccagaggggaaataatataatcgaagaagcctcaaggttgccaaggaggctgtagaccaaatggccattgaagactcttgttggcagggccagccgggctgcttgtctgagctggcagtgcttgtgccttcagagccactcgcttgtcccagcagcaaccttcttcctcttctcagaaacttctcagcttctctgacctgcactgtgtctttctggcatcacaggcaggtctggaaacctcattcatccttgggtctctagaactcataatcttaaaatgtcttgcctggtctggaatgtcttttctgtttcccccatcccggaagtccaaagcctatcaaattatctttccccagctcaatagttaatcatcagcttcttatgtaaatcagaacaggaaagtcttgcttagtcaattcctttgagaatattgttctgatgctgatcttcagtaactctgctgcctctgcctgcctattcagcatttgcctgttaacaggaagctctttctggctcccaactgaagctctctgaggccagcagccgccgtcaatgttcacagagtgcaggcaggcagccaaatgagtgggaattgggtgcacccaggccagatcctaatttgggctatctgg

SEQ ID NO: 16098 - DNA, 2300 bp, Homo sapien
gtggttttaatttgcattttcctgatgattagtggtgttaagaatttgttttcatactattgttggccatttgtatattctcttttgagaaatgtctattcatgtagtttgcccactttttaatgagattacttgtttttttccttgctgatttgttgagttccttgcagattctagatcttagtcctttgtcagatgtatagtttgtgaatattttgtccaattctgtaggttgtctatttactttgttgattatttcttctgctgtgcagaagccttttcatttaattaagctccatttattatttttgattatattgcatttgcttttggagtcttagtcataaattctttgcctgggtcaatgtccagaagagtttttcctaggttttcttctcagatttttctggtttcaagtcttacatttaagtctttagtttttttctatttaagtatttaattcatcttgagttaatttctgtatatggtgagagacagggattcagtttcattcttctacatgtggctatctagttttcccagcatcaatggaaattttaaataagtgagatcaagatcctgaagcatttctttgaagaattgtaacagaagaggaaacatggctttaccagtacaattctaaagacaatgcacaatcaaagcgatggctactaagaggtggatgtggttcagtcaaagcaaaagcagactgggcaagagcaaaggtcttagcaacagttttttgggctgctcacagaagtttgcatgttgacgttcttgaaagccaaagaataataacatctacttattatgataatatttagagaaagctacagctttagcaaaaatgctcagaaaagcttcaccagagagtccttctccagcatgacaatattcctgctcatttctctcattaaacaacggtaattttgccagagttttggtgagaaaccattaggcattcaccttaaagttctgctttggcctcttctgacttatttttatttcctaatcttaaaaaatttgtaaggggcactcatttttcttcagttaaaaatataaaaatgacttcactgacatggttaaattgcaagaaccctcagttctttagggatggactaaatggctgacattaatgcttacaaaagtatcttgaacttgatgcagcttctgctgataaaatttatattcttgttatcttttaattccattttccacaacttttgttgaagtcccttcatagttattggttgaaggacaatgaacagatttattgccttttttctattcttttttaaaaatttatacataatagatgtacatagttttggggtacttgtgctaatttaatatattcacataatttgtaaggatcaaatcattgtacttggtgtgtccataaccttagatattttttcttcattccagaaccatgttaattcatctcttcttgctatttaaaaatgtatgatagaatgttataaactatagtcactctacagatctagcaaacactaggtcttatttcttccatgaaaccatatatttgtacttattaatcaacttctcttcattcttcccctcctctctacccttacctgtcttttttatctcccacagaagagttatttgtttaagttccttgtaggttctagatattagtcccttgtcaggtgtatagtttggaaatattttctcctattctgtaggttgtctatttactctgttgattatttcttctgctgtgcagaagctttttagtttgattaagtcccatttaacatgtgatatttgtctttctgtgcttggattatttcacttgacatcatgacctccagttctgtccatgttgctgcaaatgagaagatttcattcttatggctgaaagatatttcattgtgtgtatatatcacattttctttatccatttatccactgttgagcagttaggttgattccatattttgactattgtgagtagtgctgcaataaatatgggaatgcagagattttttttgacatattgatttgctttgttttggacatatacccagtagttgaattgctgaatcatatggtgcttctatttttagttttctgaggaaactccaaactgttctccataatggctgtgctaatttacattttcatcaacagtgtacgagggttctccgttttctgcactcttgccagcatccgttttttcctgtctttttgataaaaaccactttaactggggtgagatggtatctcattgttgttttgatttgcatttctctgatgattagtgatgttgaaca

SEQ ID NO: 16099 - DNA, 2300 bp, Homo sapien
tggatctggagggcaattcattatatcaataagattccccagctctgacttacagaatgtgggctctgattaggtaaactgacttcccctgtttgttcccttttatactttaattaaatataaaattactttaattatttaaatatgtatgcattggcagtctactgtgtttaatatattgatttagacatgaagacaggttgggatgtcatgagcttggaatcttgaaatcttgaaaattctggaatgttttctcaaaacaatttacattagaattagctggggtgcttgttaaaaattcagttatccatcttacttttaccaactcagattcttcagccatttgcattgatagccactccccaggtgatttttctgtgtacagagtttggtcttgtgcagaatctgtatgtgccagttaattctgttaagagcttactttcttaaagcccagatacctcaaatgtttctaaattcaacatttttttatgtttagtagtttttttgtatttctgtgaaagggaaaaaaactatgaaaattgcttatgaatactactctcacgggaagaaaataggctaaaatatgtggttcataacctaaatgaaactaaatatccagtgaattagtcattttattattattattattattattattattattattattattatttttgagacggaatctcactctgttgcccaggctggagtgcagtggcgcaatcttggctcacaggaacctccgcctcccaggttcaagagattctcatgcctcagcctcgcgagtagctggaattacaggtgagcgcccatgcccagctacttttttttgtatttttagtagagacagggtttcaccatgttggccaggctggtctccaactcctgacctcaagtgatctgccagcctcggcttcccaaagtgctgggattacaggtgtgagcccatgcacgcagtgaattaggcattttagggagaatggtaggtcactagaaattttgggtttctgcactaagtgtttctgttataaaattgataactcacaatccaacttagtggtgaatatgatttagaagaatgtctggttttggctaagagatgacttttcttttttttccagtttgtatctggcattaatgagggaaggtgctgatcaatttttttatgtccctaaaagatgagtcttctattcagcatttccctaactcatacttgtgcacatctctcagacctaccagagtggtggttctcaaatgttgtgcacaagaattacccaagatgctttttaaagagcagatttctgggtttaatccctagaatttctgaatcagtaagtttgaggctaagcttaggaatcttcatttttacattcataccttctccctaagtactcaggtactttgggaaaacattagtaaactgtaaactccttttaggggacagagttgtcttattactttgtatatatccccaaaggtcaaggatggcccactgcccataagtcatcagtttcaatatttgttaactaaacaagggctgatttagcaagggctaaatcagacaatgtgacaaagctcttcccacctctgagacttttttatttttgtggtagaattttttttacttgattattctagaaaatgcttaggattggatgagttcaaaaaggtaatggcttgtcttcaagtaaggctctgaaaaatgaaatgatacagattttaaacaaacaaatgggagatttataggcctatgccagcttgtgagaagagtgtttgccaggtgtttttgacattcccgtcagaaaattttttgctcaattttgtgtcccattttgttattttgtagaattcatgaaaaattagttttcttatttataattttagggataagagatgtcataagaagaaataaaggttttgtgtacttttaagtgaagggattttcatgaaggagcagattaaggtttataggtaattgaattgagctcttaagttattgaagtccattatgtggtcactgttgacaacataatttgttgagtgttctttgatggttgaagaaccccaaagagggtgtgctttgtgattttttttttcaatttaggatagctagagaatcccacagggatgcctttggcttgaatagagtgaaaagttggagggggccaagactagtgctttcacattgacaataaaatggaccaagagctgaaattgaagtcagaagcttggcttaatatgaaagcgttacctaaagtcatggattccaattggaattttcttggaaaacttttcat

SEQ ID NO: 16100 - DNA, 2300 bp, Homo sapien
aagaaaaacgcaaaacaggtttgtgcctccatcatactaggtctgataccaagaagaaataaatatacctaaggtcaatgatagtttcattcaaccatacaaacccaaataatccaagagcctaagattttaaattaaaaattacttcaaagaaagagcatggaaacgtgaaatgtgacccggaatccgcaattaaatcggtatattcttacctcttcagtctttccaacgcagtcttgcagggatacaggacctgggtgagggtgtggagtgcttccctgcacctggtagatctacataactgttcctagcaacctcttgaggaaataatacattctatagaatgttgggtacctaagctctctgttttggatttgaaaggctgcgttttagtgatttttaagccaaacaagatttatcccataacagccccccaaaaacacgcacagaaaagaagaatgagaggggcgggtaggtagagaagcagttattcactttataaaacaattctctataggattcttttgtcagtttcctagactatgtaaaatgtgattcaaattaaaatatttaaatcacatacccacatcttgacatgggcagctatttgtaaaatgaggcaaacccacactgggaaataccaaattaaaaaaaaatcagggaaaaaatattttcttctgggtggccctaaactgctttctttttccccattgcaaatgtatttttatgctgggttacatttccaaaacaggagtgttttttttctatcgttgaaatgaaacaaacaagtttgctttcagagctacagaaatgcccaactgttaggaaaaaaaaaacaaaaaaccgttttccactggccgcttgcctctcttatccccatgcaaccttgcctattggcccctttccctaggagagcccctggggctgtctgatggaactgattgtaaaactattttgtgcagtaaaaaagtcgtttcttcaaaatctgagaccacccagaacatgcccaatctttggcaaatatcgactggtttcctcagtatttgactagctgtacaccgagtaactgtcccgggtttctgggtctttatctgagaagaaatgagggggaaatgtttcagaagatgaaaaaaggaagaaaacctctcatccaaaatctgttcaaaattcattttgtgcgtttcgaagggggaggacaggagaatttagtgcaaagacggcctccaccaaacgaaaccgtccaacatttgcaaaagcttttaaaataaactgctcagggatcaggggtttgctggaaactcccggtcgcttgaagccctgtccctccactccgggcaccctggcctccccagggtgggcacccctcctgcacggagagcggcggctgggatctcggagcagggtcggctatggccctggaggcagcggctcacagagaaaaagctctggcttttctccgcccgctgcgttcctcttcttacagcctcgggtgtcacatattaggtgctcaataaatgtggacataggaaacgaaaagtccgaatctgtccttacgcccccaaggcgaattctggggcgcgcgggtttattccgacccactaccacatcgcgtttcctgaggtaacccggcctcggctctgcggccccagcggctggagagccacggagaaggcgggctacgggcgacaagatggagagccggcccgagagggacagaggccgcgctggcagcgagctggggggcccacctgaccgtcctgcgggcagcccggccccgcgctcccattgacaaggaggtccgcgccgccggcgcgtggggcgggggcggaggcggggtggggcgccccggcgcgcgcccggccccactccccgcccccgccagtcccgcaagcacccaccccgggggagccgcgggccgggagggcgctggggggaggggcaggccgctccgcgagcgcgtgtgcgcgccgccgccggctgacgcgaactccggcgcgcgcctcccccgccccgcgccctccccgtcccgggggcccggcgcgcggccctgctgacgtcagctggcggcccgcggagccgggtgcgcagagccgctggcgcactcgcgcgctgcgctggcctcctccccgccccgggcccaggcgcgcgcgcgcttgttcgctctcccattttttttttcccctccctccctgcctctctctctctccctctccctcgagctcccggctggctgcggctccctggcgctctccctctctctccggtaggctcaccgagcgatgcgagctctgggagacagc

SEQ ID NO: 16101 - DNA, 2300 bp, Homo sapien
ttttccactggccgcttgcctctcttatccccatgcaaccttgcctattggcccctttccctaggagagcccctggggctgtctgatggaactgattgtaaaactattttgtgcagtaaaaaagtcgtttcttcaaaatctgagaccacccagaacatgcccaatctttggcaaatatcgactggtttcctcagtatttgactagctgtacaccgagtaactgtcccgggtttctgggtctttatctgagaagaaatgagggggaaatgtttcagaagatgaaaaaaggaagaaaacctctcatccaaaatctgttcaaaattcattttgtgcgtttcgaagggggaggacaggagaatttagtgcaaagacggcctccaccaaacgaaaccgtccaacatttgcaaaagcttttaaaataaactgctcagggatcaggggtttgctggaaactcccggtcgcttgaagccctgtccctccactccgggcaccctggcctccccagggtgggcacccctcctgcacggagagcggcggctgggatctcggagcagggtcggctatggccctggaggcagcggctcacagagaaaaagctctggcttttctccgcccgctgcgttcctcttcttacagcctcgggtgtcacatattaggtgctcaataaatgtggacataggaaacgaaaagtccgaatctgtccttacgcccccaaggcgaattctggggcgcgcgggtttattccgacccactaccacatcgcgtttcctgaggtaacccggcctcggctctgcggccccagcggctggagagccacggagaaggcgggctacgggcgacaagatggagagccggcccgagagggacagaggccgcgctggcagcgagctggggggcccacctgaccgtcctgcgggcagcccggccccgcgctcccattgacaaggaggtccgcgccgccggcgcgtggggcgggggcggaggcggggtggggcgccccggcgcgcgcccggccccactccccgcccccgccagtcccgcaagcacccaccccgggggagccgcgggccgggagggcgctggggggaggggcaggccgctccgcgagcgcgtgtgcgcgccgccgccggctgacgcgaactccggcgcgcgcctcccccgccccgcgccctccccgtcccgggggcccggcgcgcggccctgctgacgtcagctggcggcccgcggagccgggtgcgcagagccgctggcgcactcgcgcgctgcgctggcctcctccccgccccgggcccaggcgcgcgcgcgcttgttcgctctcccattttttttttcccctccctccctgcctctctctctctccctctccctcgagctcccggctggctgcggctccctggcgctctccctctctctccggtaggctcaccgagcgatgcgagctctgggagacagcgacgccgcctcccgctagagacctgcccctcggcccggccccctgcccaaccctgcccagcgcgcgggggtcggcgaaggcgccgcggacgcaccgacggctgaagagcggcgatgcacatgcactagcagcaccccctaactcactccctccacatcccgcgccgccgccgccgcctcctccacctcctcctccgccgccgccgcctcctcctcctccggcagccgcggcagcaggacccaccctgccccccaccccaccctctgtcggctccggctgcggctccagcctcgactattattttatttattttgggtcgtgcacaagcctcagtgcctgcagtccgcgcctcctcggcccgcgggcgcctcctcccttggctccggagccccagaccccggccaccctcgattcgacaaccccagacccctgccagctgccgcgagtctccgctgctggaatcttgttagcggctgtctttttggagggttctggtttcccgacatttttgtttccagcccaggagaggatatcgtgattttccccccttgagcccaggctctgctctctgggggggtggggggcgctccaagccggggagccgtgccagccgagtcgtgcgggctgtggcagggaaggggccaccatgggatgtactctgagcgcagaggagagagccgccctcgagcggagcaaggcgattgagaaaaacctcaaagaggatggcatcagcgccgccaaagacgtgaaattactcctgctcggtaaggaccgccgctgctacccccatcccccgaccccggccactccgcaccccctgccaccagctcccccaccccactcgcg

SEQ ID NO: 16102 - DNA, 2300 bp, Homo sapien
gaggggatgtagaaaccacagcctccaattcagcaccaaacgcatgaacagcagacacttgatcctccaccccagtctagggctgggtcccctccatgttagccaagttcaaaatcactgccccaggaaaagagcagggggaagtgggattacggaccttgggggatagggaggtatggagggaagaggagaaagaaatagagacagaatgaaacagagacacagacagaaatggaggcagtgagacacagaaaatattccacaagcaagagtaatgatcataatcatgccaatagtgtgatgttctgatcaatatggcggacactgtcattcatacaactacaggcgctccccttccccctcccaaaaaacacccacccaggagttagggtggaggacccagaaccaacgtagggagtgggggaggggagtcaaatataggggtgtgtgtgtgtgtgtgtgtgtgtgcacgaattaaaaaacaggcctggagagcaatgtggagtaagcaatgtaataaaaacgatttaaaaattattcttaataaaagtacgaatcccaatgccacagggacttacttcatctgcttcacaatggtgctttttcctgattctccagcccctgttgggacacagacagtggggaaaaactggtgagtgtcagcttaagggaacagggggagggggggactaaggcatgcgagggggtgggcgatcctgggcacatggtggtgccaacttggggaccaggtctcccgggcgcgagtggggtgggggagctggtggcagggggtgcggagtggccggggtcgggggatgggggtagcagcggcggtccttaccgagcaggagtaatttcacgtctttggcggcgctgatgccatcctctttgaggtttttctcaatcgccttgctccgctcgagggcggctctctcctctgcgctcagagtacatcccatggtggccccttccctgccacagcccgcacgactcggctggcacggctccccggcttggagcgccccccacccccccagagagcagagcctgggctcaaggggggaaaatcacgatatcctctcctgggctggaaacaaaaatgtcgggaaaccagaaccctccaaaaagacagccgctaacaagattccagcagcggagactcgcggcagctggcaggggtctggggttgtcgaatcgagggtggccggggtctggggctccggagccaagggaggaggcgcccgcgggccgaggaggcgcggactgcaggcactgaggcttgtgcacgacccaaaataaataaaataatagtcgaggctggagccgcagccggagccgacagagggtggggtggggggcagggtgggtcctgctgccgcggctgccggaggaggaggaggcggcggcggcggaggaggaggtggaggaggcggcggcggcggcgcgggatgtggagggagtgagttagggggtgctgctagtgcatgtgcatcgccgctcttcagccgtcggtgcgtccgcggcgccttcgccgacccccgcgcgctgggcagggttgggcagggggccgggccgaggggcaggtctctagcgggaggcggcgtcgctgtctcccagagctcgcatcgctcggtgagcctaccggagagagagggagagcgccagggagccgcagccagccgggagctcgagggagagggagagagagagaggcagggagggaggggaaaaaaaaaatgggagagcgaacaagcgcgcgcgcgcctgggcccggggcggggaggaggccagcgcagcgcgcgagtgcgccagcggctctgcgcacccggctccgcgggccgccagctgacgtcagcagggccgcgcgccgggcccccgggacggggagggcgcggggcgggggaggcgcgcgccggagttcgcgtcagccggcggcggcgcgcacacgcgctcgcggagcggcctgcccctccccccagcgccctcccggcccgcggctcccccggggtgggtgcttgcgggactggcgggggcggggagtggggccgggcgcgcgccggggcgccccaccccgcctccgcccccgccccacgcgccggcggcgcggacctccttgtcaatgggagcgcggggccgggctgcccgcaggacggtcaggtgggccccccagctcgctgccagcgcggcctctgtccctctcgggccggctctccatcttgtcgcccgtagcccgccttctccgtggctctccagccgctggggccgcagagccgaggccgggttacctcaggaaacgcgat

SEQ ID NO: 16103 - DNA, 2300 bp, Homo sapien
cagtccttaacgtatcatagtcctagcgattcccaagcaatcatctctccattcaggataataaaatggaaaaaaaaatcccatgggaacaatgaatgttttccaaaatggaaggagaaaagtattccaaagccacactgactttgctgggttataatcagtataggagatttttaggaagagctggctgggagatgaatacatttgctcctggaagatctcacacaccgtgtgtgtgtgtgtgtgtgtgtgtgtgtgtgtgtgtgtgtgtgtgtgtgtgtgtgtgtgtgtgtgtagggggtgtgccttttgtactgtgtctgctatctggctgagattcagatatcacgctccccacttagtcaaagggagacagacagaccagaggcctgtggcttgtgccatgcctgaagatgaggcactccttgctctgggctgtaataaaatgagttaaataaaacgagtcattatgtgtaaagtgcttagtatgtgcctggcagccagtaggtgctcaacagatggtagctgtttttattcctactattgttattaagaagaatgaagcactgtactcatctgggttagttctaacgatctgaataggtgttttctgcaaccagacaccattccctgctgtgctcattcctgtatccacagcacctagctcaaagccttgcacatcataagcctgcagtgaatggacccatccactcccccattccctctttccacaggccctggctccgtgaccaaacccaaagccggccttccaggaagaagtgcttcctttgcagaatccacttcccaacttggcctccaggaggagcggcagatgggcccaggtccccctgctagtgcccagcttctccaccgcaggctggcctcggacataccctcagtcacccaattccccagtacctggaggagccaatgcctgggctggatgactctgccccatggaattaggattttgtgcattacatatcaaattttacatttaaagctgtctatcatggatgatttatcagacacagagacaaccaggacagttttcctctgtgaggaagatgatttttagcaaagacaggacatgtgtataatagacaatcaaatcacacagcaatcagagatgaatgctctccatccagaggctcagatgcagagcccaggtgcttggaggctgtacctgccctccgcccccttctccaatctccaggtcccagagggaggatcactgagattcagtcccaaacagggacaaagagctgcttctggaaagaattctgaggctattttctcctctccctctctccctccctccttttatttagccttgccagtgtagctgtatatagttcagtcttaacagttaatataaatgtttgcaaattagaggcttttatatagtacttattccattcaccacttaatagaagactggaaatgttacccccaaacagtccctgttctaggacactgactttctacaggaaggagagccctgtaggtcctcatacttacccaggggaggcagaaaacatagcccttggtgtaaaagaggaaaggcagtcaattcaaatggctatcctcactccacaacaaggcaaggaaagttcttctaaggaggggagatggtggccagacaaggcttgttttgtttaatacatatttttttctgtacaagttaattgcccaaggacaggtacttagacagtgttgtggcagctccaatttagaactgtcaccaactcttcctcatctgcaaaataaatccgggagttttgtagcccctgcaacttgcaaagttggtgagtttgctgggagtttgccagaggggtggatgcaatggcttaggttggtgactgtgccaccatatatctttcaaacatagcggagtctcttctcgttcatttaaggcagcccagcactataaagaggaggcagtggggtaacacagacagaacctcttgttgctgtgcttatgggctcaggggcctacctttctctccttatcaccatattcgatgcccaaagtgtccatggcccggacgatggctgccagggactggatagtgttgctgtagacaacaggcttgtactgtttcacgtcttctccggagaagccatcttcatggatgatcctagagaaaaaccacacacaccacacctgatgagagcattgtcctcatcaacacagagagcacaggcatgagacgcactggctgactgtgggccaggtccagccgagatgctgagttactgagttgctacattaatgtcataaaatctaaaggaaaaag

SEQ ID NO: 16104 - DNA, 2300 bp, Homo sapien
tgatatgcttattttaataagaatccaaaacatagcccatctagctcatgactgcccagatattagaatggggccaaagtatgggtttaactttttttaaaaaatgagttaattaggctgggcacgatggctcacacctgtaatcccagcactttaggaggccgaagcgggcagatcacgagatcaggagatcaagaccatcctggctaacacggtgaaaccccatgtctactaaaaaatacaaaaaaaattaactgggcatggtggcgggcacctgtagtcccagctacttaggaggctgaggcaggagaatggtgtgaacccggtaggcggagcttgcagtgagctgagatcatgccactgcactccagcctgggcgagagagtgagactctgtctcaaaaaaaaaaaaaaaagggttaattaaataaaacatatgaatataaggacggggtgtcatgtggattgggcagaaattgtgaaaacaagacagaaagatctggagtttgggaaggcttgcctcatccatatgagcaggtaaaatgattaacctcattttacagatcaggaaaccgaggctcagaaaggttgagtaacttgcctacagtcacacagctgacagatggcagagccagcaacaagacccaggcttgcctaactccaaaggcaaggcttggggctgccatccaggtgaacattcctaccttcactctccagatgaagccctcagcgctgggttagctagccttcctggggctgtccaaccctggagagagaaggcctttctcactgctttctgaagcatgaacagaggcggatcccactctagggaggtagggccctggggcctgcttcctccgatctgctgcgtctaactctctcaaataaaagccttttcagaaagggcctggcatgaggctgcatgtgactggcagggctgtgactgccaaggcttcactgtgcttcctcacccttgccccagccccacccagcccgaggcagcccccaccttcctttcttccctgatctctcttagctcttcctttctttcttttttgtctctgaatcattttttccaataagctgttgattgtctgttgaataattctctgaatgatttctaaaagcctcctgatcactgaaacctcagagttggaaacacatttatatttatgtggaactgagcttttagaacattattaaatttgcatggggaactagcagagtagccacttccacacaatccagatgatgaggaagcatcatcttcaggaggatggaaatagttccacaagccactctgcctggcttattactctgctgggagaaatcagcacagtctacctgggggtccagaggcagcattgacccagacaatctgagcaaatgctgtggcttagaaaccactcagatgcctgtgttttataattggccagcttcctaacctgggattctggagctgccacctcagaaatggaaggcagattggggttcgtgtgtgtgtgtgtgtgtgtgtgtgtgtgcgcgcgcgcgcgcgcacgcacatgtgcttgtgagtgtgtctgtgtccacgtgtagctggatgtgtagttcctgtgggtggtttagtgtgtgcatgactacatgccttctctctctaaggagagaggctgtagcttttgtcccatgtcaaaagggccacttgcactaatgacctactatgtaccagctgtgtaagctgctagctgaggcctctgagcaggataattctcatagaatttagagttgagaaaagagaaacaaacaggaaaggctgtagatagtggtcaggcggtacagagaatttaaataaatgagtggcttctctcagtcaaagtggtaccagctggcccctggctgcagctcaccacggccaactgtgtgacatagtaacagttaacctccactgactggtcaccgtgctccaggcactgtcttaagtggcttgtattcattcctttaatcctcataacaccctgagaagttgggactatttaaacagattagaatgctaaggttttgtgaggtcacacagagagcgagtgacagagtccagactgaatctggggttactcacctccaaatgcttccctgggtaaaatactggcctctccagactttatttttctcatctttaaaatgggttgattcttatttggcctatccctgaccaaaaaaaataatattttttaaaatataaacttttacacaaatcgatctgaaaatcagcatcctgctcccacttggctctggtgcccttgatggagctgaagtctgtctggg

SEQ ID NO: 16105 - DNA, 2300 bp, Homo sapien
ctggaaccatgcattttttattaagatctaataattaacttgctggattttctggtagaaaagctttggtctagtaaaatgaatcctaggcattttttaaatttgggaaatgaggaggaagctgtttaagaataaagagaagttttatctgattttagaggtttttatggactcttgcccagttagatttgacctgacctgggaaaataatgatcaactcatgtttacataaacaagctgactgcaggaatgaggaggccctgggggccctgggcactgcttatgttgccaacattccacccccagcaagagctctaagcagagcccggtgccgaccttttccttcaaggtcctgacgttgacatactccctgctccttctatagtcagaacaacgtgtccctaggagctaatatctcaggagggctttattgtgcccctaaggcaattatttttttcttcctttttttgttatagttattagaacttttccaaaaataaaaccttgaatgtaaacatttatagagttaatttacatatgtggaaaaaaaatccagagctgcttggatgaaagtatgggtggtggtgtggccaggcctatgcctgctctccctacacacacacccaccctagagccctacataaactctgagatgtctccagagtacagttggaaaactcagctccagggccgtataaggaatttgcattctctataatttttttaaattgagatataattgaaatagagtaaaaatttaccctttttaacatccagttcaacacataattgtgtatcatcataaacaagatgtacaacagtttgatccgcaccctccagaactccactaggtccttttgtagtcatgtccttccccaaccttcagcccctggcaaccacttccttccctgatcctcagcccctggcaaccacttatcaagtttctttccccataattttgcctgtttccagatgccatataaatggaatcatatgcctggcttttgagtcagacctctttcacctaacatgatgtatttgaattttatccatgctatgtgtatcagaagtttgttccctttaggaattatatctttaaggaaaacacatttttatacccaagatattttgagctttaaaatgaatacttttaaaacatttatttatttgatgtgtttacaggttacaagtgcaggtttcttacatgcaggtattgcgcagtggtgaagtctgggcttttagtgttaccgtcacctaaagagtgaacattgtacccaataggtagttttccagccctcccctccctacctttccacctttcatagtacagtgtctcattccactctggatggccatgcatacttgttgtttagctcccacttataagaacatacggtatttgagtttctgttcctgagttacttcactgagaataacggcctccagtttcatcagtgttgctggagaagatatgattttttttaatggctgagtaatattccatggtatatatgtgcctcattttctttatcaaatcctgtgttgaaggacgcttaggttgattccatatttttgctactgtgaatagcgctgcaataaacatatgagcgcaggtatctttcatatataatgatttctttccttttgggtatatactcagtagtgggattgctggttcgaatggtagttaaaatgaacactttttaaaactggaatattctagtcgagcctctcttgggatccagttggttttctgagctctccttatgttgaaattgatgctgtccacagttgcctgtttggcttcctggaaaaatactaaagggactgcagtgtgaaggtgacctactgaataaaggtggctcccttacctgtgttttcagggcatgatgccacattcactgcccaaagcctgccagacactgtgacgtcagtgagcaactgttaacagtgaacgtttctgtggactctgtatttgtattcctgtaggctcatcagattcaagagatgtttccccaggttccataccatctggtactgcaggacctccagctgacacgctcagttgaaataacaacagacaatattttagaaggacggattcaagtaccttttcctacacaggtaaaactgggcttttaaagcatgataaatgggttctatcttcacaaagattgaatactgtaggttaactgttttagttacttaacagctgaatatcatttatgacttaatgaagggtttctataaactctctaactttcccaaattaataactgagaacagacacaccaaagata

SEQ ID NO: 16106 - DNA, 2300 bp, Homo sapien
cgcattgactgtatttcaattttaattgaaagtgtttaggtgggatggatggatggatggatagagatagaacaaacagaggggttccaggcattttgcctgattccatgtcaatatgggcagggtggggcaggagggtggaggagtaaaactgaatcaaccatgccttcaaggagcacacttaattagctcaatagttaacctttgctaataatatattgcatttgtgtagcatttaagcatataatgaaggatcattgagaagcctttctggtgagtaccagaagcagaatcagagctggaaccctgttgctttgtccataaaatataaatgttctgcctcccggcagtgttaaaaggagttgtaatgaaaaccacacttaaaattctaaggctatgacatatcaaggtctggttgatcatccttccttaattcacattaagctgctgttgattttcaacagtccagtactgctaaattctgtgagttcatgtttataattattactgtaacacaagcatccctggaattttgttagcagtagtgctattcgcatccctgatttgagtttcaagaatggagtacagtggggatggtgtcgtgttggtgaaatccctcaaagaagggactagggggagtagagtcatgtctcccagaagagtaggtggggctacttggctggctgggcccagaatgctagaggggtttagaggacctggtttggtggctgtgaatgaagggctcttccaggtaaaacttctgaaatatactagcaatattagagatgagacctggctatgtaatccattattttgtgaattatgactactaaaaatttagtcaaaatagataaagtcaactttatttctccctagttagtacatgaaataagtatccatttcttaaatgggtacgttttgtttgtacccatctcaagacctttgagatagccattccacttgattttttttttttttttgagatggagtcttgccctgttgccaggctggagtgcggtggcgtgatctcaactcaatgcaaccgctgattccctggttcaagtgattctcctgcctcagcctcccaagtagctgggattacaggcacgtgcccccatgcctggctaatttttgtatttttagtagagacagggtttcaccattttggctaagatggtcttgatctcctgaccttgtgatctgcccgccttagcctcccaaagtgctggattacaggcgtgagccactgctcctggccacacttgattttctgttccatgcatcagtgtttctttgtgaaggaatgaaaagcagccttaaatgtgtagcttgataattgggttgttttacagccaattcttggtgctgttgtatcttaggctcctgttttcttcgggaaataacagaagcagcagacttcttggtgctgttagtctacaagcctttttgtagaatagaacaatttaaaaagaattttgaatcagaaaaccacggcttttaagattaaagaaaaaatacttcctaaaagtaaatgtgaaaatgcctccaagtgagtagtcatttgtgtagcttgtgaaagaggagccaaagctcatgtgttgtagaagctttagagccttgaaaagcttcctcatctcccaggctgagcgtgtgagggcgctgggctgggctgcatccagcccccctggaaagcaggattgctcagcagtgaagggttctagagcttgcctgtctggcttcacatcttggccatcatagttaaactgtgtgatcttggacaagtcccctaacttctaagtgcctcagagaccaaagaccaagggtactagtgctatatctttgagaaggatactataagaatgataataggaggtaccatgtggagtgtagtgaggattaaatgagctagtccacgtgaaacacttggcatgagaagcctgccatacaagaagccctcagtgaacaccagccattacagtggctaccgtgagagcagatgacgggggaaagagtcagggctctgaaacttacactggattcttgtttgtttcagggtctcggattgcgagctggctgccgagtttttcggttgaagtgatgcacaccaccaacattcttggcattacgcaggccagcaactcccagctcaatgcaatggtaaggtctgctagctgctttaagaagatcactgggaattaggagggaaagaacagctagagcgtgtgtgccgggtatatgaccttgttggtcttactctgctctggcagagtggaaggatttttaggggcttctttttattt

SEQ ID NO: 16107 - DNA, 2300 bp, Homo sapien
ttaactgattctttttatgtatttgagtacatacattcataaattgagatcatattttagacatatagttctgttctttaaaaactaatgtattatgaacattttcctgtgctaacatcagttcttctaagccattttaatactttcaggataaaaatatcatcagatagctgtaccatgatttaataaaccgcatcccacaatgggttatttagattatatttggttgtttgctatttcacattttacatattttttatcatgtattagtttgataaagatagttatatcttgcttttttcatttatctagtactatcttcccataattgaccttcagaactgttatatatacaaatataatagtaatatgtagttatatagtataataagtgaaattaatgactatataattttacattacatgagtttacaacctaactgttcttctgggcattttgttcattttcatattttctgttttataattgcatggatagacatctttttgcataaagcttttccatttctgatgagtttctcaggaaagatgactggcattggagcacctaggctgacgaggatgtgcattgtttagagtaatgagataaatctgtgtatttcctttctgaaagacattgcagttcaccatcaccaacagtgaagagcttccgctgcatactgcgccttcatcactagcaagttcacgttcgcttttaccgtgtgttttattctctttctctctaagttatttggcaacatctggttatccatggccagcctggtcatctttatgcagctgcgttacctgtttcatgaggtgcaacgtcgaattcgtcggcacaagaactatctacgtgtggttggaaacatggaggccaggtaaggaagcacaagttgatgttgcctaagtttactcattttagttttttaataacagcagatcccagagtatgtcagaatgtatgtttgtaaactgctaatagagtggtggagaggaaaggctctggagtcagactgcccgggtgtgaatccccacttaggtgctgtgtgatttggggcaatttacttcacctctaaattagggatgaaaacagaaccttctgcctgaactattgggagaatttggtgagataattcatgtacttagaatggtactgggcagatagtgctcagtattaggctcttatttgtcatgattttattgtcattattatcaaatagacacttcattgggcttctaccctgttcatttcctgaaagtgggtctcagttctttgcacatgcatgtttacacacacatacttaacctcattgaaggaggcacttttttgccaagctggggctaagccacgcctggaggtgcaagattaatgggtatcctctttgcacccagggggacagcttggatctcttctttgtggccagggacacagattggatctctgggggccttactcctctgatttgtccggatatggtctccgaggtcttcactaacagcagccattattattattattattattattttggagatggagtctcactcacccaggctggagtgcagtggcacaatctcagctcactgcaacctccgcctcccaggttgaagtaagtctcctgcctcagcctcctgagtagctgggattgcaggcgcctgtcaccacgcccggctaatttttgcatttttagtagagacggggtttcaccatgttggttaggctggtcttgaactcctgacctcatgatccccctacctcggcctccgaaagtgctgggattacaggtataagccaccgcgctcggcctagcaaccattatttagacaaagttcctgtgcataagttactcacttttgaaagggctttgaaggtaaattatatttttgattatcaagaatgttttgctgaacatgctttctctgtaactgtgttgtgatacaggcgcagtctatcaagtggtgtttagtgtgcgtgtggaactgactgaggttcctgctgggcttgttttgtttccacaggtttgcagttgcaactccagaggagctggctgtcaacaatgacgactgtgccatctgttgggactccatgcaggctgcgcggaaactgccctgtggacatcttttccacaagtaggagctttgtgaagggccatgtgggacaggtgttctgtccagggcgtgtgtgtgctttgtgtacccaggctcgagactcatcctagtggaggagtggggacattacctcagcctggccttgctgctggcactgagtgttctgggaagctcttgggtatccttct

SEQ ID NO: 16108 - DNA, 2300 bp, Homo sapien
catgtgattttacggtgagtgaaattggggagggaggtgatggaggcctactcatacagttgattttaagatgtagcaggtatgaaatatataaaaatcggactaaattacaacatggttaaaccaaattcagtagtaacagtaaattactaaggtgttttctctcttcattacagatacgtaattcacctctgggacctcaaccacgaagggacgtgggaaggaaaggggacgtatgtctattacacagactttgtcatggagctcactctcctgtccctggacctcatgcaccatattcacatgttggtaagtttcctcagaaggagctctaacagagggcaagcctttcagaatcaggaacagtaatggtttcttcattaaaaaatgaaactttagaaataagatgtggatggactacttaaagactaaaaatgaatgtggctgcaaaccctccctctttttgccactgggtgtaaggcagtgccatggaactgctttggctggtgcctaactcaggaggtgtttgctgtcctgggagacttagttaactctgctgaccaagtcaatagattattcttttagcatgaaattaaggagctgcctttccccatagtttctatggctttaaatatttagcaggtactttgtaggtggtaatgggaattcctgcagtgttagctacttcacagatttatacattttccatctttgtaattaaaaaaagtctttacacttaattcctacattcctactaccatcattgtttacattttactttggtatgttagacgttacggtgtcgtagatctgcttcattggttggcccttcagtgatctaataatggtgagaattaaaatagttggtgggcaatttatttaaattataagcctagcaagtagcattttaaaattattgggctagacgtggcacatttctaagtctactttttgaaagaaactttgaaaacatactttttaaagaaagtatgtaattcttttttttaaaaaagagcctcggctggacgcggtggctcatgcctgtaatcccagctactggggaggctgaggcagagaattgcttgaacctgggaaatggaggttgcagtgagctgagatcgcgccactgtactctatcctgggcgacagggtgacactccgtcccaaaaaaaaaaaaaaagcctccctcccccctcaaaaaggggacaaacaaatggccaaagataactgttaagattttttatcttctttttttaaattttttttcctcatgcttgtattttttgtatttaactgcttctttttatgtattttttgtatttatgtattttgtatttttatgtattttgtatttaactgattctttttatgtatttgagtacatacattcataaattgagatcatattttagacatatagttctgttctttaaaaactaatgtattatgaacattttcctgtgctaacatcagttcttctaagccattttaatactttcaggataaaaatatcatcagatagctgtaccatgatttaataaaccgcatcccacaatgggttatttagattatatttggttgtttgctatttcacattttacatattttttatcatgtattagtttgataaagatagttatatcttgcttttttcatttatctagtactatcttcccataattgaccttcagaactgttatatatacaaatataatagtaatatgtagttatatagtataataagtgaaattaatgactatataattttacattacatgagtttacaacctaactgttcttctgggcattttgttcattttcatattttctgttttataattgcatggatagacatctttttgcataaagcttttccatttctgatgagtttctcaggaaagatgactggcattggagcacctaggctgacgaggatgtgcattgtttagagtaatgagataaatctgtgtatttcctttctgaaagacattgcagttcaccatcaccaacagtgaagagcttccgctgcatactgcgccttcatcactagcaagttcacgttcgcttttaccgtgtgttttattctctttctctctaagttatttggcaacatctggttatccatggccagcctggtcatctttatgcagctgcgttacctgtttcatgaggtgcaacgtcgaattcgtcggcacaagaactatctacgtgtggttggaaacatggaggccaggtaaggaagcacaagttgatgttgcctaagtttactcattttagttttttaataacagcagatccca

SEQ ID NO: 16109 - DNA, 2300 bp, Homo sapien
gaaaaattactaattctagtaaaagatccaaacacaaacgatttacgttcttttgggttaacttcccccattcatgtgaagtttcagaaggttcaagcttctaaaagtttaataagggcagatctgttaacagcagcctgtttctaagggtgatgggacaaatttggtttgtgacagtttagaactactgtggctaggattgaataaagattgccagtcagtggtttaaaagttatggtggctcagatcttgacctgtaaagtagaacacttccctggaaaattacaatagtttttcaaaataaagctttcctttattttactgataaagtttaaagtttagcattttaattgcatggctgtgggaagagaaccaaagtgaattcaagtctagtattcatatagaccttgtattaaaaaaatgcacgtgtgcaaaggtaaggcctctccctgtcccggtaaagccaaacgttcatcaaagaccctttaacaagatgtttctaaaatttccaaagtggaattgtaagcttgagagatcttttgttttctagttaatagacttttagaatattaggcatgaaaaagaccttgaaagataatttggtccttttctttagaaagtttggaaaatcctacaaatatttacagagcacctactctgggctgagaactcttacaggccctggggatgcaaaaggaataaaactcccaaggtaacatttttttcctttggtaacagcttattgagatacaattcgcatattgagatagaactatttaaagtgtacaatgatttttcaattcagagttgggcaatcatcacctcaattttacattttcattactttgaaaacaaacctatcccagccagtgactcacgcctgtaatccctgcactttgtgaaggcaaggtgggaggatcacttgagctcaggagccacagactggtctggacaacatagcaagacgctgtctctaccaaaaattaaaaattagccaggtgtggtggcatacgcctgtaatcccagctactggagagactgaagcaggaagatttcttgagtccaggagatggaggatgcagtgagcatgccactgtactctagcctgggccacagaccctgtctcttaaaagaaacctgcaccctttatcaccccctactcccctcttcctcccatccctaagcaatcattaatcaactttctgtgtctgtatatgtacttgcctattgtggacatttcatatcaatggaatcacacaacacgtggacctttgtggctgtcttctttgacttagcacgtgtttaaggttcgttcctattgtagcatgtatcagtagttcatttttatggccgaatagtacattttatggatgtatcacatttatccactcatcgcttgacggacattagcgttgttcccatcttttgattgttagaatgtaatcaacatttgtgtacaagttttgtgtggaggtatgtttccacttttcttagaggagtggaattactgggtcaaatggtcactcttgtttgactttaaggaaaggacaggttattttccaagacagctgcaccatttgacattctcacttctggggtatgagggaacacatttttatttcccgctaaatcaggttcattttttagtttctgctggaggctactagcaaacagcagaaacttgaaagactgttaatattctttcttctggggtttcgggcaccagggaagctgcgcggcccctaggagtgctgggggtaacctcttcagagggttaatggggtggggggggggcaagtggccgacggcctggtggccagggtgccccgcgccctgaggccctgcccgcctgccagcgcctgcgagcccgagtgacccctgcgccgcggccggagcaggtgccctctgtgtctgcgggcccagccaagccgtggtgcggacggcggatgatgctgggtgcccgccccccggcctgaggcccggggctacgcccgctaggcggcggcgcgaccgctgggggcgggggacgaaggccgcgcccctgcgcccgtcccgccagcgtcccgctgggggcggcggcctgtcccgagcccgcccaggctcttccgcgccggcaggggcagcagcgggagcagcgcggggcggagcggcgccagcagccaggagcggcccggcccggcccggcgcggcggcggcggcggcagcggcagcggcagcgacgccagagcccgtgggcgccgttcgcgaggccgccgcagaggcccggccgcagcgcagggaagcctgggggccagaggtcg

SEQ ID NO: 16110 - DNA, 2300 bp, Homo sapien
ttcctaaaataaaatatactgggggagagggcatttgttttcaacttaatgttaactcaggtgaacttaagttcacaacacaattattatttctgaatatttgtatttacacaggagaggaaatgtactgtaaatcaacccataattttaatagagcgaagattaaaatatcttactgaaagctaactattttgccaattctacaaaatggttggatgcaaattaattcagtaatcaagacaaaacaagaaaagactgtgggttttagttctaataaccaccgaaagtaatccagaagctgtgctttcacacttttaaaaaggataacatttgcctttaccatttgatggattttttcttaatttttaaaaaaatttttgtagagacagcctatgttgcccagactgatctccaactcctggcctcaagtgatcctcccacctcagcctcccaaggtgctgggagtacagtcgtgagccgccactcctgagaacttttatacacacaactatcaactaattccagattttataaacccagcatttccattatctaaatttccaagccaacacgttttgcaaaataaaacaatgttaaccatcttttcaacttcaaatcacttttggttgggggacggggagacaatgtccgtttattttaatatgaaacagagaaacacctaaactgccttacgaaaacatcaataccaccaaatccttgcacttgtaccctgactggcataaactggccactttcctccatcctggcataaaatggaggcaccgcgttgcctcgaaaacaaatcctcagaaacgattttaaaaagcattactgacaatttcttgattaagacaccccaaacgccaattacctgctacagcgagtctgcttctgagaatgaccttgaaatgcaatggtttgaagtgttgaaacagaaaggtgttgaaaataaaacacagcccacaatgggttttctggtacaaacattctggttccctccagtctgaaagcccaaccatagcagcatccttactcccaaggaggggcctacttgtggtgcctgggatgccggcattgagacatcagacgacgcgaaggcataaggcatggggcagggcagacagccctgagcacatgaataaaatgtgttgtattcaaaaactgaagtattaagtggcacctaaaaggaagaaaactagacctaggcattacagctagatctcgaaaccttactgtcagagtgaaatctgcaaaaatgatactaggttataccattcgtatcacatcaacactcacaaagcaataccatgtacgtgatgcgaaagcataaacaattcactggaaggattaaaaaaacacacattttgaagtcggttacctctggagaggtggggaaaggatgagttaaaagcaaactccgtttttccccattatgaccgaatacataggatgggaacaagccttcctttcagaaaaggactctaaccctggaggctggaggatgagaaaggggcctgagagagggaggaaggcgcgcatccgccagcgggagttggaggcggggaggtgcagaggcgtgaagcgcgccgaaaagccgggggcgcgtcggagagtctataggagctttcacgagagaaatgcccgccaaggccgcgccgcacttacaggttgatggtgcgctccagggtgaggggcttcgtctgctggatgtacttgttgccgaactgagtgaccccccggggccagccggtctgcgagcgattgggcggtaccacagacatgctggcgagctccggcgctgacggcgagcagaaagtggcaggcagggtagactttccccgtgcgggaagcggttatctgcaatcccctcagcggctactgcccgccattaacaggacagcgcaagaggaggcgtaggcacgccggaagtgaacccggagcctctggcggcaggaagtagaggggcggtggcctgccagaccgagctccagtgggccaattgctggtgggatggctgcaatagctggagctcccattggtaaaccgggtataggttccgccttctcttactttggtgcttcccattgggtagggccgggaaacacgataaaggggacatgccgggagttgcagtaccctcaggaaggtagcgtcttgatctgcgtggcgtggttctgtgccttgggaagagatgaatgggaagcggccagcggagcccggcccagcccgggtgggaaaaaagggaaagaaggaggtgatggcggagttttcggacgctgttacggaagaaaccttgaaaa

SEQ ID NO: 16111 - DNA, 2300 bp, Homo sapien
tgaatttccaagctggaagagttaatgtggcaggggaataaatacctgctggaacttatataaatcattatacttctcatggaagtccaagttcatcagttccttctgaagcccttctaagaagtcttggctttggatgaagtttgggatcacacagtgaagaaaagggtccatgtccatgacaatgacttctgttggaagaaaaacattatctatggcttttttccttttgtatttttgacatccaagtaacatagcagagctaatacaaaaggggatggtcatgaattttggggaacctaatacttaaagtctaagatttggggaaaaaatgataagctctgacctttcttctttacccattaaatactacttttaaagataccatgcttacaactccagtccttgagatgagtgatgggtgatgtcactaaatcaaggttcctactcttttttttatgtgtttcaatgattacatattgaattgaatgtattttagatttttaattcatttccctcaaactttgggtagcacattaaatgagagtagcaatactggtcggcagtttccctgcttttgcttttcccaagttactgtcagaggcatttactacttactgtacttaaaaaaaaaatcagttcagttcgggcataaccacctctaattccttgatttctaccccaacatttacccactgcttccggctggctagatcaccatcctgtaatcatcagcaccacctaccaggtgccaggcccatgatctcattcaatctttttaacagctctgagggagacattatcactctccccattctacagatgaagaaactgagagtacagagcctgcacttaaacactaagctatcgttttctataggcatccagcctacccaggactcacctcttcaaagcacttgacaacggaaagaaaaattacggcaaactctagaaggggatgcctggcgcatgaagcagagctctgaacacctaaggtgatatttaaagctgaggctggaatcgttcaacgtaggcgcctttccttggtcaaagcgcgtttattttcatacatcatggagtcaaactacaggcgcgtagagacgagtacactagggagtcaagctggcagctcacgacaaatgccctggctagactctcctgggacagctgagcaatgcccttgcaggagaaatgacatcagccactcctgtatttgtccacatgtgtattgggccttactcagggaaacatttactgaagcctgcaagcattagtgtgtcgctcccattcaccgactttccgaggtaaatattatgaactatcccattttacttaggaagcaactgaagtttaataaggttaattccattgcctggcgacgcccaatcaggggagaggattctaactcagtaatctttgactccagaatgcaactatctcttgcataccctctgcttcccaaaactctccggcctccatttctccctcttctcacgtttctaaattgcaaccgaatttggagtgaaagggagcagcagccgaggcaggagagtaggaggtggccaaagtcctctaagagcctcttcccttgcggccccgctgcccaaggctgggcgcgagtcccagggctttttcagagatccctagacctctgcgtggcggcccctccctgagagcacccggttaccgtgactgaacggcgtcctgcggctccaggcctcagccacctgctttttcaaggtttcttccgtaacagcgtccgaaaactccgccatcacctccttctttcccttttttcccacccgggctgggccgggctccgctggccgcttcccattcatctcttcccaaggcacagaaccacgccacgcagatcaagacgctaccttcctgagggtactgcaactcccggcatgtcccctttatcgtgtttcccggccctacccaatgggaagcaccaaagtaagagaaggcggaacctatacccggtttaccaatgggagctccagctattgcagccatcccaccagcaattggcccactggagctcggtctggcaggccaccgcccctctacttcctgccgccagaggctccgggttcacttccggcgtgcctacgcctcctcttgcgctgtcctgttaatggcgggcagtagccgctgaggggattgcagataaccgcttcccgcacggggaaagtctaccctgcctgccactttctgctcgccgtcagcgccggagctcgccagcatgtctgtggtaccgcccaatcgctcgcagaccggctggccccgggggg

SEQ ID NO: 16112 - DNA, 2300 bp, Homo sapien
tatttatctctcacattatctgaagcctggttcagcagtttgctatcctgacccattttacataatttccaactctgcctttaaaagttacatggcacctctgagtggactgactgagcacaattattttatggaatgttctttaagcttgttcgcagctgataatggaattttttggttttgatagtgtataatataaaaaggtatttggtaatgaaatcttagagatcaacctggagatttgatacttagttataaacaggacagttctattttatgggaatttcagtaatgtgcatttggagtaggatgatccaaaaaaatattaagtatctttgtaagcgtaacttgaactaatgtaaatctttttaaaatgttttaattcctcaaggttagtaataattcataatttcaaagttgattggctgagtgagttataaattgtgttaagagatttctacatggagagccagtttagctggtaaatggaaacgttcaccatcttctattggtatcctgttagcatcagaacttctatgaaggatttcactcattattatgcatttaattcaacactcatcattattgccatttaaagttgttttaatcttctaaaacagtgccacccaagtgttcattaaatggcggtaccagtattggtgcttgtgatttataataaatgtatatttggtcttggtctctattcctggcacagacctctctgacctcctgcaagggaagagaggctggaggttgagttaatcactaatagccaatcacttaatcaatgattccttcataatgaagcctccatcaaaaaccctaaccaaaggagttcaggattgctgaactcccatggaagtgctgggagggtggtgtacctggggaggacgtggtgtggaagctccacaccccttccccatacctcaccctatacatcccttccgtctggctgtttctcagttctgtccttttataataaactggtaatctagtaaacaaacttcttctgagttccgtgagctattctagtaaattatcaaacccaaggaggcagtagtgtgaacctccagtttataactgtttggttagaagcatatgggtcacaacttgaacttgtaatcagtatctgaagtggggttgggggagagggcacactgggggcagtctcatgggactaagcccttaacctttattaatgcctggtagatagtgtcagaattgaattgaattttaagacactcagctggtgtcagagaattggtcagtgtggggggataagcccacacatttggcattggaagtgaagtaaagtgtgtaaagaaaaacagttgaggccaggtgctgtggctcatgcctataatcccagcactggaggccgaggcaggcggatcacttgaggtcaggagttggagaccagcctggccaacatgacaaaaccccatctctactaaaaatataaaaattagccgggcgtgctggtgcatccctgtagtcccagctactcgggagactgaggcaggagaatcacttgaacccaggaggcagaggttgcaatgagccaagatcacactgctgtaccccaacctgggcaacagagcaagactctatctcaaaaaaaaaaaaagaaagaaaagaaaagaaaaacagttgagctttccattttagtgctgaaaaacttgtctgaaaatcagtaacttggactagaccactggtgtgatgagttgttatgacaaaggccaaactgctgccatgacagggcatactttaaatttaggagaaagaaaatactgagaaaacatgaaccattagaacaaaaaataacaaatataatgtaggtagagacttacatttatttttctgggaacattagacttaaactatgcaaatttgaactgagaaacatttctcagaatgtctcaaatgagatcggagaatggatctcttgaatacaatgtgatctccaggaaagaaaagttgtggcctagatccaaacagttgtgacctagatcccacactgtggcataacaagttatcttttgtttacatttctaggaaaattctgtttgaagatttccggtcctggctttctgatatttctaaaattgacctggaatcaaccattgacatgtcctgtgctaaatatgaattcactggtaaggaagataaaggcctggtgtctgtaagatataaaggctttaactcagcattaatggagagatggtatctgtgtaccaaaacactcaactgaatgtccctgcaaagcatccggatcttcctgataaagacccagttcatag

SEQ ID NO: 16113 - DNA, 2300 bp, Homo sapien
ttaaaaagaaggaagcacagctggttgaggctctttagggtccctcttggccccagcagtcataggtatctcctgagaagttgtagggcttcatagaatactcttgaaaactgctagactaaatgacctttaaagctgatttttatttttaaattttgtggtttttaaacatgtagcataagcaacttttaaatttgtgttttatttgtaggttgatgctcgaagtgaccgaactggggaggtcatctttaaggacaatttttcttctgcaattgccggtgtggtagagggagattaccggatggatggccacatacagttaatctgctgctcagtggatggggaaagtaaattgggatgagaaaaatccttaaaaagtcacgttttccatttgattgggtcaaaatatcaggaaatttcacctgaagtatttgtaccgagatcctgtagttctaataaattcaccaaagttggggagaacttaggtttttgtttttaagagcaggtaattgatgacctaaaagtatacctggttatacttgcggttttttccttctgttcagtccggggctacctgcctggcacggctgagatgaggggcaacctcatggacaccagtgcagagcaggacctgatccgagagctgagtcagaagaagcagaatctgttgctggaactccgtaactatgaggaaaatgccaaggtaggtgtaggtcctaatgtgaccaggtaatggaggctgaaatgttgagactgaccgggaggatcagcaaatatggaagaatgagagtgtcattgccagggtgtggcctttttgccattgtcagaattgagaggggatatatgctttcgtcttgaaatttcatttccaggtagttaaactgtagaaatgttttcctgattgtttaaggacatttcctgcagcactatttatttatagcagtgaaaacagctggaagaaacttagatgttcgtcagcagtagggagtatgtgctaaggaatattaagcagctcaaagaatgaatacttggactgatatggaaggatatctgtcgtcttaccaagtgacaaaaggcaagaacaatatagaatgtcttttatctttttcaaaaacaaacatgttaaaaacagacaactgtaaaaactgtgtgtgtgcatacagcaaactggctgaaatattcctttaatttgtcctgtaatgcattactgtatttgaatttgatgtaacaagggaatttgtttgcttactttaaaagaacaatacttcaaaaatgttaaagtcatgatgggatacagtggaccatacccatagaaagatgcaagggtattttcccacagggccagatagagcaagggagcactaatgaggtgagttctctgaattctaaagaatcagattactataataataataatatgctggaggctctgtcttttgaagctgaatagcaatattatttaaaattgatattagttcagtgttttggtgactgagtaggaaatgggtggggtgttttgcaggctgaattggccagtccactgaacgaggctgatgggcatcggggcataatcccagccaataccaggctccacaccacgctctcagtcagcctggggaatgagacccaaactgctcatacagaattacgcatttccacttctaatggtaagacagtactcacagctggtatttagaggcacctgtgccatcttggagtcattcttttttttttttttgagacagagtcttcctctgtcttggctcactgcaagctctgcctcccgggttcatgccattctcctgtctcagcctcccaagtagctgggactacaggcgcccaccaccacgcccagctaattttttgtatttttagtagagatagggtttcaccgtgttagccaagatggtctcgacctcctgacctcgtgatctgcccacctcagcttcccaaagttggagttgttcttaaactgtttttactcttccctgcagacaccatcatccgagcagtattgatttttgcagaaggaatttttacaggtgaaagccacgtggtacatcccagcattcacaacctctccagttccatctgcatccctattgtgcctcccaaagatgtccctgtggatctgcacttgaaggcattcgtgggttacagaagcaggtgaccctttgcaagtcacagttcatttcaggacagcacttagaggagggcaagatgtataaattttccatatgcccagtggattcttgggggcctgagaaaccatttaatggttctgtctacccaaagtttct

SEQ ID NO: 16114 - DNA, 2300 bp, Homo sapien
ccagccacattattttctttctggtcttcaagcatgtccaaacttgtcctgtgtccttgctgttccctctgtctagactgtccatccctcacatctttgaatggctgccactttcttgtcacaaagctcttggttcaaatgttacttcctctaagagaacttcttgagccctagaacatcagccttctcgccaaatgaaatgatcttacttgttttcatgtttagtgtctattgcttcctatcccctagaggatgtaaactccataagtgtatgaattatatctttcttgttcactgctgtatccctaggtccttcaacaccgtctagaacatggataccctcaataaatgttttccaggaaaaaataaaggatctgaaatgatgtctattagagtcattcctttcaagctattcctgggagaggtagctgatcaagctgtgatcagctagtaacacagctgagtgaattcagtgagatgatgactttgtgtaggtagaatctggggactaaagagaagggacatcacaaaacgaagtaagttccaatgacccagggtaatttccatggcaccgctggtcagggagctgctataggacttgggtgtagacaggtgacagaagggtgggggtggagacaggatagaaagaggctgggtcttagaagcatggtccatcagagggggcctggagggccactgactcaggtcttacattccatcgagatctttaaatttaggctgggagtagtggcttacacctataatcctagcactttgggaggccgaggctggaggatcacttgaggcaagagttcgagattacagtgagctgtgatggcaccactgcactccagcttgggtgacagcatgagacctcgtctctaaataaaataaaataaaaatcaacttttaaaaagtaacaactttcaaacttagtcttttaacattatttagtattttgatattatctccaaaagaggttacaaatagtcacagacacaccaacagggttgaaaaaaatgctcatttgtataactgtaattacaaaatgcaagtatcaagaatattccagaactcatctttcttttttttctttgagatggagtctcgctctgtcacccaggctcgagtgcagtggcaagatctcagctcactgcaacctccgcctcctggttcaagcgattctcctgcctcagcctcccgagtagctgggactacaggtgcccaccaccacacccagtaaatttttgtatttttagtagagacagggttgcatcatgttggccgggctggtctcgaactcttgacctcaagtgatccgctcgcctcggcctcccaaagtgctgggattacaggggtgaaccaccgcccctggcccagaactcatctttcaaaactggcccgcagcatctgacacagttgttttcctccttctggccaccctctcttcgagcttccaggacactatactctcctgattgtacttccttgctggctactccaagtctccactagtggtccttgctcatctcatcatccaccccagattgtccatttccagaaggcagcagagtgagccccgggggcctcacctgaagttcctctgcaggaacagcctccctcgaggctggcttcctcacttcctaatagtcctaggctgaaggtcactttctcagagaggtctctttcctaccaccctacttaacactgcattccctccaatcctctctcccctcttccttcccttaattttctctagtgctcactaccaaatgacatgcatttcttgtttagtgcttgtctcccctgactagtatgtcagttccaggaaagcagaggtttgtcttttgtttactactatttattatctagcacagtgtctgacacacaataggccctcaaggaaattctgttggtcacttttcaattttgctggtttgcacttaaaaatatatagggagccttaccaggagccctagaccgaacgtgagtctaaggattggtatggttttcctccatacaacggctaaagcaagggacagagccgacactcaaggaatatttcttgaattaatgaccttctggagtggggtagcattgtgtcaagtttgcagggtgcagcttggatgtggtgctagaaggggaagcctctgggctgagcatgtaggctcgtcagtagagttcaacccgcaggagtaaattactgcagtgggaaacaaccgcacccgcggcccagcaggggttccactgcgcagccgcaaaaggcgccgaggctccactgcgcagccacagaaggcgcc

SEQ ID NO: 16115 - DNA, 2300 bp, Homo sapien
ccagaccctctaaaccattaatacttgctggagggcagcccaagaggtggaggaggctgggcctgccacgagagatgtgccggaactgggctgggggtgcaagcccgggaagatggatccagcttcaagactctgggagcagccacacctggtcatgggtctcctggactgagatgtcctcccaaacttctgaaccataaactacttttactcatcattggctccccagtgcccagcacagtgcctggcccttggagggtgataaatgaatacatgtcccctactaggctgtgaactcctttaagggaggcaccacttggggatcactacagtattgccccctcctcccctccccagtgcctgccacagtgacctgctgatgaccatggatccaaatccctttctcctcgttagaagctctcagtccaaaatccgtggttccatgggtcagactgaggcccaggtggtccttatgggtgaatgatggagaccccaccaagctgagaactgggaggaatgatctccactgtttatggccaggccggttttttgcctttctgaatggcaacggcatatttcagcagaggtcctcagtagagccacatgcaggagatacatgcatttgtccactcgtcactcacttagtcatttgttcacttatatatccactctctcactcatgccttcagtcatttgattactcatctgattaattcatccattcatccaacattgtgcagaacattgaacaggtttagagatgcttcaggcacagtttttttacctgagagctcccagattggggcgagaaaggtaagagccatgaagacaaataatcatacagcagcttagcaagtagtaaatgtcatgagaaatgtacagacacatcagccaagggatacagagagagagatttctcccaactaagaaagggagtgatcagaggtagcttcctggaggaagtataatcagcaccagctccagaatttctccatggcgattgggtacggatggcagcttgtcagggaagctagtagctgcatcctctacagggcactttacaaaagactgaaagataggccgggcacaatggctcacgcctgtaatcccagcactttggaaggccgaggtgggcagatcacttgagctcaggagttcaagaccaggctgggcaacatggcagaaccccatctctaatacacaaaaaaattagccaggtgtgggggcttgtgcctgtggtttcagctattcaggaggctgaggtaggaggatcctttgaacccgggaggtagaggttgcagtgagccgagatcgtgccactgcactctagcctgggcaacagaatgcaaccccaactcaaaacaaacaaacaaactgaaaagtagtcagctgcccataccaaagattggggttataatggagatgaagaggtggttaaatctctcccaagtcccctcttgctgcttctgctttgtgtgtggtctagaaggaaaggttgcatgttctggatgggcacaactccctgattttccaccctctcactcatggggagggtgcagtcagtagaggttcttggtgggaacttctaaatctcagggccaaggatagaggcccctgcctgcccatagtaagggcttttacagtcaaccagggagataggatgaggccccgagccgaggcaggaggagcccctgtgaaggagggaacagaaatggcagataatagaatgcataggacttggagacagggtggacgtagctgccaacctgagctccatgtgtgcatttcagcctgagcctggttccctgaaaccttgccaggcgggcaggtgaggtgggtgcagccacctgcacccctggtgaaaagccacccaaatgaccgtactgctcggcctctcctctgccctcctccgcctgctcttcccaactcccagcccaaggcatctggctgggccgtgtgcagggcgtctggccccagggagaggtggggtgagctgcagactacacccacatggctataaatggggagcctctggctgctgctcactcagcctcccttccccagccgtgacagcactggagcctttcggacacctggaccatggaccccagggaatgtgtctgcatgtctggtgagtaaagaagccctccctggggtctgggaaccttggaccagcttcctacagggagcctgcaggtccctgatgaaaacttctcttccctctaattaggagccaccaatggggttcgtcctgggagccgacaggtggactggccacctctggggcagctcccactctc

SEQ ID NO: 16116 - DNA, 2300 bp, Homo sapien
actggctgatgctagagttggggaactctgagatctgatattccaattgtccagtggctggaacctacactgtccgtgtgagagcctacacttgaatatagcctctgactctccatacaaggctctattttggaccttggttagccttggctggcctggctacccctctcccgtggtagcacagcattcagctgctctcgccctgcacagtgcgggctttgctttaaaaattctcatctcaggatgaatttccttattgggttactccagtgtgactagttctttgtcaaacacctcctctgtccctgccttcatttgggggccatcttttttgcgggggaggtacagggtcttgctctgtcatccaggctacagttcagtggtgttatcatagctcactgcagcctcaaactcctgggctcaagcaatcctcccaccctggcctcccaagtagctaggggtacatgtgatccccaccactactggctgattttttaaatttttattttatttatttattttgtagagatggggtcttactatgttgcctaggctggtctcaaactcctggcttcaagtgattctcaccttgacctcccaaagcatagggattacagacatgagccactggccttgggagtcatcttaatgctcagctccacgtaccccgaaacacaaccccttctgtgaaagcattagcaagcaaggaagattttcagaaagtctcagagggacagcagagagagtgacactcacacacttcacaataacattttttaaaatgctttttacagaggtcttctcccagctctggtcccttctttgctgccccccaaacttcatctagacccctgaatggccctcgtttttgaggagcaatgacctctctcctctccacttctcggggtctcattctcactcacgctaccctgctcagtcacaaatgattctccttggcagcttagacctcttttcctttcattttgcacccaaatcccttatattcatataaacattgatcaatcttattttacctaggctctcttttctttttgagacagggtcttgctctgtgacccagattggagtgcagtagtgcaataaggcttacttactgcagcctcctcaacctcctgggcttaagcaatcctcccgcctcagcctcccaagtagctgggactacaggtgcatgccaccacatccagataatttttttttttttttttttagatggagtttccctcttgttgcacaggctgaagtgcagtggtgcgatctgggctcactgcaacctccgcctcccagggtcaggtgattctcctgcctcagccacctgagttgctgggattacaggcacctgctaccatgccgggctaattttgtatctttagtagagatggggtttctccatgttggtcaggctggtctcgaactcccgacctcaggtgatccgccggcctcggcctcccagagtgttgggattacaggcgtgagccaccacgtccggcctcctttttataaatagaaaaatctcactgacctgccttgagtttaacatgccccccactgacaatccctctagatacctgagttctgagttctaggcctggctcggcctcaggcttattctgggacccaggcacatttctgcttctctggcctcactttttcttatctgtataatggagggttaggagtcaaggatctgaagatgccaggcaggacagcggggaaatggaacacgccccttgccagtgacactcggagggcgcaagagtcagtgtcgggctcatcgtgagcaggttctttctgcccccagttcagcaacccgtctgaacagatctggcgtcctggagaattctagaatgaaggggaagagaggcagggaagagctgggaaatacgcaaagcgcctttttctccactttcggagatggtacgtgcgcgcttccacgcagtggcggctgctgcggcgagcacgtcccctgcgggacccacgcggggagtgggctggcagtgcgcgcacagcggcggcgagtgggtcgtgcacgcggatgcggggtgggagtgggggcgcacgcgcgggcgtgggcgagcgggccccggcagtgcacacacacggcaggggcgggcgacagatgcagtgcgtgcgccggagcccaagcgcacaaacggaaagagcgggcgcggtgcgcaggggcgggcgcccagcgggcttggcatgcgcgcccccgcccgaggctataaaagcatcgccacctgctgccactagccaagccgcgcgtccagttgcttggagaa

SEQ ID NO: 16117 - DNA, 2300 bp, Homo sapien
gaaccaatgcttttgagggcaaaataagcccttctgtttcttcacagagttggattgtttgccttgagtgcataggtgaccatctgagttattagcaaccagggatttggtatataatactgtgcatacataaataacaacaacaaaattggtccactgcccagagagctctcgatccacagagctgccagacatcatgagatttcaaaagatcttggctctaaaatcagaggatgtttggatataaattctagtacaacccagtcatttgacagatgagtaaaccagggatcagaagagtccaggcatgtaattgccccaaggtcactgagtaagtgagtggccgagtgaccactgaaatttagtccatctgagagctcgcccccctgccctgtgcggtgtttttacaagagtgagcacgcaggttccagggtggtcaagaggtgtttactttcattttgtagtcggccttcatacaaggtgggggctgggaagggaagagcagtccaggccattacccccatgaattcatttgacaaatatttattaagcgtctactgcaaacttggcccggtgctggaagctgaagacacaattccagaggcagacaatgactgcccttggcatttccagtggtcaggggttggtgaggaggggcagagacaccaatccaagagtccccgcagtttatacataccacaggcacggaaagcgccaggaggggaaagaacaggatgtttaccagcaccttccacaggcagccacggtcatgggggtcaggacagggtccccagaggaagtgacgattcggctgagctagaaagacatttccacaggaacttacagtaagggctgcaaggacagcctgtcctcccccgcccaccacctcactaaactttcactgtggcaatcggcattccctaagcctgccaggaagcttccagtaaccacttcctgactcctagcatgacacacttcgggccttccaaggttgacgatctaaggcccttacacagcgccagacacgcgcaggcagggaggcaggatgtgcctctccagacaggaatgtggacgccacctgggctcttcccctcagcctccacaggggaagaatattcttgtggggtttttcccttccaaatgtctcagggcgattccagtgttcccgctagttcctccctcccaggctagaacacaaatccttcccactccctgcctggcaaacaccttctgaccctcaggcccaaggcaatggcccacctcctcccaggctggatggggtctcctcctctctgttcccccagcccctgagcttcctgaggaccaagcttgtggcttcttctccttactcttcctccttggtgtctctatgttagagggccgttagcatctgctggggcctggtcgcattcaccctgctctgccactcactggctgtgtgactctggacaaattaacttctctggacctgcagtttctcctctctacaatgagaatactggagagtccttatcttatgggttgctacagaattaagtgacatctcacacacaacacacttcctacagtccctgttacacgctaaaagtactcaacatgcaacggatacgtcatcagtaaccaccccacgggtttactgtgatgctgcacaattattaagccttggctgctacagagttgtaacctgtctgcacttccaaccggtttgggaatgcaagcagcattcccaagtcccgctttcacccgcgcgctaacggctcaggttcgagtacaggacaggagggaggggagctgtgcacacggcggaggcgcacggcgtgggcacccagcacccggtacactgtgtcctcccgctgcacccagccccttccgcgccgaggcgtccccgaggcgcaagtgggccgccttcagggaactgaccgcccgcggcccgtgtgcagagccgggtgcgcccggcccagtgcgcgcggccgggtgtttcgcctggagccgcaagtgactcagcgcggggcgtgtgcaggcagcgcccggccggggcggggcttttgcactcgtcccggctctttctagctataaacactgcttgccgcgctgcactccaccacgcctcctccaagtcccagcgaacccgcgtgcaacctgtcccgactctagccgcctcttcagctcgccatggatcccaactgctcctgcgccgccggtaagaggctggggatgcccagtgtagactgtagcgctagagaagcaatttctgacccctctttctttctctggtcactcaatttcaggacaggagttgc

SEQ ID NO: 16118 - DNA, 2300 bp, Homo sapien
tcacagatgtggtgaaagtggtgtcctttggacactcccaggttgaatgggcaggtaacacttgataaatcccctctgatgtctgttttactcaaagactactgatttaaatgttaatcacatcttaaaaaataactttgctgcaatatctaggctggtatttgaccaaggaactgggcactttgcctagtcaagttgacacataaaattaatcatcacatatatttaaatgaacgcaaagtctttaccaatgctaaaatcaagaatcagtcttacttacagacatatcgattactctaatgtgtattttgtgtatatacacatatttaataaatttcccatctccatcacttttcaagctgtccagggtcgagattgatgcttctccctgattaaaaaatttctcttttttttgttttgagacggagtctcgctctgtcacccaggctagagtgcagtggcgcgatcttggctcactagaagctccgcctcccgggttaacaccattcttctgcctcagcctcccgagtagctgggactacaggcaccaaccaccacgtccggctaactttttgtatttttttagtagagacggggtttcaccatattagccaggatggtcttgatctcctgacctcatgatccgcccgcctcggcctcccaaagtgctgggattgcaggcatgagccaccgtgcccggcccctgattaaaaaatttcaagcagaccagcacaggggctcacgcctgtaatcccagcactttggaaaaccaaggtaggtggatcactcgagcccaggagtttgagaccagcctgactgagcaacatgatgaaatcttgtctctacaaaaaaaaaaaaaaaaaaaaaaaaaaaaaaaaaagagcaaaaaattagccaggcatgatggcctgcacctgtagtttcagctactcgggaggctgaggtgggaggatagattgagcccaggagactgaggctacagtgagccatgatctcatcactgaactccagcctggatgacagagtgagaccctgtttcaaaacaatgataataataacaattgtaagcagcacagtggtgttgaagacatatctcgaccaaaagaaatcgttatgttttctttcctcctcttgggaagctggctggattcaggtagagtggcaccatttcacagagccataaccttgggcaaattactaaggctctttgtgccttagtttttccattggaaaaacgtgtttagaatagtatttcccttttattgttcttgagggggctcaaaaaactaaagtgattaaacagactcacgcagattgttgtgtaataggaaaattgaaaggtaaataatcacttcttgctttcttatttaacgtaggttctgcatcctccggatctggagtcacctaagcagatcccgcccttgggagcactccgcattttcaggactactctcctggagttgggtgggcgcgctaggggctttggaggagcccctgcagaattttatgtaaaggaggccccagacaaatgtgcccatacaacctctcaggaatggggaatggaagggagggctcgcctccaccgtgttgctgggctcaagagaaagtggcagaaggaccatggcggggatagtgacaggcaatgctggagggcaggaggacagaaagtaagggtcacgtccatgactgttctctgcacacaactccctcgctgcgctccccagctcaggcctacccagggacgaagctggggttgcacaccggctccgggaatggcgaaataccgcagatggggtggtgggggtgggaatatcgcgaccaccagaggctgggttcccggaacgctcggggacggagatggccagcaaccacaaggaaatggggaatatggggaagttgcgcgggcaggacggcacggacgccgcggacgaccgggcgcacaggcctgagcgagcgagcgagtgagcgggtgccaagcaagagacccgcggtgcacaccttgcgcccggccggcctgctgctcacagtccctccacgtacccacaggaggcccagactcagcggggcgggtgcaagcgcggggcggggcctctgcgtccggtcccatctccgcctgcaaaaggagcagctggctccaggctccaacgtgccttccagctgcctgactgcctcttcgcctctcccgtcatttcttggctcgaaatggaccccaactgctcctgcgccactggtaagggaaccccggctctgcgcctgggaatgcccaattcccagccacagtacagtgtccctgcgtttga

SEQ ID NO: 16119 - DNA, 2300 bp, Homo sapien
atgacttgctcctccttgccttccgccatgattgtgaggcctcccagccatgtggacctgtaagtccatttcttttgtagattgcccagtctcgggtatgtcttttatcagcagtgtgaaaacaaactaatacaatgggtgagggcatgaagctgcagacagcatgcatgagtgcacatcccacctgtcacttttagctgtgcctcacaacctctctgtgtctcctgtaataggagcataataatggcatctggattgtaagatgaaagaattttatacatgtaaggagcttagaatgctgcttggcaagcattctacaatattagctattgctttttttaaaaaaaaataataatcatacatcgcatgggggatatttacttacagacaaagaagccaggcctggagtgcctagctgtgtatgctctcattgtcatctgccacatgaacatgtgtcatgtggtccaaagagagtcattcactgctcccacaaaatcatcatcaacacagggttattaagctacgagcaagattctctgcctcatgtcagatataaaatgactggcatttctgttaccacctgcacactttacttatcattttatatttaaatgattaatattttcttaaatatatttgtatgaaaagcaaactcttttccatcaccaaaaatgaaaatcggtcctatccatacatacaagatagctaggaaaactataaatgtgtgtgtgtgtgtgtgtgtgtgtgtgtgtgtgtatatatatatatatatatatatatatatatatattacacttatggattgcttttgccactgcccatggttgagcttgtggcttgccattgtttagaagatttccagcaagagagaagtgctgatgacatacctgggccaaaggaaggcttgatccatggacactttctcttgaggggttggctggattcaaatcagtgacaatttttcagctctgtgacttgaaccaattactttaactctgtagtagctgtctgtttagtaatacaagttcataaatcgtatttttctttaagatcacaaagcaagtggttaaaaagagatcggcacagactcaatgttgtgcattcagccgggaatattgaagagatcagcaatattgaagagaaataaccatttatcttgctttctttttttcctttctttctttttctttttttctctttcttctttttctgtttttttttttttttttttttttttgacgtgcagtggcgcgatcttggctcactgcaagctccacttcccgggttgacgccattctcctgcttcagcctccccagtagctgagactacaggcacccgccaccaagtccagctaattttttgtatttttagtagaggcggggtttcaccatgttagccaggatggtctccatctcctgacctcgtgatccgcccgcctcggcctcccaaagtgctgggataacaggtgtgagccaccgctcccggcctatcttgctttttaattttatttttttagagacgttcactccctatgttgcccaggctggactcgaactcctaggctcaagtgatcctcccaagtagctgggactacagcagtaggcgccacctcgcccaccttgctttttaatttaaagcagggtctgcatatcatctgaagtaatctctctttggggacaccccgcatgtccagaactgccatccggtattgtggtggccctaaggctaggggtagcatggagacttaagtgcaaaggaggacctggacaaatgtgcccacacatcctctcaggcgaggagaatggacaggagagagaggccgatccgtgttccccgtgttgctatgtaaggaggtgcgggaccgaggaacctaggtgtggacagggacaggcaaggcgggggacgaagagaaatgaaagccacatcggtggcggatgttctgaacacaactcgctcgctaccgcacgttccccgctccgcactcagcggatcccgggacggcagcaggtgggctgcacacggactctgggacaagtcgagctgaaaaccgcggagctaggggtggggtggagacgcccgcgacgccaaggctggggtcccggaacacgctgggaggagggtggaaggcaacctcggggaaactgggaaaggcggcctggacttcgggaacaccgcgtacctgcgggggcacagccccacccgagcgaacgggctccaaaggggaggtcccgcggtgcccaccgcgcagagctcagggggtggtgcgcccggcccttctgcggcgcacagcccagcccag

SEQ ID NO: 16120 - DNA, 2300 bp, Homo sapien
tctggcttgtaggattaaaggatttaatacatatcaggaacttagaatggtaccaggggtgggtggtctacaatattagctattgcttattttgttcattctatggagcataggggatatttatttatttgcacataaaggcctggagtgctcagctgtgtatcctgttatcctcatctaccgcatgagcatgtgtcctgtggtctaaagagagccattcagtgtccccacaaaattgttatcaacactagggttataaagctatgaggaagattctgtgcttcatgtcagatacagaagaatgactgccatttctgttaccacctgcaccatcccttagttaatattttaccttgaaatgatcaatacttcttaaacatatttttatgaaaagcaaattattttccacctgagaaaatgaaatccaatcttgtcttacacatggaagatagcccccaaattaatgtgtgtgtgtgtgtgtgtgtattacacttatggattacttttgccactgcccatcagagagctggtagcttcctgttgtttatttgagggtttttggttgtttttgtttgttgagacagagttttacccctgtcagccagctggagtacaatggcccaatctgccacctctgcctcccgggttcaaacgattttcctgcccaagcctccccagtagctgggattacaggcaactgccaccatgccaggataatttttgtatttttagtggagacagggtttcgccatgttagccaggctggtctccaactcctgacctcaggtgattcatccgcctcggccttcgtaagtgctgggattacaggtgtgggccgcggtgcccttcccctgttgtttagaagatttccagcaatagagaagtgctgacgacatatctggaccaaaggaaggcttgatcatggacactttcctttaagaggctggctggacttaaacaagggcacaaatttttagctctgtgacgaccagccagttacttggacatttcctttgtagtcctgtgatgagcaaaacgggttcataactagtatttccctttaggattgctgtgaggattcaaagaatgaaagagattaaaaagggactggtgtagactcaatgtcatgcaatagtcaggtatactgaagagaaacaactgcatgtcttgttttttaattttattattttagagatgctgacttgctatgtggactaggcagaactcgaactcctgggctcaggtgatcctcccgcctcagcctcctaagtagctgggactacagcttcccgcgacctcacccatcttgctttttaatttaaagcagagtctgcatatcatctgaagtcatctctctttggggacatcccacaggtccagaactgccagacggtagtggggtggccggctaggctgtggggagcatggagatttatctgcaaaggaggacctggacaaatgttcccccacatcctctcaggcgaagagaatggacgggagagagaggccgaccagtgttccccgtgttgctgtgtacggaggagccagtccgagggaccgcggtgtggacagggacaggcaaggcggggaaggaggagaaacgaaagccacattggtggcgggtgctctgcacacgactcgctccctaccacacgccccccgctccgcacacgaccgatccggggactggagcaggagggctgcaccgggactccgggacaggcccagttgaaaacggcggggcgagggggtggggtggagacgcccgcgacgccaaggctggggtcccggaaagcgcggggaggagggtggaaggcaaaggcaacttcggggaaactgggaaaggcggccgggacctcggggacactgcgtaccacccggcgcacagcccctcccgcgcaaacccgagccaaaggggcggtcgagcggcgcactcggagcggagctcaggggatggtgcgcccggcacttatgctgggctcagcccagcccagcccaggaccgctggcggtgcgaacccagccgggcgggtgcaagcgcggggcagggcctctgcgcccggccccctcccctgagtagaaaagcagccgcaggctgtggcgctccaccacgccgtccgggtgggcctagcagtcgctccatttatcgcttgagatctccagccttaccgcggctcgaaatggaccccaactgctcctgcaccactggtaagagaagccgaccctgcgccctaggaatcccatttcccagccccagtactgagggtctctgggtttgaggaggtcgcatttaagttctga

SEQ ID NO: 16121 - DNA, 2300 bp, Homo sapien
acgtaaaaagcttcctctgggtctgggttctgagctccagccaggcttgctattggggcagggcggtgcccggtcaagtctactgctacctctctctccccttcttccccaggctgctgctcctgctgccccgtgggctgtgccaagtgtgcccacggctgtgtctgcaaagggacgttggagaactgcagctgctgtgcctgatgtgggaacagctcttctcccagatgttaatagaacaagctgcacaacctggattttttttcaatacgatactgagccatttgctgcatttctttttatattaaatatgtgagtgacaataaaacaattttgacttgaatcttactctgttcttctttgtgtgccttggaaaaaatggactgggtgggggttaaactgggagtttagagaccagtctctggatgaaaatgtgagtcactaacaatgtgaacaccttcaggccagccaggttactcactgagttcacccttctgtaaaacggtattgcattgtgcacaccatatgggtgcgggccatacatgatcgcttttagtgtgattccaaatgtggtacagaaacttcatcccttatttttattttctgattttcctccacaacttgagatccacattggattttaggcttaaaagtggctatagtgctggaacccaacttcttagtttcttgaatcctacacgggtgctatgatttagatattttgtcactgccaaatctcatgttgaaatgtgtcctccactattgcaggtggggtctagtgggagcttttggggccatgaggacagatccctaaagaatggcttggtgccctcccatggtgaagggtgagtttttcctttggtaggtcactccagagctgtctgtcaaagtgattagaaagggacaggtatagactcaatgttatgccttagtcaggtatacttcagagaaataactggatgtcttgctttttaattttatttttttagagacgttgactcactatgtggactaggcaggacatgaagtcctgggctcaagtgatcctcccgcctcagcctcctaagtagctgggacttcagcttcccgccaccttccccaccttgctttttttctttttctttttctttctttctttctttttttttgggtggggggaccgagtctcgctttgtcgcccaggctggagtgcagtggcgctatttcggctcagggcaagctccgcctctgcgttcatgccattctcccgcttcagccacgggatagctgggactacaggtgccccccaccacgcccggctaatttcccatcttgctttttaatttaaagtagggtctgcatatcatctgaactcatctctctttggggacagcccacaggtccagaactgccagccggtagtaggggtggccggctaggctgtggggagcatggagatttatcagcaaaggacgacctggacaaatgtgcccacacatcctctcaggcgaggagaatcgacgggagagagaggccgacccgtgttccccgtgttgctgtgtacggaggagcgggtccgagggaccgcggtgtggacagggacaggcaaggcgggagatgaggagaaacgaaagccacatcggtggcgggtgctctgcacacaactcgctggctaccgcacgctccccgcttcccactcagccgatccggggacaggagcaggagggctgcaccgggactccgggacaggcccagctgaaaacggcgaagcgagggatggggtggagacgcccgcgacgccaaggctggggtcccggaaagcgcggggaggagggtggaaggcaaaggcaacttcagggaaactgggaaaggcggccaggacctcggggacaccgcataccgccgggcgcacagcccctcacgcgcgaaggggcgccagaagggcggtcccgcggcgcgccgggagtggagctcaggggttggtgcccccggcccttctgctgcgcacaggccagcccaggaccgctgggggctcgaacccagcggggcgggtgcaagcgcggggcaaggcctctgcgcccggcccccttccttgagtaggaaagcagccgcaggttgtggcgctccaccacgccgtccacgtgcgccttgcggtctctccatttatcgcttgagatctccagccttaccgcggctcgaaatggaccccaactactcctgcaccactggtaagagaagcccaactctgcgccctgggattcccatttcccagccccagtactgagggtctctgggtttgaggaggttgcattttaagttct

SEQ ID NO: 16122 - DNA, 2300 bp, Homo sapien
gctggccctgagtgcacccttctggtgaactgggctttctttgccctcgttgcccatttcattccttctcccagctttctgccctgagttcagatggggcagaacagcatttttctcttgggatgcaaaccccaactgtaccatctatggtttcagaacagagctatgccagacgaaaaaagcttcctctgggtctggcgtctgagctggagccacgcttgctattagggcagggaggtgcctggtgaagtctgctgccacctctcactctccccttcttccccaggctgctgcttctgctgccccatgggctgagccaagtgtgcccacggctgcatctgcaaagggacgtcggagaagtgcagctgctgtgcctgatgtgggaacagctcttctcccagatgttaatagaacaacctgcacaacctggattttttttttatacaatactgagccatttgctgcatttctttttatattaaatatgtgagtgacaataaaacaattttgacttgaatcttactctgttcttctttgtgtgccttggaaaaaatggactggggtggaggttaaaccgcaagcttagagaccaggctctggatggaaatgtgagtcactaataatgtgaacaccttcaggccagtcaggttacctcactgagttcacacttctgtgaaatggtactgcactttgccacaccatatgggtggggaccatacatgatcgcttccagtctcatgccaaacgtggcacagaaacttcattccttatttttattttctgattttcctccacaacttgagatccacattggattttaggcttaaaagtggctatagtgctggaacccaacttcttagtttcttgaatcctacatgtgtgctatgatttagatattttgtcactgccaaatctcatgttgaaatgtgtcctccactattgcaggtggggcctagagggagcttttggggtcatgaggacacatccctaaagaatgacttggtgccatcccatggtaaagagtgtgttcatcctctggtaggtcactccagtggtggctgtgaatgaaagtgattagaaagggactggtatagactcaatgttatgccttagtcaggtgtactttagggaaataactggatgtcttgctttttaattttatttttttagagaagttgacttgctatgtggactaggcaggactggaagtcctgggcttaagtgatgctcccgcctcagcctcctaagtagcttggactacagcttcccgccacctcccccatcttgctttttagtttaaagcagggtcagcacatcacatgaagtcatctcctttttggggatatcccacatgtccagaactgccagacggtagtggggtggccggctaggctgtggggagcacggagatttatttgcaaaggaggacctggacaaatgtgcccccacatcctctcaggcgaggagaatggacgagagtgagaggccgacccgtgttcccgtgttactgtgtacggagtagtgggtccgagggacctaggtgtggacagggacaggcaaggcgacagcgaggagaaacgaaaatcacatcggtggcggttgctctgcacacaactcgctcgctaccgcacgctccacgctctgcactacgccgatccggggacaggagcaggaggctgtggctgcactcagacttcgggacaggccgagctgaaaaccgtgagaggggtggggtggaggcgaccgaaacgccaaggctgggttcccggaacgcgcggggactagggtggaaggcaacttcggggaaactgggaaaggcgaccgggacctcggggacgccccgtaccccgggcgtaaactcactcccgcgttagcggccccaaagcggggagggggtggtcccgtggtccgcacccaggggagctcagtggactgtgcgccttgcctttctgctgcgcaaagcccagtccaggtcatcacctcgggcggggcggactcggctgggcggactcagcggggcgggcgcaggcgcagggcgggtcctttgcgtccggccctctttcccctgaccataaaagcagccgctggctgctgggccctaccaagccttccacgtgcgccttatagcctctcaacttcttgcttgggatctccaacctcaccgcggctcgaaatggaccccaactgctcctgcgccactggtaagggatgctaggtttctggtccttaggatacctatttccccgccacaggatagatgtccctaggagtagaggtgttttttgagttctagctaagtg

SEQ ID NO: 16123 - DNA, 2300 bp, Homo sapien
gtaatctttattcatagcatagggatatttttctacctctagacaaataagccaggcctggtgggcttagctgtgtgtcccatgttgttctcatcaataacaggagcacgtgacttgtggcccagagagggtcctccactagtccacaaataaggatccatattggatatataaagccacgagcaagacagtccctgtctgcataacaaatgcaaaaggattcctgccatttctgctatcgcctgcgctgttattttccttaacattttctcttaagtaatcatatttctttaatatatttataggaaaagcaaactctttgacactactgagaaaaagaatcagtcacacttgcagatatggaaggtagccataaaattacatatacatcccttctgtcacttccagaattgacctggacgtttgtttatgtttaaagatttcaagcagtaaagaggtgctgaagacatacccaggccaaagggaaagtttgcccttgacctctttcccttgaaaagctgactggattgagacccacagtaccactgttaccggtgcagggtgtccaggttcttagtaccttgaacaaagaatttgacaaaatgtacaaagtaagggagggaggaagcaacaaaagcggaggtttattgaaaacaaaagtatactgcacagggtgggagctggccccagcgagtggctcaagggcctggttatagaattttctatggtttaaatatcctctagaggtttctcattggttgcttagtgtacactctatgtacaagaagtagtggtccgctatcagtctgactgattgcagaaagcaaccaattagaagctgaagtgaagttacaaagttactcctgtgcaaatgaagatgtagcccaagaccagcccaactggttgccataaggggcaaatcagaggtactttcaatttctcatctcccatgcagacaaagtggggaggggttgcaaacgaagtagcctctggtccttttgttacttgggtgtggaaagttggggttttccttttggtttagttctagaaagactgtgaatcagccttaggttcactgcctccagaatctattctcttgcctcagcacttccaccctctgttccgggctagttacctatctccttgtgttgtcgttgtctgattagtaagatgctgtcataaagagtattatcctcgagggttgctgagagggttcaaatagccaaagtgactaaacagggtctggccaagaccaaaagctcggcaatagtcaggaattctgaaagtgaaataagcacttttcatgcttcctaatttaatgtagggtcaccacatcagggaaaagatccctcccttggtgacgtcccaagctttggatgtccttagtcctggtgggccagctaggctgtgggaagcccaaaagaagttaaagcaaaagaggacttaagcaaatatgcacatcgccccctcaggagtggagaatggaagggagggaggcagagccctgtatctggcctgttgctgtgtgctgtgaaaaggaaaaatgaggccaaaggacctgggtgactatgcaggtgggtcgaagatcacatgggaggctggtcctctgcacacaactccctcgctgcgcttcccgcctcggtcttatctggggacgtgagcactaggctggggtagcacatggactcccacagagccgaagctcacgtcactggtgcggggtgcgggggtggggataccgcgaccacctgaggctgggttcccggaccgcccaagggcaggaatggagtgcaatctccgggaaattcgggagggccgggattatagcagggacgccgcgtaccgccaggagcacagcccctccaaagcgagcgtgagccaaagggccgcccccagggtgcgcaacagccacgttaaggaggatcctgcgcccggcccgcctggtgcgcacagccccgccctgaaccctgggcagcgctgacactgagctgggctggtgcgagacctggggcggggccactgcacccagcaccctgccctgactgtaaagtcaggcggcctgctcctgttccgcctcctaccggcccgcctgttttttcgcctgtggcttaggaactccagcctcacctgatctccgaatggacctcagctgctcctgcgccactggtaaaggatgcctggtttcgggtcttaggatcttcattttcataccacagaatagaacatccctggggcaggaggcaggtgcattttgagctcttcctaaagtggactcctttgctttgcacttctcgagcttt

SEQ ID NO: 16124 - DNA, 2300 bp, Homo sapien
accaggttccctgtctcagatcactttttcagctaaaaaagattcctttaagattataaaatggtatttttactgtacctttctatgtttagctacacaaatacttaccattgtgttaaaattgcataatagtgtataggtttgaagcctaagaacaataggctaaagcagacagccaagctgtgtagcagccagtatcagctaggtgtgtgtgagtacattctacaatgtttgcacaatgacgaaattgcctaaagacatatttcttagaatgcatacctctcattaagtgacacatgactgtaatagggttggactcgtagaggccaatgatttaatggatgtaaagaactcagaatggtgccttgtacatgaccagtggtctataatattaactactattttgttattattattcacggctgctatggcctgaatgcttgtgtccctccaatattcatttgttgaaatctaactttcactctgttgcttttaagaggtggtgcatttgggaagtgactatggcatgcaggcaaagcgctcatgaatgggattagtgccttaataagagaggcctgagggagcttgtttaactctttccaccatgtgaggaccagcaagaaagagacatccatgaggaatggggccctcacaagactccaaatatgctggtgccttgaccttggacttccatgactccagaactgagagaaatatatttttgctgttttaagttacccagtttaaggtatctggtggtagcagcccaaatggactcagacgatagcatagttgacatttttactccagacaaaagagccaggcctggtgtccctccctgtgtgtcctctgtctttctcatcagccacataagcattgacctgtggtcctgacagggtcctgcactctgccacaaaataaggattcacaccagaaatataaagccatgagcaagacagtccctgtccccatcacagaaatggaaagacgcctgccagttctgctaccacctgcaccaatatgtgactcaacatttttcttttaaatgattcctatttccttagatatatttatatgaaaagcaaactcattagcgctactgaaaaaagaatcaatttaacttccagacatagaaggttgccatgaaattctccttattcatacccctctgcatccctgttttgcttccaggactgaccttgatgcttggttttgtttaaagatttcaaacagtaaagagacgaatatacctaggtcagacggaagcttcatcagtgccctctctcccttgggaagctgacaggactcagacccagcagtatcatttcctagccctctgaccacgggctagtggcttgaactccttgtactgtcattgtccagattaggaatatgggttcataaatagaatgtgtgtcccttttgggttgctgtgagggttcaaagattgaaagtgattaaacagggcctaacatggattaatgttatgtacaataataggaatatggaaggaaattgctttctaatttcatccaggatctgcatgtcaccttcaatgatccctcttctggggacatcccacattttccgaatggccatcctgtcgtagggcggccagctaggctgtggggagaccctggagagatttatgcaaaggaggacctggacaaatatccccattcagcttctcaagagtggagaatggaagggagggagacagagccctgtgtctctgtcctgttgctgtgcacaggagaaatgtgactgagggaccgaggtggggacatactcaggcaaggtgggaaatccaaaggtcacagcctccaccagtcctttgcacacaactctctccctgtgctcccgctgctgctgatcctgaaagttgaacacggggctggggttgcacacggtatccagggaaggtaacgatgataacagtcctgagtcaggccaggtcactgctcatggcccaggcatggaccacgggcagtgcagactcagcaggggtgagtgcaagggccagggcggggcctctgcaccccaccacctcccccgactataaagggagcagccagctcctgggctccatcacaccttcctcctgccctgacttctcatatcttgcctaggaactccaggcttgtcttggctccaaatggatcccaactgctcctgcaccacaggtaagggacgcctggctctgggccttgagatgcccattcccggccactgtacacagtgtccctgggttagagaaggttgcattatgagatgtgagttgaagggaactcgtttacttt

SEQ ID NO: 16125 - DNA, 2300 bp, Homo sapien
tctgtcactttagctgtgccttgcaacctctctgtgtctcagtctcctcccctgtaaaaggtgcataataatggcatctggcatgtaggattaaataatttaatacatgtaagaaacttggaatgatgcctggcaagtggtgagtagtctacaatattagctattgcttctttaaaacaatcaatacacatagcataggggatatttgttcattcacagacagagcagccaggcctggaatgcctagctgtgtatgctgtcattgtcatctaccactcaaacacgggtcctgtggacctgagagttattcactgttcccacaaaaatgtcatcaacacagggttaaaaagctatgagcaagatgctgtgcctcatgtcacaaatagaatgacagccatttctgctgccatgtgcacattttatttatcatttcacattgaaatgattaatactttcttaaatatatttttatgaaagcaaactctcttccaccaccaaaaatgaaaatcagtcttatccatatgtagaagatagccagaaaagtatatatgtgtgcatgtgtatgtatgtatatatatatgcttattacacttatggattgcttttgtcattgcccatggttgagctggcgactttgtcattattattattattattactattttgagacagagtctctctctgtcacccaggctcgagtgcagtggcacaattttggctcactgcaacctcagcctcccaagtagctgggattacaggctcgtgccaccacgcctggctaatttttgtatttttagtagagatggggttttgccatgttggccaggctggtcttgaacttctggcctgcagtgatctgcccacctcagcctcccaaagtgctgggattacaggcgtgagccacggtgcccggcctgacttgttattatttaaaagatttcaagccatagggaagtccagcaatagagaagacatagctgggccttatttcagagaatttctcctgagaggctggctggattcaaatcagtgcacagctttttagctctgtgacgatgagcacgttgcttgaactttctttgttgtaggtgtccatttattaatatgggttcatgcctagtatttccctttacaattgttgtaaaggttcaaacaatgaaaatgattaaaaggagactggcacagactcaaccttaagcaattgctagtaatattgaagggaattaaccacttgtctttcttacttcttatgttaagtttttctttttctttttcttttctttcttttcttttcttttttttttttttttttttttttttttttttttgagagggagtttcactcttgttgcccaggatggagtgcaaaaatggtgcgatctcggctcaccgcaaactccgccttcagtgatctcgcttctgggggcatcccatattttccaaactgccatcctatagtggggtgcccgtcgaggctgtggggagaccccggagagatttatgcaaaggaggacccagacaaatgtgcccattcagcctctcaagagtgaagaatggaagagaggggggcagagccctgtgtcttccgtgttgctgtgcgcaggagaaacatggccaaaggactgaggtggggtgacagggacaggcaatgctagagatccgaaggtcacatcctcggcctgtcctttgcacactactcccttgctaggctccctgctcccgccaatctagacagtggcgcaagagactggggttgcactgggactccaggaaaggcttagctgttgacgaaggaccggggcggggccggggggcggggcgaaggccaggatctccaggtacccggaaccccaaggggcgggtgtagcaggcaatcttggcgaaactgggaagggcgggcaggagggcagggaagccgctcacccaggcacaaagcgcctcccgcttgagcggactccaaagggacggtccgcggtgtgcagcgagctgcgctcaggggaccttgcgcccggcccttctgctgcacacagcccacccaggacctcccgcagcgctgacaggcggggcgggtgcaaagacggggcggggtctctgcgcccggccccctcccctgactatcaaagcagcggccggctgttggggtccaccacgccttccacctgccccactgcttcttcgcttctctcttggaaagtccagtctctcctcggcttgcaatggaccccaactgctcctgcgccgctggtaaggaacgccgggttccgtgcctggggatgctcgattcccagacaccatagaga

SEQ ID NO: 16126 - DNA, 2300 bp, Homo sapien
agccagcagccctgtgaccaaccaggtgacgtggagcaggacagccttgagcctcaggaccctcaactctgacatagaggaacagggaggaggaaaatgccctcaggagcttggccaacaggaaagcactggaccaataaaggagtcccctttacctctgatagcaaaatacgacctcctcaaacccagggacactctctatggtgtctgggaatttggcatcccaaggcacagaacccgggcgtcccttaccagcggcacaggagcagttggggtccattgcaacccgaggcgagactagagttcccaagcgagaagggaagaggcagtgggtgcacgtggaaggcggagtggagcccaacagccagcggctgtttttatagtcaggagacggggccgggcgcagacgccccgccccgcccttgcacccagcccgctgagtccgcaccgcccgcggtcccggcctgggctgtgcgcaggagatgggccaagtgcaaggtcccttgagcgcagctgggcgcacaccgcaggacggcccctttcgcaccggctcgcgagggaggcgctgtgccccccgtgtgcggcttctctcaccctgccaggccttcccagcttccctgaggttgcctgctacacccgccccttggcgttccgcctaccccagtattctggctttcccctcaccttcaccaacgcccaggtctctagtcaatagctaagcctttcctggagtcgagggcaaccccagtcttgtgctccactttctggatctgccaaagcggggagcatagcaagggagtagtgtgcaaagggcaggccaagggtgcgaacttcgcatctctggcagtatccgccctgtccccgttcccacctcagtcctttggtcacgcttctcctgtgctcagtaacacggaagaaacagtgatctgcctctctcttctattctccactcttgaggagctgaatgggcccatttgtccaggtcctcctttgcataaatctctccagggtctccccacagcctagccgggtaccccactacaggatggcagtttggaaagtgtggcaagtccctagaagagggatcattgaaggtgatatgaagatcctgcattaaattagaaagcaagagcgctggttatttttccttccatattcctattactctatgttacacgggtctgtgtttggccctgtttaatcactttctgtctttgaaccctcacagcaaccctaaagggacatgagtccttttcacgaacccgtattcctaatctggacaatgacgaggagttcaagccactagcccagggtcagggagctgggaagtggcactgcttggtgtgaatcctgtcagcttccctaggtagagaggtcagtgatgaagcttctctatggcctaggtatgtttatctcttcactgcttgaaatctttcaacaaaaccaagcattacagtcagtcctggaagcaaaacagagacatagagggatatgaataagtatactttgatgggagggaggcagggtcctgtgtcttccgtgttgctgtgcacaggagaaacgtggccgaagaactgaggtggggacggggacaggaacaggcaatgccagagatctgaaggtcgcatcctcggcatgtcccttgcacactactccctcgctgtgctctctgctcccaccaatccagacaattgaacaagagactggggttgcactgggactccaggaaagccttagctgttgacagggggtgggcaggccccggggtgtggggcgcaggtcaggatctcggggcacgcggaacgccaaagggcgggagtagcaggtaatctcagggaactgggcaggcccggcagggtgaaacaagcagctcacccgggtgcacagcccctcccgcgggagccgctgcgaaagggccgtccccgcggtgtgcaccgacctgcgctcagggtactttgcgcccgacccgtctgctgcgcacagcccagcccaggaccgcgggcggctcggactcagtgggtcgggtgcaagggtggggcagggtctctgcacccggctccctcccctgactagaaaaggagctgccaactgttgcgctccaccacgccctccacgtgttccactgcctcttctcttctcgcttgggaactccagtctcacctcggcttgcaatggaccccaactgctcctgcgaggctggtaaggaacgcccgggttctgtgccttaggatgccaaattcccagacaccatagagagtgtccctgggtttgaggaggtcatattttgcgatctgagctga

SEQ ID NO: 16127 - DNA, 2300 bp, Homo sapien
agccagcagcctcgtgaccaacggggtgatgtggagcaggacagccttgagccttaggaccctcaactctgacatagaggcacagggaagagggacatgctctcaggagcttggccaagaggaaagcagcggaggaagtaaagaagtcctcttcagctcagatcgcaaaatatgacctcctcaaacccagggacactctctatggtgtctgggaatttggcatcctaaggcacagaacccgggcgttccttaccagcctcgcaggagcagttggggtccattgcaagccgaggtgagactggagttcccaagcgagaagagaagaggcagtggaacacgtggagggcgtggtggagcgcaacagttggcagctccttttctagtcaggggagggagccgggtgcagagaccctgccccacccttgcacccgacccactgagtccgagccgcccgcggtcctgggctgggctgtgcgcagcagacgggtcgggcgcaaagtaccctgagcgcaggtcggtgcacaccgcggggacggccctttcgcagcggctcccgcgggaggggctgtgcacccgggtgagctgcttgtttcaccctgccgggcctgcccagttccctgagattacctgctactcccgccctttggcgttccgcgtgccccgagatcctgacctgcgccccacaccccggggcctgcccaccccctgtcaacagctaaggctttcctggagtcccagtgcaaccccagtctcttgttcaattgtctggattggtgggagcagagagcacagcgagggagtagtgtgcaagggacatgccgaggatgcgaccttcagatctctggcattgcctgttcctgtccccgtccccacctcagttcttcggccacgtttctcctgtgcacagcaacacggaagacacaggaccctgcctccctcccatcaaagtatacttattcatatccctctatgtctctgttttgcttccaggactgactgtaatgcttggttttgttgaaagatttcaagcagtgaagagataaacatacctaggccatagagaagcttcatcactgacctctctacctagggaagctgacaggattcacaccaagcagtgccacttcccagctccctgaccctgggctagtggcttgaactcctcgtcattgtccagattaggaatacgggttcgtgaaaaggactcatgtccctttagggttgctgtgagggttcaaagacagaaagtgattaaacagggccaaacacagacccgtgtaacatagagtaataggaatatggaaggaaaaataaccagcgctcttgctttctaatttaatgcaggatcttcatatcaccttcaatgatccctcttctagggacttgccacactttccaaactgccatcctgtagtggggtacccggctaggctgtggggagaccctggagagatttatgcaaaggaggacctggacaaatgggcccattcagctcctcaagagtggagaatagaagagagaggcagatcactgtttcttccgtgttactgagcacaggagaagcgtgaccaaaggactgaggtgggaacggggacagggcggatactgccagagatgcgaagttcgcacccttggcctgccctttgcacactactcccttgctatgctccccgctttggcagatccagaaagtggagcacaagactggggttgccctcgactccaggaaaggcttagctattgactagagacctgggcgttggtgaaggtgaggggaaagccagaatactggggtaggcggaacgccaaggggcgggtgtagcaggcaacctcagggaagctgggaaggcctggcagggtgagagaagccgcacacggggggcacagcgcctccctcgcgagccggtgcgaaaggggccgtcctgcggtgtgcgcccagctgcgctcaagggaccttgcacttggcccatctcctgcgcacagcccaggccgggaccgcgggcggtgcggactcagcgggctgggtgcaagggcggggcggggcgtctgcgcccggccccgtctcctgactataaaaacagccgctggctgttgggctccactccgccttccacgtgcacccactgcctcttcccttctcgcttgggaactctagtctcgcctcgggttgcaatggaccccaactgctcctgtgccgctggtaagggacgcccgggttctgtgccttgggatgccaaattcccagacaccatagagagtgtccctgggtttgaggaggtcgtattttgctatcagaggta

SEQ ID NO: 16128 - DNA, 2300 bp, Homo sapien
ggcatggtggcacacgcctgtagtcccagctactctggagccttatgcaggagaattacttgagcccgggagacagagattgcagccagccgagatcgcgccactgcactccagcctggccgacagagggagactccgtctcaaaaaaaaagattaccagcaatagagaagtgctgacaaacctgggccaaaggaaggcttgatcttggacactttctcttgaaacgctggctagattcaaatcagtgtaaactgtttagctctgtgatgttgagcaagttacttaaacttcttgttacagttgtcagtttcattcgcgtccatgtgaagagaccaccaaacaggctttgtgtgagcaacatggctgtttatttcacctgggtgcaggtgggctgagtccgaaaagagagtcagcgaagggtggtggattatcattagttcttgtaggttttgggacaggcggtgaagagcaatgttttgtgggcaggggtggatctcacaaagtacattctcaagggtggggagaattacaaagaaacttcttaagcgtgggggagattacaaagtatcttcttaagggtgggggagattacaaagtacattgatcagttagggcggggaagaaacaaatcacaatggtgggatgtcatcagttaaggctatttttacttcttttgtggatcttcagttacttcaggccatctggatgtatatgtgcaagtcacaggggatgcgatggcttggcttgggttcagaggcctgacagtcagattagtaaaacaggtcataaatagtatttctgtcaggcctctgagcccaagccaagccatcgcatcccctgtgacttgcacgtatacgcccagatggcctgaagtaattgaagaatcacaaaagaagtgaaaatgcgctgccttgccttaactgatgacattccaccacaaaagaaatgaaaatggcctgttcctgccttaactgatgacattatcttgtgaaattccttctcctggctcatcctggctcaaaagctcccctactaagcaccttgtgacccccactcctgcccgccagagaacaacccccctttgactgtgattttcctttacctacccaaatcttataaaacggccccacccctatctcccttcgctgactctcttttcggactcaggccgcctgcacccaggtgaaataaacagccttgttgctctcacaaagcctgtttggtggtctcttcacaaggatgcaagtgaaaatttccctttaggattgttgggagtgttcaaggaattaatgatttaaagaggcctggcacattctaaatgttacatgataagaacattgaacagaaatacccacttctctccttgattgaccgcagggtctgcatgtcacctaaagtcatcctctttggagggcatccctcattttcaaaactgccatcctgcagtggggtggccggcaggcctggaaagtcccggagaactatatgaaaaggaggaaactgacaaatgtgcccgccatcacctcagaggaggagcatggagggaagagagagaggccgacccgtggtcgccacgatctgtctacaggggaaaagagtttgagggtcttaggtgggaagagttacaggtaatgaggggggagggcgagggagaagcaaaagtcacctccaccatggctcatctgcacactgctcactcgctctgctcccggctctagccaatgaagaaggtgagcaagaggatggacccggatgcacacggacccgggagaggcgaagctgaggacgactgtgcgggggagggagaatggagggggtggggacagcgcgaccacctgggaatgggaaatggccctcagggtggcaggggcggcgcgtacctctggcagcatagcccctcccgcacgagcgggccccaaaagggcggtccccgggagcccaccaggctgcactcaggggatggtgcgcctgacccgcctgctgcgcacagctcaacccaagaccgcaggcgccgcggattccgcgtgggggtgggtgagaagggtactctgcacccggccccctcttctaactataaattgagcttccggttcctagaatccaccacgcctcccacctgccccactgcttcttctcctctcccttaggaactctagcttcacctcgcttcgtaatggaccccaattgctcctgctccactagtaagggataccgggtttcggggctttagaatatccatttccattccagaggatagaatgtacccggggcaggagggaggtgcatgttagctcttcct

SEQ ID NO: 16129 - DNA, 2300 bp, Homo sapien
gcaataggccatatcacatagcctaggtctgtggtaggccataatatctaggtttgttattgtactctttacactgtttgcacaacatgaaatcacccaacaatgcatttcttagaatgtattcccatcactaagcagcatatgactgtaatggggtctgacttgtagaaataaatgatttaataggtataaagaaattagaatggtgccttgcacatggcaaatgatctataatattaactattattttgttatttttattcatggctgctatggtctaaatgctcgtatgcctccaatattcatatgtgcaaatctaattttcagtgtgttggtactgaggtggtgcatttgggaggtgactgaaataagaggacctagtgctcatgaatgggattagtgccttaattagagaggcctgagggagcttgtttaactctttccaccatgtgaggacccagcaagaaagagacatccgtgaggaacggggccctcacaagactccaaatatgctggtgccttgaccttggacttccatgcttccagaactgagagaaatatattttgctgttttaagttacccagtctaaggcatctggtgatagcagcccaaatggactcagacgatagcatagttgacatttttactccagacaaaagagccaggcctggagtccctccctgtgtgtcctctgtctttctcatcagccacatgagcattgacctgtggtcctgacagtgtcctgcactctgcccacaaaatagggattcactccagaaatataaagccatgagcaagatagtccctgtccccatcacagaaacggaaggatacctgccagttctgctaccacctgcaccaatatgtgacttaacgtttttctttcaaatgattcctatttccttagatatttttatatgaaaagcaaactcattagcaccactgaaaaaagaatcagtttaacttccagacatagaaggttgccatcaaattatgcttattcatatcccctctgcatctctgttttgcttccaggactgaccttgatgcttggttttgtttaaagatttcaagcagtaaagagatgaatatatctaggccaaagggaagcttcatcattgctttgggacgctgaccggattcagacccagcagtgtcacttcgcagccctctgaccctgggctggtggcttgaactccttttattgttgttgttcagattagaatatgggttcatgaatagaagtatgtccctttagggttgctgtgagggttcaacgatgcaaagtgactaaaaagggcctaacacggattaatgttatgtagagtaataggaatatggaaggaaaaataaccctgtttcttgcattttaatttaatccggaatccgcatatcacctaaaatgatcccttttctgggagcattccacattttccaaactgtcatcctgtggtggggtgcccggctaggctatggggagacctggagagttttatgcaaaggaggacctgggcaaatgtgcccattcagcctctcaagagtggagaatgcaaggacgggggcagagccctgtgtctgttctgtccctagacataagagaaacgtggccaacagaccgaggtggggacggggacagggaccggcaatgcaggaaatccgagtgtcacatcctctgcctctcatttgcacactgctccctcgctatgctcaccgctcccgccgatccagggacgtgatccagggactctgggaaatgcaaagctacacacagtggagcgggggctgggggtgtgtagaccgccgggattccgagtttcccggcacgcctaggagagggagaggcaggcaatgtcagggaaattgggcaggcaagacgccagggacgccacgtactgccaggttctcaacgaggtggagccaaaggggcaggccccgcggtgcgcccggcgctgggctcacgggttgctgcacccggcccaggatcgcgggcggtgcagactcagcaggggcgggtgcaaggacgaggcggggcctctgcgcccggccctcttcccggactataaagagagccgccggcttctgggctccaccacgcttttcatctgtcccgctgcgtgttttcctcttgatcgggaactcctgcttctccttgcctcgaaatggaccccaactgctcctgctcgcctggtaagggacacctagctccgcgccttgggatgcccgtttcccagccacagtacagactcttcctgggtttgaagaagtcgcatttaaagttctgagctgaaggggctccttt

SEQ ID NO: 16130 - DNA, 2300 bp, Homo sapien
gtttcaccatttgcccaggctggtcttgaactctgaggctcaagctaccctcttgcctcagcctcccaaagtgctgagattacaggcgtgaaccactgtgcctggccactttttccatttaacattatgtttccaagattcatccatggtgtatctgtggctgaagcacactcatttttcactgctgtgtaatgctccattgcataatatcccacaatttatttatcctttttttttttttttggttaacagatatttggcttgtttcaagttttttgctaatatgaactgtgctgctatgaagattcttacttataactcctggtgcatatgtgtaagagtttctctagggcatatatctaggagttgaattactgggttttacaatgtagaaatattcagctttaaaaggcaagtgtccggaattttcatttggcaatattgcacaagcatttgtctatgtcattaaaagtgctttttttttttttttttacataaagaaaaagcaaagtaaaagtataaaacattattcagatgcaagatactattatctttgtggatattctctgaccatagcggggtctggttacatatataatagcttcagggcaaaggccacattcatacatattgttaatcagcaccaattatttatagagaactcacaatatgctggtgtgaggtattaaaaataaacaaagctggacactagttgctatagacttcttaatgtttgtgtcctcccccttcaaatttatatgttgaaactctgctctccattgggatggtattaagaggggaggactttggtaggtgattgggtcatgagagtgaagccctcatgaatgggattagagccctaataaaagaaatattggagagctcccctcacccttctgtgtgtggttacagggagaagagtgctatattagtccgttctcatgctgctgtgaagaaatacctgaaaccaggtcatttataaagaaacgaggtttaattgactcacagttccgcatggctggggaggcctcaggaaacttataattatggtggaaggcacatgttcacagggcagcaggacagggaatgagtgcaagcaggggaaatgccagacgcttataaaaccaccagatctcatgagacttactatcgtgagaacagcatgccagaaactgccccccatgatctggttacctccacctggtctcacccttgatatgtggagattatggggattataattcaaggtgagatttgggtggggacacagagccaaaccatatcaagtgctatctatgaattaggaggcaggccctcagcagacactgaatctgcgggtgctttaatctaaggcttcccagcctctagaactgtgagaaaaaaatttctgttgtgtataagccatccagtctatggatgagtctgaccccacttgtccctactcaccatcttccagccgcacaccccttctttctagtctccaaacactaagctggcttcccctggagacttcactcttgttccctctgcctggaattctttgaagccagaactttgcaagccccatcctttctcatccttctttattcagctcaagatgtcgccatctcagaaaggcctcccttcaacatccaagcattctctctcccatcaccctgttttttcttcatagctcttcttgcaaagtgcagttatttattacatttttgtttcccctgccaacctgggaactcaatgagggcagcgatcttgtctgacgtggtcgccacggtgttgccagttcctagactaaggcctggcccttggatggcgctcaagaaggagtaagaaattcctttaacttagggaattctggaatcgctttctcccggcagagccgactctaaccaagtgggaaaggcgaggtccgtggctgcctgtggcccaggggtgacggtttggcccaaggccccacctccgccccgcccccggccccgcccctgttcttgtcctcccccacgggtctccataaagttcatttggcgtcgcaccgcgcgagggcttctgggagcggccagccttggccaatcaggaagcgggggagagcggcgcgagaagcggcggccgcgtcctcaagccggcacctgagcggcggagacggctgtagcacaaggtaagggtgtgtctggtcgcgtccttgcgaccctgggcttgtccttgaacccaggaccccgtgactgggtggagcgccgtccccacgctcggaaccccgccgctcatacttcccgttctcctcatggcagccgggcacgcctgacgcc

SEQ ID NO: 16131 - DNA, 2300 bp, Homo sapien
tttattctagcataaagaaataccctcttaatttatttgttggcaatactaaagaggaaaaacgtcttaacagtgacttggtgaagtttttttcagtaaataaagagggttttcttactcccctgtagtgaacctcagatgtatcccttgggaacaggttttacatccgtgaaatagtttgactttaaccacacttgggtctttgggttcttttcatccccaggcagagattcctattgctatatatccaccatgctccagtacagtatttatttgatcagaaacaaaagagtttgcttcttgtactggttcagagaggtcccccaggattgtcttttgttcagtaattggagcataagctgagcctggttaatttcaaagctaccctcaacacacacgtttctccctccctccttgtgcagttttctcagctgttagtggtaccttgtattgggtctggaacaaaaaaagcttgattgttgaatgttagctacaactactgtgacatctgctatggcaccacatagcactgttggtgcagttaattttaagttagggtaagaaaactagaaagctcttcagctttacagtgctcgttaacacatgcacctccaaattatgcatttggtgttatcacaatgaataaaacaaaggaaatcatgagttgatttttatgctagtaacataagttctttcattgttattcactgttcagacaccagtgtgttcctatgttcattctttttagtttacttggggttttttgtttgtttttgtaaggcagaaatgtctgaaacatctcaactctgggtatttatttaattggcaaaagttctgatgtaagaaataagttaattatatttattcttttaaaggaacaatgtaagttggttttgcttcttaaaatacaaaaatgatgatggtagctgagtaagaaccgtcagtagtcaaattctgtatgctaaatagccaagttaatatttatataaaaatacatcatgaaattggcaaatattatgtgtctttcagattctgcagtatagatgttggttttgcaaccaacagattgcaatcttagggtttgtggtttttgtttttgaggagagaatggttctattttccttttgcagtctgcaccatgatgatggcccatcacctgaccagcctgactttaatcatctggtgccttggtcttagcgtggctctgtctttgctttttcacaagctttcctataattgtacagttgtttgccgcactgaatttccttttttgacagtgaaaaacatgataatattttaatgtagtcttcaattttcaggttatatgttaaaacgtggaggaaaaaaatcccttcctgaggagcacttttaaaaatcattgcagtagaatgggaatattcattacttacacatcatatattttcccctaaatgttgtgcaaagaagtgacagttgagctgagcatatgttaataaaaggtctgcattttcctgtgtcagtgacagtttcattggctgtatattcctgaaatgcaaataacctctgttcttttcaaagctataattaatctgaatagttattaaacagtatcaaaatcttttaactactaagaggccaaacatttaagatggcgaatttactgttctgcttgaaggacagtacaattgacaagggcacaatgatccgagatgcttctgtatgttgtatctacacatactgtagactaaaatggcagaatctgtctgctgctgtataaaatcttttaactaccatttattttagcatcatggcatgtgcaaattcctgctgctcagttaagggaccagcttcacaactggtgttacaatctgtggccacagcactgcatcacaatgcagcaaatgcattttccacattaaccaaacatgacagctgaagcgattattaaccatgcaagatgtcggaagtcatcaaagattcacatcagagtaattgcagtggtttgggttggggaaaaaaagtatcatagcattccttgcctacatgttgtctctccccctcttaaatcttaacttggtacagtccgttaacaataaaatacccttctgtaacctataaactgttactcccatcagtttgtgctttcaaactgatggctgacttctctgaatttgtgtagcgcacaacgaatggtgatgctgtgctccgggggctgcagtgcaccctttttaaagggaccctgcaatctcattgtttaatttgactctttagtgcttcagtcacatcagcacttgcagaggggttgttcttttcctttttct

SEQ ID NO: 16132 - DNA, 2300 bp, Homo sapien
tgagagccctcacaacagctgggaaaatacgccctccatttctagtgacacatcaagtgtgcgcccactaactcatctctccagaccctaactcacctctttcatcccctgacagctcaaatttccaccactgcctccctgcaatggcttaggcacctctggtaacaagagtgctgctcccatgccacctgcatgcaaggtgtggcctcagagtgctggcaaaatcgggtcctgatctgctccagcactggtagggtgactgctcctatgggagctggggtgccctgtctgggatggcttcaggagccaggaaaggcgctggctccccaagctttataacccaatggccctgcaggcagggcccagggaaacatggcccacactttgggtgatgcctaggggccctggaggccaccgcctggtcccaggccccagggcttgtcagtctattggtggatatggattacaattctgacctgctgagctctggtttggagttacttgtagatgtctctggaggtacacatagacattgggagacaggttggagctagagagactaatgtgtgtgtgtgtgtgagagtgtgtgtgtgtgtgtgtgtatatatacacatctttttaaatattataccagctaagcgcagtggctcacgcctgcaatcccaacactttgggaggtgggaggctgaggtaggagactcacttgagtccaggagtttgagaccagcctgggcatccagggtcaggtggttggggtgacttgagaccccatctctacaaaaagtaaaaacaaattagccaaacatgatggtgtatgcctgtggccccagctacttgggaggctgaggtgggaggattcttgaagtctggtggttgaggcttcagtgagctgcgattgtgccactgcactccagcctgggtgacagagccagaacctgtctcaaaaaaaaaaaaaaaattatataattcatctattcaaaactactaaataattttttttttttttcgagacagagtcttgctctgtcgcccaggctggagtacgatggtgcgatctggactcactgcaacctctgcctcctgggttcaagcaattctcctgcctcagcctcccaagtagctgggactacaggtgcccaccaccatgcccagctaatttttgtatttttaatagagacagggtttcaccatgttggccaggctggtgatccatccacctcagcctcccaatattaaataaattttttaaatccaaatactaatatgagaggtttttgaactctcatagagtaggacccagagtgtgtcctcaggctaagggaggacaccacccctcatattgtcttatgcccagtttctgcttccaaagaaagaaaaagtaaaaattaaaaggcagaaatgaaatccacaagcagacagcccggcgccacaccctgggcctggtagttaaagatcgagccctgacctaatcggttatgtaatctatagattacagacattttatagaaatgcactttgaaaatccctgtcctgttttgttccaatctaatgatcggtgcatgcagcccccagtcacgtaccccctgcttgctcaatcaatcacgaccctctcacatgcacccccttagagttgtgagccctgaaaagggacaggaattgctcactctgggagctcggctcttgagacaggagtcttgccgatgccccccggccgaataaaccccttccttctttaagtcggtgtttgaggagttttgactgcagctcgtcctgctacaaagccaccaggctatctctaggatcccttatggggcccctcagggtcctctctgacaactccttcttgggtcctggctgaagatctctgctgcccccagactcagaagagccactccaggactcagggagtggctggctttgggccagcccagccctccagatccaaggcgggtcccctatctccacaatcaaatggtgttctgcctccggccctgtccggggaccctgctcaccagccacgggcggtttaggccaacctccctgcctcctccccagtgcagacgcagcctataaaaccaccctgtgtgtccttgcggatcctggcccctccctggacacccaggcgacaatggcagaactgcccacaacagagacgcctggggacgccactttgtgcagcgggcgcttcaccatcagcacactgctgagcagtgatgagccctctccaccagctgcctatgacagcagccaccccagccacctgacccacagcagcaccttctgcatgcgcacctttggct

SEQ ID NO: 16133 - DNA, 2300 bp, Homo sapien
agtctacccattttggctgctgtcactgcagaaaaccctgcttcacagagatgggatgttgcaataggccaggcatggaggctcacatctgtactgctagcacttttggaggccaaggcagctggatcacttgaggcgaggagttcaagaccagcctggccaatatagcacaaccccatctgtctctactaaaaataataaaaattatatatatagccaagtgtggtggtgcactcttgtaatcctagctacttggtaggcggaggcatgaggcacaagaatggcttaaaccagagaggcggaggttgcagtgagccgagaacgtgccattgcacttcagcctgggcgacagagtgagaccctgtctcaaaaaaaaaaaggatgttggaaatgaaagcaggcttttcagtgtttttgtggccatctcaggattaaagcctagactttaacccagaacgtggagatttgaagttgtctcaaacatactgtttttttgttgttgttgttgttgtgtttttgtttttttttttttgagacggagtctcgctctgttgcccaggctggagtgcgatggcacaatctcggctcactgcaacctccacctcccgggttcaagcaactttcctgcctcagcctcctgagtagctgggattacaggcacgtgccaccatgcccggctaatttttgtattttttaggagagacggggtttcaccatgttggtcatgctggtctggaactcctgaccttgtgatccacctgcctcggcctcccagaatgttgggattacaggcgtgagccacctcgcccagcctcaaacatacttttaaggccaccagatgcagctgtacaactgaagtacatacacttgccattgtaaagcctgccaccagatgcagcttgtcacttgccactcactgatagtgttttgatatgagtctgcaagcaattgatttatgatggcctctgtgcagtgaaacctctctgctaatgttaatccgtatttgcagccactctcagcactagcatcagcaactcagctccacctcccatcatcaggcattcgattctcgtaaggagcacagcctagttcccttgcgtgcacagttcacaatagggttcggctcctgtgaggatctaatgccccctgatctaacaggaggctgagctcaggtggtaatgcagcgatagggagcagctgtaaatacagatgaagcttcgctggtggctcacctcctgcggtgccgcctggttcctaataggccagggactcatagtggtccgtggcccaggggggttggggaccccgtcttaagccatccagtttgtggcactttgttatggcagctgcagcagatgaatatacccaccaaccagaccaggctcctcctgttaccttcctgaccttgacaagctcctgacaacacctgaaaaaacagatgtcccaagggggttggaacaaggagggagccggggcaatgtcagttttgtttttcaagcctttttttttttttttttttttcctacagaggaggaggagggaacgcctacaataaagaggcctttatggtcccacttcaggaatcggagaaccccgccctcctcgtctcagccccaatttaacgggtgcatgtgtgagtatcttataaagtgacgcgttttgagggggactccagtgtgagcaggactgtggctgacttgtcaatcatcattagggtgatgtcccaaacgttcaagtctgaggcccagggaaattggcaacagctgcctggatgcctccatcctcccagcccaaggaaaatctggccttgctccttcgttgtctttcttaggagcacgtggagttctcctaggtgggcttgcactcggggtcgcccagccgttctttgagggttcgagtgggtaggcttcccctgtaggacgggcttccccgtaggtttccacgtggggccacagaggcaggaaaaggggaagtgggcactgacacctggggtgaaaaagggtgggggtgcggctttgtgaggaaagaatttgcagagactgctaaactggggtctgctaggataccccactccccaccccctgcctcgggcgccctcagccacccgagctgggggcctcgcaggtctcagaccaagctccccgcgcggcctgcagcgcacccaaacatggccaccgaacccgggttcccggggcacagccgcgcctctgggtgacgcagacgcggcgggttgcatcagcccgtgcccacgtgctcggtccgccctctgccacccggatccggacgccgattgggccacg

SEQ ID NO: 16134 - DNA, 2300 bp, Homo sapien
gttgcagtgagccgagattgtgccactgcacttcagcctgggcgacagagcgagactctgtcgaaagaaagaaagggaggaaggaaggaagaaagaaagggaagggaagggaagggaggggaggggaggggaggggagggaagggagagagaaagaagaaagagaaagaaaggaagaaagaaaaagaaggaaagaaagaaagaaagaaagaaagaaagaaagaaagaaagaaagaaagaaagaaagaaagaaagaaaagagtgaacccaggaacgaaagatcacacacactgtatgactctatttacatgaaatgttcagagtaggcaaatccatagagacagaaagcacatttatggttgccaggagctgggaaagggcaggatggggaatgactgtttattggatgtggggctctattttggggtgatgagaatgttctggaattaaattcatggctgcataacactgtgaacatactaaatgcccctgaattgtacactttaaaatggttaaagtggcaagttttcactaagcagtaaattaaattctactacaattttaaaaagactaaaaaataatttaaaaaagattaaatgagataacgcaaaaaagcattatctcgaaaatacagctgatattagtataattcttactaagttttaagagtctaaggtgcaggattctaagtttaaagggataggctcttttggttttttggtttagttatttggtttttttttttaatccattatccccacccttgggaggcccccagcacccagtctgcactagaggatggggcccacctcccttttctctccaggcccagccactgaccaccagtaccctggccaggggcaccctcggtcattgccctccgtggcccaaggaagggaacagaaacaacagccaagaagacaatagccgccgggaagtcctcacatttctggagaaatagagcccattaatgaatgaagttcctccagcctgatcggaggacggggtgctggggaggcctgggctaaagggctcacctccagcccccaccctggcagggccgatggtacatgctcactcagtgagggggctccagaggtctgtgggtacgaacccaagggctggtgcccaggggcaatcagcttatgtctctgagccttgggaaacagtgagggtcagcccggctccccacgtgcttctgggcagctttggtattggagcaggtgcaaactcgggactagggcaggaccccctgagaggcgactgagcaaggccatcccgactcatgtttccttggccctgcccggggcacagcatcctgcccacatccctgcagccctggctccttcctaggggctctgaggaggcagcacttggtcatctggtcacagttgctgcagggcagttcttggccccagctgtaggtaaagtactgtatgttgtaattttttgaaagataacacgttcacacaactcagaattgaaatgccacagacattccccctgctccgcccctttcccccggatacccagtttctcccggaggcagccaatgatctcagaggctgtatacccccccagagttattttatgcatatcaaggaaagtctacatagaggactgtttctggggtacccagatgcagcgtcaaatgccatggaatactacagtgaggacattatcctttcaagctttcaaatcagagcaagggaaaggtcgatgctagagtttctctagcacccatgaagccctctccctttttctactgagttttactttacaggcaacagcaggcttcaagcttggggtcattgtcgggcaacagtatctggcaagaattcaatgtctttttctcatagtcattgtattttggcctctttctatttatggcaactgagagagaaagcttattcctagatatatgtatttaagtaaaaaataaatgaattcatggaaacatattaagcaattatccagataacataagggatggcaaaaatggtgcagatggtggaggggagacaagtagaagttggggtgctcttgttgaatgtctggctctgaactctagaggaggccgcaggggctgggcaggaaggaggtgaatctctggggccaggaagaccctgctgcccggaagagcctcatgttccgtgggggctgggcggacatacatatacgggctccaggctgaacggctcgggccacttacacaccactgcctgataaccatgctggctgccacagtcctgaccctggccctgctgggcaatgcccatgcctgctccaaaggcacctcgc

SEQ ID NO: 16135 - DNA, 2300 bp, Homo sapien
agcaagactccatctcaaaaaaaaggagagagcacagtgtctggtatatcctaagtgctccacgagtgccagacattggttatacttcatggaggtgaggtacacagaggtgtctaggtcatgcggactcactccatcctccagttaaccatgactccctccccacccacctcctgagttctctctgctgtcaaactttcctctcatatctccagtttcccacccaaaagtccaaacactcaagattccttctcatctccaacccataaaatctgatcggcttctccacactcaagtgtaaatgactgatggccatttgattgacactggaggggctggcacatttttagcacatttttagccaaaggtatgatgtgctgatagcggactctcaggccacaagccagtctgaggacagggaaagtttgaggaggtcactcttccagaaccctttggtgataacctttctggcaggcctggtacccccagagtgaaaagggctccagggtcaagacccagctctgcccctcattgctgtgtgaccttcagcaactcacttgatttatctggacctcagcttcttcatctgtctaatgggataataatctttgtcctgccctcctcacagggctgttcagaattaaatgcatctgaaaatgatctgcatttgtgtcttggactgtggttatttgttcaagtgtctgtctaccctgcctgcacagggagcgggtcagggtcttccctgggacttcatgcacaggtctttcctgggacttcatgtaggaccagccatcccgtcagtgctcagtgaacatgagctgcttccctgtgggatgtctgggaggtgagtggaaggccttcctagcaggcacatactggaacataatcaatccctcccatgcatacagctcacacccacattcttatccattcccaccatgcccctcagtggcctggggagactaggaataccccacttgacagataaggaagctgaggccaggggaggtcaaggcatttgtctgaggttgcacaaccaggagtggtgaagctgggagtcacacacaaggaatcactgcaaagtctgtgtccttcccactctgagtaggacttgaaccagggatgtccgatgctgatgcttgtgtcctgaccactaccttgcagcgtcctcacccacacccaccccaggcctgggaggcaggggagcaccagcggtctgggagtgaaagttgcttccctgtgggatgtctgggaggtgggtagaaggccttcctagcaggcacagctgcccaccggatgagtatgtccagggggagaggagccccctgtcccaggatgtgggcaaaaacctggagaagctgaagctggactttgaggatggcccctgactccatcctgggacagccacctccccttccttctgccccctccagtccctcctctccttccctgctctccctcctacctctttccatctccccctttctgcctgtgattcctcctgtgactggggcaagatccttcacctctgtcctccctgagcctcagtggctcacctggaacatagggtgatgcctgcagaagtattttagggttactttatgagataaattggtagactgtttttcccgggtcagccagccaggggttcggtgaataggagcgaacgctgctgccattcccttctcccctagttcatcctggaggctctccgctctccccctggttctaagtcccctcctcctgcaccgtatcccccctcccatccaacccagtccccactgaggcactgagacagggtcttggcccagggtccccacccacctgagctccgcatgtgagccgaccttcacccgcctgcctcagtttcccgtccacgaaaggggtgagcgcccccacgtctcctgggactgtccttgggtccgatgcggggctgtggggaggtgccagggtgtgggcgcagcagggagcgggtgtgttaggcccccgcccatcccgcgcccgagccccatctggctcgggctggcacctcgaatccacgtgatttctcggcagcagccgccagttccatgcactggcggagcagctctaggcggcggcttctactttcagtttcgtgcagagcgcggaggagccgcgagcgctgagggtgagtgccgggagctctgagggtgagtgccgggcgtgccgcggggctgcgggacccgggctggggcgagcggaagggagaggatcggggttcgaattctgcacggagaggggtggaggggatgtcagaggccctggagcgggaggtgcgg

SEQ ID NO: 16136 - DNA, 2300 bp, Homo sapien
actggagtgcggtggcatgatcttggctcaatgcaacctctgcctcctggcttcaagtgattctcctgcctcagcctcctgagtagctgggactacaggtgcctgccaccatgcctgactaatttttatgtttttattagagatggggtttcatcatgttggccagactggttttagactcctgacctcaagtgatctacctaccttggcctcccaaagtgctgggattacaggcgtgaaccaccgcacccggcctccagcctcttcttgtgagggcagtaatcccatcataaggggtccaccctcttgacctaatcacttcgcaaaggtcccacttccaaataccatcacactgggtatttaggcttcaccaggtgaattggtgggggaggtgggacacaaacattcagtccacggcaagtttttatctcaatttgctaaagcctctctttatttctcctgttacagtgtgataatgttttttaaaatatcatttagctggctgtggtgacccatgcctgcagtcccagctactcaggaggctaaggcaaaaggatcacatgaacctaggagtttgaatccagcctgggcaacatagaaagaccctgtctcttaaaaaaataaataaataaataaataaataaataaataaataaataaataaaggaaagaggctgggcacagtggctcatgcctataatcccagcactttgggaggccgaggcgggcagatcacctgaagtcgggagttcaagaccagcctgaccaacatggagaaaccccttctctactaaaaatacaaaattagccgggtgtagtggcacatgcctgtaatcccactacttgggaggctgaggcaagagaattgcttgaaccagaaggtggaggttgtggtgagccgagatcatgccattgcactccagcctgggcaacaagaatgaaactccatctcaaaaaaaaaaaaaaaaaaaaaaagaaagaaaagaaaagaagcacttaaagaggctgaggcaggcagatcacttgaagtcaggagttcaagaccagcctggccaacatggtgaaacctagtctctactaaaaatactagaattagccagacgtggtggcacatgcctgtaatcccagctactcgggaggctgaggcatgagacttgcttgaacctaggaggtggaggttgcagtgagctgagaacatgccattgcactccagcctgggcaacagagcaagactccatctcaagaaaaaagaaagagagagaaagagaaatatagacatatgttattagtcccccaggacctcttcaaaagatctctcttttcctttcttatttctaattaccatactacataccacctccattatgtcagaatgtgccctatttacgtggatttgtctaaagtcatggaactctgagttacattccccgtatttcacagagacacaatcagagcacacgctgatcttccgcctctcttcatttcctccatgtactctgtagctacctgttctcttctttgttcgtaggaagatctctgttgcgtggtgtgggagtttgtgccagctcatctttttattgtgctttctgtgagcagctatcaatgcctccaggtcttctctttaagaagaatgtttactctcaattgtttaaaaaactaactaaataggaagaagattgcaaatcctaacctttttggggttttatattgggggcaaaagttggcatctgcagtaaggattatttcattttcatctgaataaatgagcagtaataactttgctgacttgcagggctcattgtgatgccaaaggacattgtaaggtgcatatctgaattggaggaggaagaggggcatcctctgagccaggtgtggcaggaggtgacatcaaggagggttaggctgcgtaaacccagggacacaaggagctgcagtcggggaagaacaaggtctagcggatggagttggggggactgtgtctggagccaatgttctcagatgtgtctccggcaggcaggggcaagggctggtgcctggtttacagcattccttttggagtctggaatagtggggaaaactccctgtcttctctccccttaggagtctgcactatggaaacaacctgtcaatccagctcaaggcacacatagcccagacacccatgagaccctctccgtggggaccctagagcacctatcatgaacgaggagaccaagtaggtgatttttctctccccttcacctcctcttttcccctcctatctacttcgtcacttttctcctactgccaagactggtccc

SEQ ID NO: 16137 - DNA, 2300 bp, Homo sapien
aggacgcatagtactggcctcagcctctgggaattgggaaggctggcttctgggtggacctcctactcttttcagagttagaggtggactctctggagttgtgaggataaaataaggtatataaagcacttagacagtgcctaatacacagtgagtgctttccaagtgtgtactgctatgaggaaggacatagtaccagaaagtacatccggaaatgtgatagcatagtccactagatgatggaccaccatttagttggccaatccccaactgttggacatttaggttgtttccaatttttaataattataaataatcttgcagtgagcatctttgcaattaaatattgtatatacgttcatgatcgtttgccaaggttagagtcctagaaatggaattactgaatcaaaggaactgcacattatttaggcttttgctgtgtaaatgccccgtgccctctattggtacttctagaaggaggtggtttaagagttccagttcggccatcatgatggctcacacctgtaatcccagcactttgggaggccgaggtgggcagatcaccctgaggtcaggagtttgagcccagcctggccaacatggtgaaaccccatctgtactaaaaattacaaaaattagctgggcattgtggtgtgcacctgtaatcccagctactcgggaggctgaggcagaagaatcgcttgaacccgggaggcggaggctgcagtgagccgagattgcaccattgcactccagcctgggtgacagagcgagactctgtctcaaaaaaaaaagagttccagttcagaagggaagaatttgcttagcaaaagaggtgatggtctgtgttagctaggattagagttcactgtgagtagcagaaagcactaaacaacagtggcttaaccagaatggaagtgtatttccctgccatgtaacagaagtccaaagtcagtgagcacagggcagatgggcagctttaccttccaccttcctcagtatgggttccacctcatgattcaatatggctgcccaagatccagccatcccatcaacaatccagacaacaggaaggagcaaagaagaatagacaacatttctacttacattccactggccaaattacatggctacatataactgcaagggagactgggatataataatctattctagatgaccagagaatatttagtagttctaatactgaggaagaagggaagaacagattttgggagacaactagttgtctctgccatgaggttagctcagactgagagcagcataaatggttcatggaaataagaatgagtaatgcatcctcacgggactgtccacaggggatgaacaagaccattccagagagccagggtgcaggcacaaatggagtagggagggggtgcagaagaaacagactgatctctggagctgatccctgggcagagacatcaagactccatggagaggccacttccctgcctattttatgtcgctcaaatgtagggactggttcttgactgcttgacttccctagaaactcccttatcccccaactcaccttccccagatcaccttccccctagttcatctgtaccccactcacctgccctcaggtcacctgccccacaactcacctgttctccatctaatcttcctcccagctcccctgtcccccaaatcacctgcccccaatttgcttgtcctccagctcaccggttccccagctcatcttccttccagttcccctgtcccccagctcacctgcctgccctcagttcacctgtcccccagttcatcttcctcctagctcccctgtcccctagctcacctgtgccccagctcccctgtcccccagttcccctgtcccccagctcacctccccctcagctctcctgtcccccagctcatctgcccccagtttacctgtcccctagctcacctcccccccagtttacctgtcccccagctcacctccccccagtttgcctgtcccccagctcaactccccccaagttcccctgtccctcagctcatctgcccccagtttacctgtccccctcaactcacctatcttccctgtccctccagggctggctcctcatggaccccgttggcctccagctcggcaacaagaacctgtggagctgtcttgtgaggctgctcaccaaagacccagaatggctgaacgccaagatgaagttcttcctccccaacacggacctggattccaggaacgagaccttggaccctgaacagagagtcatcctgcaactcaacaagctgcatgtccagggttcgga

SEQ ID NO: 16138 - DNA, 2300 bp, Homo sapien
tgcctagaagtccactctgcaaatagaagctggtgttgacccagcctctgcctgctgcctgcctttccagtccctgcatgtgggtgtacttggctgcctgccacctgtctgtggactggagttccccaaaggttctgggtaacccctcagcccagatccccagaccccactcctccaccccttcctttgctttttcaggcctgaagcgcccacatcagagctgtgggtcctcaccccgccggaagcagtgcaagaagcagcagctaggtgggtaccagtgtggggaggaacataaacagagagatggggttgcctgggggccaagacccggaccctggaccttgtcccctgccaataagcctccagaggcccagtgactcttgtctcgcaagtttccaggagaaaaggactggaggtcttgcacaggcagaggagaggcctgggctggcagcgaaggggctccccacccatctggctgcatggggacttctctgaagagggctccgctgaaggagctggaagcaccatacaggtctcagcttcgctgtccaggcttttccagggacaccctatgtcctcagtgttgaaggagacccagggaggagaccagtttgggggtgagcagggatggggaggggtgaggaggcctgggagaaaccttcaagacagaggccctgggggcccatggggagacatggagctgcttagggcaggccaggccagtgagagaagaaaggggacttctctcattcttgaccagttctcagaatggtcctcgttctccacgagttgtcccactaactagagccttctctgcccccactgctgccaaccatggctataaccagaggattcacatccgctcaaaatagttcactaccttggcctttccccatagggttcccccaaaagcagccccagccctttccctgggtcacctgagacctctcaatgacccaggaattaaaaggttaacatctggcactgtaggggcccagctcccacagttccgatcggtaatgcctaggcctacaggttgttagtgctcacccctgggcattgcagaactgaaatattgggaagaggcactggggatccagatattacagaaagaggttgtttcaataagatattgcaaagtagctgggcgcggtggctcacacctgtaatcccagcactttggagggctgaggcaggtggatcagttgagcccaggaattcaatactagcctggccaacgtgacaaaaccttgtctctactaaaaatacaaaaattagctgggtgtggtggtgtgcacctgtagtcccagctactcaggaggctgaggcaggaggatcacttgagaccaggagtttgcggctacagtaagctaggatcgtgccactgcactggagcctgggcaagactgagactctgtctctgggaaaaaagaaaaaaaagagatgttgcaaaggaggtgccctattcccctccccccatcttactgaacccttacaccacgtgtactattgcagaatggatagaaccgtgacccacacttccccattcccacctgcctgtttaaatagctaccggagagcctatgctcccttagaactgattccttctggaagttggggtggcacagatccccctatggtgctcttgacacccccaccctcaccccatcatacatacacatctggggctacaggctcccaacagcccaatactggggcaagaagacatgagcagagggccggggggtcctctcctcatgccatgtccctgccccttgcagagttggccaagaagtacctgcagctcctgcggacctctgcccagcagcgctacaggagccaaatccctgggtcagggcagccccacgccttccaccaggtctatgtccctccaatcctgcgccgggccacagcatccttagacactccggagggggccattatgggggacgtcaaggtggaagatggtgctgacgtgagcatctcggacctcttcaacaccagggttaacaagggcccgagggtgaccgtgcttttggggaaggctggcatgggcaagaccacgctggcccaccggctctgccagaagtgggcagagggccatctgaactgtttccaggccctgttcctttttgaattccgccagctcaacttgatcacgaggttcctgacaccgtccgagctcctttttgatctgtacctgagccctgaatcggaccacgacactgtcttccagtacctggagaagaacgctgaccaagtcctgctgatctttgatgggctagatgaggccctccagc

SEQ ID NO: 16139 - DNA, 2300 bp, Homo sapien
ttctctggatctcgattccttgcttgtataatgacctggtagtgtaggaccaatgttgctgggtgcggtggctcatgcctgtaatcctagcactttggaacgccaagcacgagaatctcttgattccaggtgttcaagaccagcctgggcaacatagcaagaccccatctctaaaaaaaaaaggcaggcgtggtggtgcacacctgtagtcccagctactcaagatgctgacgttgggaggatcgcttgagcctgggagcttgagccatgatcacaccactgtactccagcctgggtgacagagagggactctgtctcaaaaaatgacccactaggaccagtgtcactttcttttccctctaactgcttaaagctgtgatgctcagtaggatagccactagccccatatggctatttcaatttaaataaattaaaattttaatgctatttcaatttaaataaattaaaattttaatgctattttaatttaaataaattaaaattaagtaaaatgaaattttcagttcattagtcacattagctatatttcaactgctcagtggccataggtggctagtggctcccatagcaagtggtacagatgccaggacatttccatcattgcagaaagttctattaaacaggctggcatggtggctcatgtctgtaaccccagcactttgagaggctgagggggcaggatcgcttgaagctaggagttcaagaccagcctgggcaacaaagtgagacccccatctctacaaaaaaaaaaaaaaaatagctgggcatggtgattcactcctatagtaccagttactcaggaagccaaggtgggaggatcacttgagcccaggagtttgaggctgcagtgaactgggatagagccactgcactccagcttggggactgagtgggaccctgtctctaaaaaaaaaaaaatggttagcaccaatccaaaaagtctgtgaaacctggctcatgatgtcctagcttccctgcatcccctaacgctccctcagcccagtgggagagagtctgtggtttaccatagcctggactcactgcatacagctcatgctcctcgccttctgaaccacagacagcacatccacaaatggagaccatcacatcatcgacaatagcagcttctgtttactaaccttcgattttacacctatgctgggtacttggacatacattgtctcattcaatccttcaggtacctatgtgctagatgttgtcatccgttttagaaaagagaaaagggagccgactgcagtgatttgcccaaggccacatggctatacatggcagagccaaaatttgaataaaggttccatttgacctcaaacctgttgcccctcctgctctgctgaatcacatcttgagcatctgcaagcagtctcctttgttaccgactcactttgggttgtgcttcagggtcttcagcctctagaagccaaggaaagaggcttgatccaccaggccctagatgcctgagcccaggccaatgcttgatttgttcttgccagagctccagacctgcaggaaagtgacggccagaggaaaggggctcagagcagaagcttgacgctcaggtaccttggagggatctattgccttaggagagggatatgatatgggggaaagtccgaggcaagggagagcaggggcagggaggataaagggaaaagcagatgagggacagggaaaggattagccgggtgtggtgcccatcctggatagcccatcctggcttgaataaggagcatctgtcataataacaatagctgcaacttaatggaaccggctatctatatgccgggcattgcactagatgttttacatccattacctcactgtaattcctttagaatctctgtgaagtacacattattattcccctttgagggaggaggaaactgagtctcagacaggttaagtcccttgctcaagatcacccagctactaagaggtgtggctaggattagacccaggtctgtgggccccctgactcccccagcattggaagctggaggggccatggagtaggggctgtttgccctgagcccttctgtcccccactcctacccaaggctgcagaagtgtcagctccaggtccacgatgcggaggccctcatagccctgctccaggaaggccctcacctggaggaagtggagtgagtatcacgggaagccctggcgtaggagccaggaaaggaggttggagagggtgggcagggcctcgcctttgggtgggtggtgtgggggaggggcatgctgcctcatgaagaatttgg

SEQ ID NO: 16140 - DNA, 2300 bp, Homo sapien
aagattataaaagattataataaagcttttcaagatatgcaatggcagaaagaatggtataatctgggccaggtgctgtggctcatgctgtaaacccagcactttgggaggctgaggcagggggatcacctgaggtcaggagttcaagaccagcctggccaataggatgaaaccccgtctctactaaaaatacaaaaactagctgggcatggtggcgtgcacctgtaattccagctactcaggaggctgaggcaggagaatcgctggaacctgggaggcggaggttgcagtgagccgagatcatgccactgcactccagcctgggagacagagcaagactctgtctcaaattaaaaaaaaaaaaaaaaaaagagagagcatggtatatataatctgttcccatcaataatgatcaagtattaataattatttgtcatccctgcttctagcccttaaaaaactaatgtttaaaaagagaatctatagtttaatcccatgtttgtaaaacaaaaattattgcactagaaaatggaaggtttgaaggactcactccaaaggttaccaggggtaatccacacatactttgagcacagacagaacactgactagcagagagaggggtttcagtctggggctaaaagagagaacacagaatttgttttcttttaagacttgccaggaaatggggcttacttaggcaatagatacatttgtgaaatatctgtggtagaaagatttcagccctccaaaagctcagaggaagtcagaggggagtcagaggaagtggctgcagctggaggcagggggatggaacttgagaggtcctcccgggccaggggtaaaaagtgacaggccgggcacggtggctcacacctatcatcccagcactttgggaagcaaaggtgggaggatcacctgagcccagaagttcgagaccagagtagacaacatagactgtctctacatacttttttttttaattagctgggcctgatggcacaagcctgtaatcccagctactcaggaggctgaagtgggaggattgcttgagcccaggaggtggaggcttcagtgagccatgattgcaccactgcacaccagcttgggcaacagactgagaccttctctcaaaaagaaatagtaacagggagccaataacctctcgcttcctcacccctcttttgtcttcacagcctgcagcacaaaactgtgatcttcatgtttgcccaggagccagaggagcagaaggggccccaggagaggtagggcccgatttcaccccaactccatgctcagtcagggacattcccctctctaccctccacagctgggcagtgccagtcagtcaactgccagggtgacctggacaaattcacggaagagcgggaagtgagcaggcttggcaaaggatgcagccccaaagggggagggtccaaatccagaccacctccgcctctcatggtgcctgaaaggagccccagtgtgtaggatatagacagcaggccagggcaggagttgggtagccagagggggattccgggagactagagccctccagcttaaacccaggggattgcctggcctgtagctctggtcctggtcggaacttctgtatccctttcacacaaggacccattagggtcctggattgccccagcctagcgcatgggtagagactcagctctttgctcccggagcccacccacaatctcttctgtagagtctggactactgaaggctcgattccagctggggctgacatctctgaagcacagatgaggaggaggatgagattaatgataatagcagtcaaggtcaattgagtacttgccatgtatgcaccaagcaccaaactaaggcagttcacatacagtctcccattgagaggctgtgatttgtccagggtcacacaaccaggaagtggagaagccaaattggcaccaaggtctgattgactctaggtggaggatagggctcgatggtggaaggccaggctgaggatggattctggagatggcggacatggcctttgctcagcctggccttggtgatgtccctccagggctgcatttcttgacagcctcatgctccagatgccctctgagctgcctctgagctcccgaaggatgaggtacagtgatggcctccagccctgtgtgtgattccagccccctcccttcccctgctcagagcctgctcccaaacctgtgcccaggccccacatgctccctgaaggacacctgacctgctgtgtccaggggtcatggcctggcttccctacctcctacctcccctgccca

SEQ ID NO: 16141 - DNA, 2300 bp, Homo sapien
ccagggtgacctggacaaattcacggaagagcgggaagtgagcaggcttggcaaaggatgcagccccaaagggggagggtccaaatccagaccacctccgcctctcatggtgcctgaaaggagccccagtgtgtaggatatagacagcaggccagggcaggagttgggtagccagagggggattccgggagactagagccctccagcttaaacccaggggattgcctggcctgtagctctggtcctggtcggaacttctgtatccctttcacacaaggacccattagggtcctggattgccccagcctagcgcatgggtagagactcagctctttgctcccggagcccacccacaatctcttctgtagagtctggactactgaaggctcgattccagctggggctgacatctctgaagcacagatgaggaggaggatgagattaatgataatagcagtcaaggtcaattgagtacttgccatgtatgcaccaagcaccaaactaaggcagttcacatacagtctcccattgagaggctgtgatttgtccagggtcacacaaccaggaagtggagaagccaaattggcaccaaggtctgattgactctaggtggaggatagggctcgatggtggaaggccaggctgaggatggattctggagatggcggacatggcctttgctcagcctggccttggtgatgtccctccagggctgcatttcttgacagcctcatgctccagatgccctctgagctgcctctgagctcccgaaggatgaggtacagtgatggcctccagccctgtgtgtgattccagccccctcccttcccctgctcagagcctgctcccaaacctgtgcccaggccccacatgctccctgaaggacacctgacctgctgtgtccaggggtcatggcctggcttccctacctcctacctcccctgcccagcccaccccagacagggctcacaaggcagccccgtcaaccaccttcccaagcccaggagaccccactccccttagctccctgacccccagcagctgaggggttgtggagactctgaaaagaggtgaaggggagcactgggctccttctgtcatgatcctggtgcctgggcctgggggctcccatcagcactcttccccccttctctcttggtctttgtctgtcctaatctccctctgtccctctgcctgtttctctcatttcttccctctctcatcgtgtatttctgttttatcagtttatttaactgttatttcagtcttatctgtcttcctctgatctgctctctctctctgaggtctctgtgccttggtttccttccatctgtgtctctgcccaccctctgcctatatgtgacatcctgtgggtgtcgtgtgtgttggtccctctttgtccgtctgtctaggtgccagatacatcccagtccctcctctcctgcaagcctcattctctgcctctgtgtctggggggtgggaaagcggctccttcccgcctctgttcagtggggcatgcagcactgtgtttttgtccctgggcaggctgacacattgtggcctccaagaaaagcacctagagcagctctgcaaggctctgggaggaagctgccacctcggtcacctccacctcgagtgagtggtttgtgtgttggaaggtgggtgggtggggccaattacagtgagttagtgttggtgtttgggtttggtttttaagatttagatcaactgttctttccctgctgaagtcagaaaccccttggagaatctggtgaaagttgtgactcttcctcccaagatacagatcccccatgtctgacacgctcggaggctcacccctggtccctcagaggtccacgaacctcagaataagaacctgggggagaccccagctgcccgtgccagatctgctgagatctggcctggcagcccagggctgtgtccagtttcaggaagttgagtaactggaatgcagggaccatgctgccagcaacccactccccacctgctaatgttctcccctcccttctccccacccccagcttctcaggcaatgctctgggggatgaaggtgcagcccggctggctcagctgctcccagggctgggagctctgcagtccttgaagtgagtagcccgctaggcagagcctctgaggctggggcagggggggagcattctctgtcccatccccctctttcctggggttattgtaaagattaaatcggaaaatgcatgaaaattgcccctaatacaatgtaagttctcggtgaaggctagctaatagatgattcttactca

SEQ ID NO: 16142 - DNA, 2300 bp, Homo sapien
gcaggctgacacattgtggcctccaagaaaagcacctagagcagctctgcaaggctctgggaggaagctgccacctcggtcacctccacctcgagtgagtggtttgtgtgttggaaggtgggtgggtggggccaattacagtgagttagtgttggtgtttgggtttggtttttaagatttagatcaactgttctttccctgctgaagtcagaaaccccttggagaatctggtgaaagttgtgactcttcctcccaagatacagatcccccatgtctgacacgctcggaggctcacccctggtccctcagaggtccacgaacctcagaataagaacctgggggagaccccagctgcccgtgccagatctgctgagatctggcctggcagcccagggctgtgtccagtttcaggaagttgagtaactggaatgcagggaccatgctgccagcaacccactccccacctgctaatgttctcccctcccttctccccacccccagcttctcaggcaatgctctgggggatgaaggtgcagcccggctggctcagctgctcccagggctgggagctctgcagtccttgaagtgagtagcccgctaggcagagcctctgaggctggggcagggggggagcattctctgtcccatccccctctttcctggggttattgtaaagattaaatcggaaaatgcatgaaaattgcccctaatacaatgtaagttctcggtgaaggctagctaatagatgattcttactcagagagtctgtgactcaataatcccacttctgattcaaggtttcacttctggaacctgtctccgcatctctgaacaggcttctgaggccaccctggggagggcaggtgtgggtgcgaagtatgactaacggctggcagttgttattctggccctggggtgccgggaggggctggggctgttagctggggtatggtcagggtagacagggagggtttgtaccagagaggacactcaagcagggtgcccagggctgccaaggatccctgagtacctggcagagagtgtgtaggaggaatccccaaagtttgcctgcaatggaccagagttcttgatccctaaatgcccttggtgcttttggctcacaaagcaccccctcctcccaggcacttctgggccaaagccagaggagcccaggggagaggtcacaggtcctatattccaggctgtctctgtgaacacgctttgctgtgtgattctgggcaagttacatcccctctccgagtccctggttcccagtcggtaaatacataaattgcaggcgtggcctctgttggtggctacgatctctgaaatgagtgctggggcctaaggaccccctgctcacaccctgtttttgtgcaatgctgggaaggaagggagttgccttggttcctgttcagggcctgcacctgggaaggaaggaaggtctaaccattgcaggcaaattacatgaagactggaggttttagtatgtcctcatgtgaccttcttattagtgtggactcgtgacctggtgctgtgagggtccacactcgccctaccagtgtccccgtgggaggggagtgtagcattaaatagtaaatagaaaacaataacaagttgacaggagaccctgaaagaaaggagacactttgttcctgctttctgcacaagagaccctgcattttcattttgtcctgggtaccacccctcccttatcaggtggagaaaaggaggcccagctccagccagaaagcactcctcagatccatcacagaccgagggacccactgggtgcccatctcagctctgtcaccaacatgtctcataaccttgggctagaccttgattctctctaggactctgtttccccatctccaccatgaggacttgcaaggggtgctctctgaccatcttgggttcagtgggttccgtcatctggaaccagggatccctcccccgccctgtgccctgaccacaaagaggatgtgtttgggtcctgagtgacctccattgtgccacccctgtgatctccagcctcagtgagaacggtttgtccctggatgccgtgttgggtttggttcggtgcttctccactctgcagtggctcttccgcttggacatcaggtgagcgtgcctctccgcccccagccctgcccctgtcccccatcccacaggtcatctgctcccacgtgggccccttgtccaccagtttcatgccaacctgtcatcctcagcaccttgggcagtaccagatctgcagagcatgtgatgggcgtccactgaatgaatgaatgatcaaa

SEQ ID NO: 16143 - DNA, 2300 bp, Homo sapien
gccagcaacccactccccacctgctaatgttctcccctcccttctccccacccccagcttctcaggcaatgctctgggggatgaaggtgcagcccggctggctcagctgctcccagggctgggagctctgcagtccttgaagtgagtagcccgctaggcagagcctctgaggctggggcagggggggagcattctctgtcccatccccctctttcctggggttattgtaaagattaaatcggaaaatgcatgaaaattgcccctaatacaatgtaagttctcggtgaaggctagctaatagatgattcttactcagagagtctgtgactcaataatcccacttctgattcaaggtttcacttctggaacctgtctccgcatctctgaacaggcttctgaggccaccctggggagggcaggtgtgggtgcgaagtatgactaacggctggcagttgttattctggccctggggtgccgggaggggctggggctgttagctggggtatggtcagggtagacagggagggtttgtaccagagaggacactcaagcagggtgcccagggctgccaaggatccctgagtacctggcagagagtgtgtaggaggaatccccaaagtttgcctgcaatggaccagagttcttgatccctaaatgcccttggtgcttttggctcacaaagcaccccctcctcccaggcacttctgggccaaagccagaggagcccaggggagaggtcacaggtcctatattccaggctgtctctgtgaacacgctttgctgtgtgattctgggcaagttacatcccctctccgagtccctggttcccagtcggtaaatacataaattgcaggcgtggcctctgttggtggctacgatctctgaaatgagtgctggggcctaaggaccccctgctcacaccctgtttttgtgcaatgctgggaaggaagggagttgccttggttcctgttcagggcctgcacctgggaaggaaggaaggtctaaccattgcaggcaaattacatgaagactggaggttttagtatgtcctcatgtgaccttcttattagtgtggactcgtgacctggtgctgtgagggtccacactcgccctaccagtgtccccgtgggaggggagtgtagcattaaatagtaaatagaaaacaataacaagttgacaggagaccctgaaagaaaggagacactttgttcctgctttctgcacaagagaccctgcattttcattttgtcctgggtaccacccctcccttatcaggtggagaaaaggaggcccagctccagccagaaagcactcctcagatccatcacagaccgagggacccactgggtgcccatctcagctctgtcaccaacatgtctcataaccttgggctagaccttgattctctctaggactctgtttccccatctccaccatgaggacttgcaaggggtgctctctgaccatcttgggttcagtgggttccgtcatctggaaccagggatccctcccccgccctgtgccctgaccacaaagaggatgtgtttgggtcctgagtgacctccattgtgccacccctgtgatctccagcctcagtgagaacggtttgtccctggatgccgtgttgggtttggttcggtgcttctccactctgcagtggctcttccgcttggacatcaggtgagcgtgcctctccgcccccagccctgcccctgtcccccatcccacaggtcatctgctcccacgtgggccccttgtccaccagtttcatgccaacctgtcatcctcagcaccttgggcagtaccagatctgcagagcatgtgatgggcgtccactgaatgaatgaatgatcaaatgaatgaataagtatggcctcacggatgctcaaatttctccaaattcaccattagagagttcattgactctgcctcactcgttctttggatagtccttagagatttttttttttaggattttttttttaattattatactttaagttctagggtacatgtgcacaacatacaggtttgttacatatgtatacatgtgccatgttggtatgctgcagagacttttaagaaaactgggggccaggcgcggtggctcacgcctgtaatcccagcattttgggaggccaaggtgggcggatcacgtgaggtcaggagtttgagaacagcctggccaacagggtgaaaccctgtctctgctaaaaataccaaaaaaaaaaaaaaaagtatctgggcgtggttgtgagcccttgtagtgccagccgctcaggagtcaggagaatcacttg

SEQ ID NO: 16144 - DNA, 2300 bp, Homo sapien
ttccccatctccaccatgaggacttgcaaggggtgctctctgaccatcttgggttcagtgggttccgtcatctggaaccagggatccctcccccgccctgtgccctgaccacaaagaggatgtgtttgggtcctgagtgacctccattgtgccacccctgtgatctccagcctcagtgagaacggtttgtccctggatgccgtgttgggtttggttcggtgcttctccactctgcagtggctcttccgcttggacatcaggtgagcgtgcctctccgcccccagccctgcccctgtcccccatcccacaggtcatctgctcccacgtgggccccttgtccaccagtttcatgccaacctgtcatcctcagcaccttgggcagtaccagatctgcagagcatgtgatgggcgtccactgaatgaatgaatgatcaaatgaatgaataagtatggcctcacggatgctcaaatttctccaaattcaccattagagagttcattgactctgcctcactcgttctttggatagtccttagagatttttttttttaggattttttttttaattattatactttaagttctagggtacatgtgcacaacatacaggtttgttacatatgtatacatgtgccatgttggtatgctgcagagacttttaagaaaactgggggccaggcgcggtggctcacgcctgtaatcccagcattttgggaggccaaggtgggcggatcacgtgaggtcaggagtttgagaacagcctggccaacagggtgaaaccctgtctctgctaaaaataccaaaaaaaaaaaaaaaagtatctgggcgtggttgtgagcccttgtagtgccagccgctcaggagtcaggagaatcacttgaacccaggaggcgaaggttgcagtgagctgagatcgtgccactgcactccagcctgggcgacagagtgagactccatctcaaaaaaaaaaagaaaagaaaagaaaactgggagcttcctagttgccactggggactcagggacctgtcttaattgtgggagctgatgagaatataaaaggggaggcaccagccagccaagccaccccaggcactcagggcaccgcatccatgattttcaggggaggtctgcttccctttcccttccctaaggacccccaagaatgggaggtgccacagcagatggaccaggctcagttacttaactgctgcgagctcagagcaggtcccagagcctctccaggcctcagtttcctcatctgtaaaatggagataagaataattactggcctggcacagtggctcaagcctgtaatcccagcactttgggaggccaagacaggaggaggaggatcacctgagcctaggagtttgagaccagcctggacaacatggtgagacccccccatctctacagaaactttaaaaattagccaagcgtgatggcatgcacctacttgggaggctgaggtgggaggattgcttagactcaggagatcgaggctacagtgagttgtgatcacaccattgcactccagcctgggcaacagagcaagactctgtctcaaagaaaaaaaaatgtcaggcacaatggctcacatctgtaattccagcactttgggaggctaaggcaggaggatcgtttgagccatggagtttgagaccagcctgctcaacatggcaaaaccccatctctacaaaaaatacaaaaattagacagtcatggtggggcgttcctgtagtcccagctacttgggaggctgaggcagtaggatcagttgagcccggggaaggttgaggctgcagtgagccatgactgcaccactgcacaccagcctgggcgacagagcaagaccctttcttcgaaacaacaacaaagaagaatttcttacctcattgtttattgtgagaatcaaatgagaaatgtcgatggtgtgctttgcatgtgacttgatacatgtaattgttgcttaatctattccttgtttgctaagaaagcaggccaccccaggccctccttgccctgaccagtctgggttcttgccactgccagggaagttggtctttgaccattttcaaactgctgcttcctctctgcttccagctttgaaagccaacacatcctcctgagaggggacaagacaagcaggtgaggagggaacgctcggggtgggggagtcccctcccgctctggtccccgtctgttggaggtccccccacccccagacccatgctgaccactcagctctcagttaaaccacccaagtccggcacactaggtttaatcaccacttcagtaac

SEQ ID NO: 16145 - DNA, 2300 bp, Homo sapien
cctcagcctccaaaagtgctgggattacaggcgtgagccaccatggctggctggtgctgggacttttatgtgctcccttttccaggcaagggaatgaaggccaggagaggtgtggagaattttccttactcatacacgaaggacccaggtgttgaatttgggatctcagaccccaaagccagggtccttgatacctacccaggtcctgtgtggatggggaattagccagagactgtctacgggctggcactgcagcctgagacaaggctgagggtggggctctggaaacgccagtccctcaggctcctctcaccctctcctctttccccagcctaccattcagccatctgggcccaggtggggccctgagcctggcccaggccctggatggatccccccatttggaagagatcaggtaagtaggggctgcccagcccaggcacggggacagtcctgggcgggtctgggggttcctctcacaggtatctcccctaccctgcagcttggcggaaaacaacctggctggaggggtcctgcgtttctgtatggagctcccgctgctcagacagatagagtaagtagcctcccctgcctgcctaggggaccagtggcaggctgagggcagcccttctctgactgagcctaacacctggggaggcctttgaagtgatagaagccccagggatggtgggggcctggctcaagaaaggaagtctttcctaaaacgcctagcttaccccagaccctggtggctctggaggcaggacctgctagatcccctgactcaaacaacccccatcccatcccatgcccttctccatccccagcctggtttcctgtaagattgacaaccagactgccaagctcctcacctccagcttcacgagctgccctgccctggaagtaatcttgtgagtgattggaagagccctgagctggctgggaaaaggaaaagtcgggaggggtcgggggagttggctccagcctgctgtgtggcctggagctgctcccatcctctctggccagtcctcccatttgtaaatggggaagatcatccttactcagacatcctctcaaagacattttaacacttgagctgcaggtaatgttgggtaaaacagtttaccttcttctgcctttttccccatttgtagattggtgggaggggaggtggaccagatggtctttaaaggtttttggtccaaccttccttttgggaggcaactggatagaccaccttgcctgcttgatgaaacctccatttatgaaccacagttggtagaaacagtggctaaagccaggagaaagccacccccagacctgctggctggccgtgcttggctgtctcttagcaatcagaatcccccagaccttggggctttgcagtgctgcctcatgagtaaactagaattctaggactagcctgggaccctaaccatggtatggaggacaaagctgtttcctaaagaacaggacacaagtgattacgagaagattttagtttgcatcctaaaggtcttaacccttctcattacaccaaagcgaaagtctcagatcagtggtaattcatctttaacacctaacactggattctccctttttaaccaaaagggttaaaaacccaacatcttaggaagggcatatgttccaactagaagttaataccattgtttgtactatatttatttttgtaactaccttctatatggagtctgtaacacaagttttccattgatagtagcaataaaagtttcctttcaagatttttttttttttttttttttgagatggagtctccctctgttacccaggctggagtgcagtggtgcaatctcggctcactgcaacctccacctgccgggttcaagagattctcctgcctcagcctcctgagtagctgggattacaagtgcccaccaccacacccagctaatttttgtatttttagtagagacaggatttcaccatgttggttaggctcgtctcaaacacctgaccttggcctcccaaagtgctgggattacaggcgtgagcaaccacgcccagccaagattaattttttaaagtaagaaaaaagagggggccaatttaaagaaaaatatgatgcatcttaaatacaggaggtacatgtatgtggcaaaaatggcaacatcttgtgaacaacgtcatgattcaaacttgacggggaggggagcagggaggaaggtaacctgcaccctgacgtcttcaggggaggacacacaagcaccctatcaggtggcctctcttgaaaacccttgcccccacgactggcaccctgc

SEQ ID NO: 16146 - DNA, 2300 bp, Homo sapien
gtagcatgtatcagtacttcccacctttctttttttcctttctttttttttttggaggggggatggaatctccctctgtcacccaggctggagtacagtggcgcaatcttggctgcaacttccgcctcttgggctcaagtgattctccttcctgccttccgaattgctgggattacaggttcttgccactacgcctggctaattgttatatttttagtagagacagagttttgccatgttggccaagctggtcttgaattcccgacctcaagtaatcgcccgccttggcctcccaaagtgctgggattacaggtgtgagccaccacaactggccagtaattcgtacctttctatggctgtataatattctatgttgtgtggatataccacattttgtttttccattcatcagtggatgaacatttgcgtggtttccactttttggctattatgaataatgctgctacgtacatttgtgtatgttttgtgtggccatatgttttcatttctcccgggtagatatctaggagtggaattgctgtgacccctggcctttgtactctgcctccttggctagggatctagtatcttccttgacaggcccaactatctcatccttcaggtttcttaaaggaagcctcgctgactcccatggctgagttgggtcttctgtgccaccctacctccaatctttgcacatttcatatggtgatatgatggcctgggtcctgatcttggcccccacaggtgagcaacttgagagagactatctgctttggttcaccactgtccatcccagtgcctggctctcctgctgctggaaagacaagagacagattctgaggccagagcaatcaggaaagtcttcctggaggaagcggggctggagttgggttgataggttggtttgccccagagcggggcagagggctttgattggcttcggtggaagaaaggtgaagagagcttggagaaaggaaagatggatgggtgacaggcaggcagagaacaaagctcagagccccgggggctgtttagtctcggcccctgtaaggctgcaaagtgccagtgactcagacgtggagggaggctcacaggctgcagcgcgcgaggctcccacattaaccctcacctgcctggaatcgaaaagccacaatggaagcactcggcattaaccctcagctgcccagtccttgagccccagggccaagggctgtggacatggccttgagatccccgggaaagccccgccccccagaatctggttacgtgaggctcagccttctgatgcccggtggtgaacttgcccagagagcacctaaataccgcggagtggccaaaggcttgagcgcccagcgacagacaagtgtcctaagaattggtgcctcttctagggaaaaggaggcctgggctccaaggccttaaagactcgcctaattttccgcacggatgagtagacccaggcccagttcggatccgtctttatcttatcgtctgtgtcagagaaatatgtcatatttccaatctctggcggcaagaaaatgccgagctcttttgctattgaaaaaaaaaagggaagaaaacactgcggccctaatcctgcccaatacaacccagaacccagccttgggtgttgccccgagggcgcagcgccgctcccatcggcgctgggggtccaagcggccctggggccccgcaggcccgggctgaggccacccctctgttcccgcgtcggtggccctgagcgcacggcgctcggaactcggaggtgccagaggctcgggcaaagcaggcctggggagggcgcgaagccgcgttgttccgatcctcagccacctgagtcccagcctggaaccttcggaccctcgcgttcggcccgaacgttcgggccccctcggtgccaggcgccccgagtgccgcggcgcgccgggcgcgggctgggagcggcggactgcgggcgggacagcgcccccgctcctcccgtgggagagcgcgcgcccctccaggaagctcccgcctcgcctcccacttccctccccactcccctcctcggccggagggaggagcccgagccgccgccgccgccgccgcccgcccgcccggcccgggaggaggaccggaccccgagcggctgggagcgcacgcgagcgggccgtggccgcgcgggcagcgccctgagcctgtcccgcgcccgcgggcccggccgagcaggagcagctcccggggatgcccgggcggctcggagcgcgggcagcggcagccgtgcggtgagggcggtggcgcccgcgggacctgcggtg

SEQ ID NO: 16147 - DNA, 2300 bp, Homo sapien
tgtactgtaaccccaagacctcagcagggctgggggaaggggcaccgggtcttgggtcaggcagcctggggctgagatcccccttctggctgcatgaccttgagcaaggcattcaatctaagactcagtttctccatctgtcaatgggggcagaggatttgggtggggattgaatgagatgatgcaggcgaagtgcccagcatatagtgagcagtcaggagctatccatttaagtcattccgtgatgttgggccctcagctggacagtttgggggtgcgttatctggggaggagggaggcagatgctgatcctgctaccatttttgggtgtggacatcctgggaggctccctggaggaagcatgctgcccccattgtcaagcctgtggaagggattctagggccaaggaggaggatctgtttccaaagaagccccgaggtgagtgtctctttcttttgcgttgcccagctggagttcgagtgcatcaaccccaagaagcagaggaagaagaagaactataaaaactcgggcatcatcatcctgcgatcctgcaaggtgaaccagcgtgggcaagcacgagccaggggccaggtttcaggccacacagaagggacagacagagcactggatctggagccagcgaggcctgtgttcaaatcccggctctgccacatcctggccctatggccttctgagcttcacctcaccaggcctcagtctcctcatctgtggaatggagatattaacgaggcagagcatgtccagggttactcttctctcacattcctgtgtggaggccagggaaggcacgagctgaccttccagggcctgtcctggtgggagaattgtcattgcgagttgctgccgcccacggtgggcatgcaaggggcagaggacattgggtggggacaccctgtcctctctggcatcagcgtcactgtgactcccatggtacagccggggccactgaggcccagaaaggcaatgaagttcatgtcagcagtggccaggctgtgggtgggggccagaagacctggtgggcaaataactgctggatctggcagaacattaaggaaggcagcctggggcaggagagcaagagacctgggctcagggcctgacagctcaggagtctggccgctgctctccaccagcaggtggatcccagactcccaccttatttggagcctcgtctggctagggtttacacgaacattcagtggtgtcacgacaaaaaagcactccgttaaaggtcaagatgtcaggttgcagccttgtgatggatggtccttgtttctgaagtttccatcattcacatcacttttcacaatttctggcacctgccttacttatttttttgaatcagtctttcttccctgtattattgttttttgtttttgtttttgagacagagtctcactgtgttgcccaggctggagtgcagtggcgtgatctcagctcactgcaacctccgccttccaggttcaagggattctcctgcctcagcctcccaaatagctgggattacaggtgcatgccactacgcctggctaatttttgtgtttttagtagagatggggtttcattatgtcgaccaggctggtcttgaactcctgacctcaagtgatttgcctgccttggcctcccaaactgctaggattacaggaatgagccactatacctggcctgtttcttttctctttttttttttttttaacttaaatacatttatttagaaagagattattagaactctaccaaaattaaaagatctgccttctttgccaaaaagagacaaagaccatcaaaacaacttctagaggaaggccttgagctggaggcctgctctttctctttgttaaaaaggtagattaataagggccaggagaaggtaagtacctaacagtgacaaattgagacactctgtgtcaggtaactgacactgggccctggcaccctgcctggaaccagcatgtgtctgtgtatctgtggggtgtgggggtctctgtgagtcccccacccattaggaaccattgcactgaaggctttgttatagagagatttgggttttgttgtaattagatcaggcccatcagctttttttgacctccttgtccctactgaggttgcaggacatagagcaacaactcccccatggggagtgtgaccaagtcaaggggacccactgactcatccgctttcttccagataaaccgagactactccttccttgactacatcctgggaggctgccagctcatgttcaccgtaaggctctccccgctggctccctctgcacc

SEQ ID NO: 16148 - DNA, 2300 bp, Homo sapien
actcccatggtacagccggggccactgaggcccagaaaggcaatgaagttcatgtcagcagtggccaggctgtgggtgggggccagaagacctggtgggcaaataactgctggatctggcagaacattaaggaaggcagcctggggcaggagagcaagagacctgggctcagggcctgacagctcaggagtctggccgctgctctccaccagcaggtggatcccagactcccaccttatttggagcctcgtctggctagggtttacacgaacattcagtggtgtcacgacaaaaaagcactccgttaaaggtcaagatgtcaggttgcagccttgtgatggatggtccttgtttctgaagtttccatcattcacatcacttttcacaatttctggcacctgccttacttatttttttgaatcagtctttcttccctgtattattgttttttgtttttgtttttgagacagagtctcactgtgttgcccaggctggagtgcagtggcgtgatctcagctcactgcaacctccgccttccaggttcaagggattctcctgcctcagcctcccaaatagctgggattacaggtgcatgccactacgcctggctaatttttgtgtttttagtagagatggggtttcattatgtcgaccaggctggtcttgaactcctgacctcaagtgatttgcctgccttggcctcccaaactgctaggattacaggaatgagccactatacctggcctgtttcttttctctttttttttttttttaacttaaatacatttatttagaaagagattattagaactctaccaaaattaaaagatctgccttctttgccaaaaagagacaaagaccatcaaaacaacttctagaggaaggccttgagctggaggcctgctctttctctttgttaaaaaggtagattaataagggccaggagaaggtaagtacctaacagtgacaaattgagacactctgtgtcaggtaactgacactgggccctggcaccctgcctggaaccagcatgtgtctgtgtatctgtggggtgtgggggtctctgtgagtcccccacccattaggaaccattgcactgaaggctttgttatagagagatttgggttttgttgtaattagatcaggcccatcagctttttttgacctccttgtccctactgaggttgcaggacatagagcaacaactcccccatggggagtgtgaccaagtcaaggggacccactgactcatccgctttcttccagataaaccgagactactccttccttgactacatcctgggaggctgccagctcatgttcaccgtaaggctctccccgctggctccctctgcacccccatcccagtgagggtcctccctgaagacttgggccactagtgcagccagagggacttagggtagacttcaggaaggacttccctggggcaaagagtgtgtgcggcctagtgaggagggcataagtgggctgtctggtcctgctgggtgtgcctgagttggggcttaactacaggtcagagcacagctgcacagctttcagtctggtggctacactccttctgcgggtggaggaaaacaaattcctcctcactggccacaaggccttcagcgatccctgcctccttcatctgcagcctccttcctccttgctcactgggctctaaccacactcttcctctgtttgcccaacatgccaagctttgcttcatgttagaactttgcatttgctgttccttctgcatttgttgttccctctgcctgaaacacttccccagaacctttgcatggctgcctacctgccatttttcaggcctgaggaggtaacggaggtcaccttccagggagccctccctccctcaatgccttgctgctcctctgtcatatcttcctattttctttcttttcttttcttttcttttcttttttttttttgagacagcgtctcattctgtcacgtggtctagagtgcagtggcacgatctcagatcactgcagcctccaccttcagctctcagttgatcctcccacctcagcttcctgagtagctgggattacaggtgcatgccatcatgcccagctaatttttgcattttctgtagagatggggttttgctatgttgcccaggctggtctcaaactcctgggctcaagcgatctgcccaccttggcctctcaaagtgctaggattacaggcatgagtcactgggcctggccctcactattttcctattttctgggcacttgccgccccgagattcatatgcatttgtcgcttctccc

SEQ ID NO: 16149 - DNA, 2300 bp, Homo sapien
ctgatagaaacgagggagccaggagggccacgtgtggagggagtgggcactgcctgcctgagctggaacgggcttggaaacagatcccacccactgaaaggtgtggcccattagaccaggaccaagcattcttttctttcttcattgcccggcctcttagtgtctttctacctatctgcttaggtgtcccagaaatgttgccctggactgtttctgatggtattgaggtggggttggagggccgcctaagggaaggggcccaggaacagtggtgggctgtcaagggtagggtctggatgggcttctgaggcccctcacagccagggatggggggctggcaacagcagccctccactgtgggattcaggccaccatctccatggcaacaggtatccccagccaagggattggtctcttaaaggcacagtgctggagctagaccactgctgcctggagctgggggtgagggtggtggggtccgtgtctccacacagctcaccctgctccttccctccactgttgtacttggggggcagacaggaacaaggcaccctggaaggctgagcttgtagcctctgcaacctccccagggaacaagtggctttgctggatatgaaggtggctaagggctgacctggggtccagcttggttccaccctccttagctccatgaccttgactagtctaggccccagtttcctcttctggaagactaaagccccaaacagagaatatgaagaccacaagagctgatctgttgatgttacggatgggggaaactgagcttcccctaaaggggtcagcgggtactaaggacagagctgagctgaaaataagttcttggctgggcgcggtggctcacgtctgtaatcccagcactttgggaagccaaggcgggtggatcacctgaggtcaggagtttgagaccagcctggccaacgtggtgaaaccccaactctactgaaaatacaaaaattagtcgggcatggtggtgggtgcctgtaatcccagctacttgggaggttgaggcaggagaatcacttgaacccaggaggtggaggttgcagtgagcccaggttgtgccagtgtgggcgacggagcgagactcagtctaaaaaaaaaagaaaaaagagttcttggccaatttggaatcctgggccctcaccctcagatggtccaatgagccttcctgcacttcactcaggcacaccccggccccacttcacagtttgtattttatatatctcccacactaattattcaatttttaaaatttaatttataaagaaactctatatcccattgtaaatgaaaaaaagcagtatcacttgccataaatagagagtaacaaaaataaacacaacaagctgtacaatggtattaaagcctagctggagactattgtctcctcaagctctgggcttcctgccttccctttccgttgataaggaagcttagcaaatgttagagagacgtgaaagacacagtagtaccaaaccaagacttgctcctgggtgcagttcatagaattgaaaggccactgcaaaccagtcctcttccggggtgacttgatgacttgatggtgctcagtgctgtgtttgggatgtgactcaaatccacttatttgtcagcagagtcccacactcctggaagccctggcccagacgacctgctttagctcccgcaaggtgtctcagattgtcgtgttgagtagggaatggagggggtcacaggtgcccatgcccaggtgcagcagagagggggagaccggtcccagagcagcccatcagccagatgagtccccctgcgccagccgtgggcctgtcgggaatgcagctgactgggccactgccacgtcaggcacattatctgcaacaactcccactttgcagatgaagaaactgaggcactacgagtcaagtcagttgcctagagtcccacagtatagcaactggcaaggccaggcccagagtccagggctctcagaggccccaagggggagtctaagataacacacagggcaggaggggagagcagtttgtacttcctgctgtgaccaggtcagagtttagagcatgagaggcctgcaggggtggggtgctgagagcaggacgcatagtgagttgtctgggacttggctgcagctgggtaagatgcactgccttcctccaggactcggagggtttgggatgaaggagggagggagaaggggtgccagagcctcgaccttgctgagtgccccgttggccccctccctgcagcagtacttcatcctcctcatcatcacggacggggtcatc

SEQ ID NO: 16150 - DNA, 2300 bp, Homo sapien
acaattcgctcttattgttacattaaactaaacctcagcaacagtagtattcaggctgagactattctcttgttctgaacgtttgggtttgttttttcagcttccatttctagctttactaaataaaaatgttgcatgaatattctcagcactggaatttgaagtaggaagaaagctgaagtcgacatgtctttgttttcaactaagatttagtgttttctggggaggagtatggtaaagttggtaagagtatgcatttttgatatcaggcctggatttggttctcagctctaccattcaccacctgtatcaccttagacaaataatctaactcctctggacctcaacttcatctgtaaacagataatatttctcatagggtcaatgatcatgtaaattagataatatccataaaaggaatataatacatggtaagagctcattaactgttagctgctttatttttgtggtagcgtggaaacttactgtttttgttgttagtggttatcttggaatggacattggattgaatatgtgcctccttgttagcacatagtgctgtgaataacatgtctgggtaggggttaattccacagttactcaaaaggaaagaaaccaataaagaaaaacagaggtttagtttaaaaggagtaatatggccaggtgcggtggctcacccctgtaatcccagcactttgggaggcctaggcgggcagatcacgagttcaggagttcgagacaagcctggccaacatagtgaaaccccatctctactaaaaattcaaaaattagctgggcgtgttggcacacgcctgtagtcccagctagtcaggaggcggaggcaggagaatcgcttgaacctgggaggcggaggttgcagtgagctgagattgcaccactggactccagcttgggtgacagaacgagacttcatctcaaaaaaaaaaaaaaaaggagtaataagtaatatacactctgctatctttatttccttctctcctctttgaagaaaagctcaggtagaaataacagattcggtaatcttctgtgtcaaaatatgcataaaatggttgaggtgattgtgggagtgagaaaagagaaggattgaagttcaaatcttaaatggcacagacaaggggtttacagggaggaaggtcagaagagatataaatgaagagtcagattagtattcaggaaagtacgtggaactgaagttgggagatctgttcttccagtctcactttctccattcatggtttgtgcaccttccctgctatacagactggacttgaacactaagtcttcaatagctgagattctccatcttaatctacttggaggcaagagcaggtgaatcaagatagtgtaatgtctcagaaacaggaatttcaagaagaaacaatgtcagatgttacagaaataaaggaggatgagagctgggaaaaggatgggatgctcaggaggccaatttttctagattagagggacagagaaatagctgcaatatgagatttactatggaacaccaggtaataagaattatcccaggtcctcttgccaactgtgtagataacatcgatgttaataaaaattctctgatatgtcaggaaaaatgtattcatgtgctttcatcaatggcctataaattaaactatttgagagttttttttttttttgagacagaatcttgccctgtcgctcaagctggggtgcagcggtgtgatcttggctcactgcaacctccgcctcccaggttcaagcgattctcctgcctcagcctcctgagtagctgggattacaggtgcgtgccaccgtgcctggctaatttttgtatttttagtagagacggggtttcaccatgtcagtcaggatggtcttgaactcctgacctcgtgatccatgcgcctcggcctcccaaagtgccaggattacaggcatgagccaccgcacccggccgagaattttttcaattcaaagttggaagataatttttagtttgttgctgggtgagatggagctaaatctccttgtttctctttagaattttaattgcagttctcacttgaaatgattttttttgtttttgtttttgttttgtagattggttgtttcattatggatggaggggatgatggtaaccttattatcaaaaagaggtttgtgtctgaggcagaactagatgaacggcgcaaaaggaggcaagaagaatgggagaaagttcgaaaacctgaagatccagaaggtatactgtgacagtcagtataatggtctttaatccacacagcaaccctgcagagtag

SEQ ID NO: 16151 - DNA, 2300 bp, Homo sapien
gtcctcctgccttggcctcccaaagtgttgggattataggcatgagccaccatgcccagcctgaattaagatattagttttaaagagcagacttttgtaagtgtgcattagttttgacagtgtgactgtgttttcaggacaccaacccactgagagctgatgagaaatacatttcttgtatttttctttcccctgcaacgcttgcctttaaattttttttttaaatatgcatttactttatttcttattttcattaaccaactgatttctggttttgtccctgtgtataaaagattgtaggccgggcacagtggctcatgcctataaccccagcactttggcaggctgaggtgggcagattgtattgcttgagtccaggagtttgagaccagcctgggcaacatggtgaaaccctgtttcacgaaaaaaaaaaaaaaaaaaattagccaggtgtagtggtgcatgcctgtagtcccagctattcgggaggctgaggcatgagaactgcttgagcccaggaggctctctgaattcttatttaggtagaaatgtaaaattctagggtttgtttttattgttgttgttgttgtttttggcatattggaagatttttaaattttctcttttaaaaatataggccgggtgcagtggctcacacctgtaatcccaacactttgggaggccaaggccggtggatcacctgaggtcaggagttcgagaccagcctggccaacataatgaaagcccatctttactaaaaatacaaaaattagccgggcatggtagcacacacctgtaatcccagctactcaggaggctgaggcaggagaatcgcttgaatctgggaagcggaggttgcagtgagccaagatcgtgccactgcactccggcctgggcggcagagcgagactctgtcttaaaaaaaaaaaattatatatatataacaagaatgaagagagacatttactgggacaccaatggcattgccgtatcctagtatttatttcccaggtttaaatcatatctaatctgataaattcatttccttcagacatgattatttttctccatcttataaaattaaagtaactaggaatgtttggctcagaaaagcaacaaattaggaggaacatgggaattgtcttcaaacaactgaagtatggtcatgttagaaaagatttgattctttttgtatagtcccagtggattgaacctatgtattgaatttatagtaaaacagatttcagttcagtttaaggaagaactatcctaacagtcaaatctgcttagagagggagttggctgcctaggaagggaatgcagtggtccctcttgaagttttaatatatgagttggatgaccttctcctgggtgtgtatggtaaattcagatgtcgagtggattatcatattaggtgggctataaggactatcccaccctgaattatttactaggaaaaatgggtgatggaaagaaaccagatgattaatacaggatgagaaaggagacacggttaataggggataagaaagggggaaattgagggttcggaatgtctctcccaaccattagagccctagaaagttcacgttttctctgccagagacatttaagaaattgttggctctggtttcataagaggttgttctgtagaacttgaggaatttttggcattttcacagagactgaacagttctgcttcagtaatgagcctctggctggagtcattgagtgctgctaaatcagaagtgtccaggttgtgggctttaggtgggagcaacagcgtctgtcagttgatttcatttctttctagtaattttcacaattcgctcttattgttacattaaactaaacctcagcaacagtagtattcaggctgagactattctcttgttctgaacgtttgggtttgttttttcagcttccatttctagctttactaaataaaaatgttgcatgaatattctcagcactggaatttgaagtaggaagaaagctgaagtcgacatgtctttgttttcaactaagatttagtgttttctggggaggagtatggtaaagttggtaagagtatgcatttttgatatcaggcctggatttggttctcagctctaccattcaccacctgtatcaccttagacaaataatctaactcctctggacctcaacttcatctgtaaacagataatatttctcatagggtcaatgatcatgtaaattagataatatccataaaaggaatataatacatggtaagagctcattaactgttagctgctttatttttgtggtagcgtgga

SEQ ID NO: 16152 - DNA, 2300 bp, Homo sapien
tttagttaaatcgataaaaaaaaaaagagaaacaatgggaagaagcaatatatgcatataaaatggctgagaattttacagaattaatgaaagacactaatccacagattcaagaagtctaataaataccaaacaaattgaacaaaaacaaacccatagttccatagagcatagtggaaatacagaaaaccaaacacaaaacaatcttttttttaaacttgtcgatacttgattttagacaaaacaatcttaacaacatattctatagtaaagagtgaaacataatatttaagaatgaagacaaagtatgttcaaaaggtgactaatggtgaacacgttgaaaatgcttaatttagctgccataaaggcataattacactatgactgaccctgtacgtacatcgcacttgttacttgatttaccacatacgtggttttcaatagctaaagcagcagcttgattctaaccaagcatcaccattcttggaagatgaaagtgaagactgataatcaactaaatggttttgacacaattattcctttcttatatcatgaagcacttccccacagggtaaggacatgaagacttcagttgagaaagataatcgggcagcctctactttcagatccttacaaattgttcgcaggtcatctaactaaaagactgtaaaagctgctgtcggctcaatactttgtatcaaaaaggagtctacccactgattcccttcaaatatttcagaagggtgccttccattttatggtgtccctgtggacacatgaatacaccaaataactgatgaatcgacaaatcttatgtcacaggtggtaggcaagaggtcatcgggaattccgatcaccaggctcgcatctggcttcttgggtcccactcctgaactaaccagtcgggctacccgagcgtgcgggagtctgagaaactgcattttaaaagggccccaggagatcttgttttccactaacattaaagaaccacgactacgaacaaacaggtctccccctttcctctgtgtggactgacagtcacaaggaccaccaactctcaagcatgacgcttcaactctctttgtttcttaagttttctgcaaaacgggccagctggcttgttttccgtaatagaaaattcgcttggcacagcaactggtacatggcacacaataaatgtgcttcccatcctgcactgccattctgggattcaaccatttccaaccagacgccgcacatccgagtgagtaacctggacctgttccaagacctctggaacggagcctgctactcacttgaaacctgggtggccctacctagcagaaaattggggaaaccccattaaacgcccggcagtgttgggcccgcctgaaagggtcctcgccgcgacccagatgccttcccgcgggcaccctcagctcccctcaggctgggcccgcaagccccaggcttcggctactccggacaaggagcgggtgcgcggactgagaacaggcctggccctaaccctaacagcagccgcagctcatctcttccgtaaggaagctggaacccaggtgtcgccgccaggccaggaccgaggccgcactcacctaccggcgcgcgggaggcgagacgacctcacctcggcggcgcccaccccaaaccgccaccgcagagccgctcgctcttaaaaaagaaaaaaaaatgaaaggaagaaagaaagaaacagaggaaggaatgaatgaaagaaagaaaaaaaaaaagaaaatagcctttgcttttgtatttcttttgacccttcagggcttcctgttcctcaccgccacaatagagtcccgccccacttccggcgacgtaacccaatccgcggagctcttcctccccgggagcccgatggaaatccggtaccctgaaaacgagccggagagacttgattgggccattcacgcctcaggatgaggactggccagtctgcgcctggagggcgggccggtcccgctgatcacgtgacacgatttttgaaaggtgattggctgtcaaggagagggcttgccaccgaggaaggggcgtttcctaggggactgagggagggctggggcggtacgaagcgggggtgggctctgcgcgtaatggcagcgccgtggcctcgcgtccatctttgccgttctctcggacctgtcacaaaggagtcgcgccgccgccgccgccccctccctccggtgggcccgggaggtagagaaagtcagtgccacagcccgaccgcgctgctctgagccctgggcacgcggaacgggagggagtctgagggttggggacgt

SEQ ID NO: 16153 - DNA, 2300 bp, Homo sapien
gaaatttaaaagcaacttccaacatgcctcataatctatagtctagggctaccacaacaacgcatagtattcgtggaggaaaaaaggcagtctttacaaatcacaactgagggagaaagtatgatattcactgcctgtagacatccaaaagccatgcatatatatatgcaaaagggggaggaggtttacaatgttgagatcaaattacttagaggaaaatttcagctgttaggggaaaataattcctgaaggaaaagatattacagtggtaactcctgccagcaccataagaagttcaaagtaaatgaaaactctgagagcaaaagctggaaatcccaccatccccatctaagcagggtttgaaaccatgggtttagatcttaatatgacctaagaagctgtgaaccttgaagctttcagtacaatatggctcccagcactccgcaggtgacagacaacgactgtattaatcccaccccttacctctacatactactttacattttagaaagtgccttcacttttattcctcaacagcaacccgtttggtggtagaatcacactaacttacgttcacgcagcttgtaatttgtactttcacatactgcgctggttattttacagtagagacttaaggaggttaagtcactccactaagcaagaacagatggtaggtaaagggcctggaaaactgcgggattctactcagtcgataacagacacttctaacccttcaaagttcaaagtacaacactccagggggagcaacctctctcagagaactatacaagacaggacctcggagtctcagccgaccgcctcggtctcagtcggtttccctccccaaagacggggaaagtgaggcagcaggagagacaaatgcctaatttggactcacgcaaggggtgttggtgggatagactctccccaccccactcgggcaataagcccggaagcagttggatcctgtgtctgggacacctggtcgatctacagagagagggaataattcccgtttccctttcactactccccactctggctttcctgtggatggaggtgtcttcttcccatcaccgcccagaaatcccctctccccaaggtccttacccaattttcagctccggcttccgtagtaggacattccgctagttctagctcctgcttcctagccccattctctctctatcccaaggcgtttctaaatctccccggggaggtatgcctcatccgtgccacctagaccgtaaactccacaaaaagaaccctcctaaagcgtcccttcatctaccctttctatcccgggcacccctgagtaggtcaggaccccatcggtaccaggagccaccccaggagatagatagctgcctctcacctgggccctgttagccgcagcctcctcagaagggcgacccccaagaacctcttctggtgaggacccccgaaagagggaacaccctcttctaggaacctcttcagatccctcaagcgcgggcctcggtggaaaacctctcggctgtttctcaggttctgaccaacgccacctctctcccgggccctttccagagcctaccccggccccagtccggtccgcccgccccaggctcgagcggctgttcccctccctcacagacgtccccaaccctcagactccctcccgttccgcgtgcccagggctcagagcagcgcggtcgggctgtggcactgactttctctacctcccgggcccaccggagggagggggcggcggcggcggcgcgactcctttgtgacaggtccgagagaacggcaaagatggacgcgaggccacggcgctgccattacgcgcagagcccacccccgcttcgtaccgccccagccctccctcagtcccctaggaaacgccccttcctcggtggcaagccctctccttgacagccaatcacctttcaaaaatcgtgtcacgtgatcagcgggaccggcccgccctccaggcgcagactggccagtcctcatcctgaggcgtgaatggcccaatcaagtctctccggctcgttttcagggtaccggatttccatcgggctcccggggaggaagagctccgcggattgggttacgtcgccggaagtggggcgggactctattgtggcggtgaggaacaggaagccctgaagggtcaaaagaaatacaaaagcaaaggctattttctttttttttttctttctttcattcattccttcctctgtttctttctttcttcctttcatttttttttcttttttaagagcgagcggctctgcggtggcggtttggggtgggcg

SEQ ID NO: 16154 - DNA, 2300 bp, Homo sapien
cagagcattgcttcaggccaggaattcgagaccagggtgggcagcatagcaagactcaatctctacaaaaaattttaaaaaatcagccaggcatggtggcatgcacctatgttcctagctacttgggatgctgaggcggggggatcacttgagcccagtagttcaaggttacagtgatccatagttgtgccactgcactccagcctaggcaacagagtgagaccctgtgactaaaaaaaaggaaaacaaaatagtcaaagctctttggctatgttttccctagaaattttaattgaagtctaatctagtctccaattctttaattgcctcttccccctccttagcaatactaatttgctgagcaaatcattctaccctttcattgttaattcaaggattatgtctttccaaacaggtgaaaataaattgactatttctgaatccagtattagtgaccggcttgtcacattggagtcctgggctaatgatcctgattatctgaaacgtcaagttggtttctgtgcccagtggagcttagacaatctctgtaagtgggagttgtcctttattaaaatgtccgtttccatttccagactcatttctttcataggctcactggtcttccttttgcaatggtaagtatgagtcctcataaggacctctactggcaggttggatatattctagcagaaaagtatcctagagaccctttagacaagaattacatggtatgcttctaatttcagcattttcctgttcaaaaacctttactggcacccagtttcctgctgcatcaaagcccttaattatatggcactgtctaaccagctctttccaacacaaatcatcccactgtcctacaaacaggtcctgatgattcctacctctggacctattcccctcacttggaattccctctttacttctctccctttcccaactttgctcttcaaaacccaagtcatgtcttacctacatcatgagaattgttcctgatttttctcttttcctcctccaagggctgctgggacaaaaactactataggttgagtttctcttttaggtagaatttatctgaaatgcttgggactgaaagtatttcagatttcacattttttcagattttggagtatttgcagataccaggttaagcatccttaatcaaaaaatctgaaatcctccattgagcatttcctttgagcctcatgtctgcactcaaaaagtattggattttggagcattttggattttcagattaagagtgatcaacctgtatacttctgtaccctcactcccccatccatggttaatactacgctaaagcataactggacatgtaaatccacccccactgttaccccaatattgtggggaggagcttcatgcacagcctgtgaagtgccagttaaagaataattctgaaagagtgcaatttggattttgttcatacaaaattatattctagggaatggaagcataaatctagcagtgctgcctttcctagcatttgtttgattgatcttcaaatggcagtgcagcaggaaacctctggctatgtctcctcacctattctgccatttacgagcatctctactccttgactagggtagcactaacttatttgtttgtttatttttaatgtatgaaaaatcagtgtgttttaccttccagggggattatttttaatggatatatagtaatacatatttttggagcacatgagatattttgatacagtcatacaatgagtaattaccacatcagagtaaatgggatatctgtcccctcaagcatttatcatttatttgtgttagaaacattccaattatactcttttggtgttttaaaatttctttgttttgcacttttcttttagttatttttaaatatactataaattattgttgactgtagtcaccctgttatgctgtcaaatactaggtgttcttcattctatctagctatattcccattaaccaaccccatttctcccccacccccactacccttcccagcctctggtaaccatccttctattttctatcttcatgagttcagttgtttttagctcccacaaaaattagtgagaacacacgaagtttgtctttctgtgcctgacttatttcacttaacatcatatcctacagttccatccatgttattgtaaatgacaggatctcattcttttttgtggctgaacagtactccattttgtatatgtgccacattttctttttttttttttttttttttttttttttttttgagacggagtctcgctctgtcgcccaggctggagt

SEQ ID NO: 16155 - DNA, 2300 bp, Homo sapien
tagtgagcaaaatggtggttttaagccactaaattttcaggtggtttgtaacagcaatagataaccagaacagattaaatcaaggtgtgttcctcctccactccatcaatgacttaggaagggtaggcaaattcattttgtccagaaatgtgtggtatatagagaaagtaggtcatgaagaaactctctgagtttgctgtaagctgtgtgaccagggcttgactaaacaactcagtccagtaattcagcaaatctttttaaatgcctatcttccacttggtgctaaacagagtaactcataattgatgtcacctgaccgggtgcggtggctcacgcctgtaatcccaacactttgggaggccgaggcgggcagaccaccagaggtcaggagttcgagaccacgctggccaacatggtgaagccctgtctctactaaaaatacaaaaattagccgggtgtggtggcacgcgcctgtaatcccagctacttaggaggctgaggcaggagaatcccttaaacccgggaggcagagattgcagtgagccgagattgcgccactgcactccagcctgggcaacagagcaagactccctctcaaaaaataaataggccgagcgcagtggctcacgcctgtaatcccagcactttgggaggccaaggcgggcggatcacctgaggtcgggagttcaagaccagcctgaccaacatagagaaaccccatctctactaaaaacacaaaaaaattaggcatggtggcgcatgactgtaatcctagctacgcgggaggctgaggcaggagaatcgcttgaaaccggtaggcggaggttgtgttgagccgagattgcaccattgcactctagcccgggcagtaagagcgaaactccatctcaataaataaataaattagtaataatttatgtcaccttggtcacagctgtcacacccgactgtgtctttgtaaccatctttgtttcagatcccacggatatctattttaagtccattcaaagatgtctgctaggccggttgtggtggctcacacctgtaatcctagcccttttggaggccaaggtaggtggatcatctgaggtcaggagttcgagaccagcctggccaacatggtgaaaccctgtctctactaaaaattcaaaaatagccgggcatagtggcacgtacttgtaatcctagctactcgggaggctgaggcacgagaatcgcttgaacctgggaggcggaagttgtagccagccgagatcgtgccactgccctccagcctgggcgacagagcaagactccgtctcaaaaaaataaaaaatgtctgctaacccattctgactggccacctgaccctcagttcataccttaaacccctctagttcctctagtcatataccacactttggccataaggtatcatgcaactaaagagacacaatgcttagttgtccaatcaagagaaatcagctcaaacgaatcctttttcaaagtttggcagttttgaagaggccttttcctgaaaggtatctgattcctgattgcgtggctcaaaatagttcttcaattctcatcttgtataattagtcaagaaaccaattactgccgagtaatctttatgatgcgaagattataacgtaaattacaggacatcgacttcttgcgatggggctttccttccacgaggggtaggaactgtcttgaaatcagacgtcagcatcacctggttcaagggataagggactggctctccagcgacttggcaacttacaagcgctctttaaacacgccttaaactacttatttaatcctccacactcagggaggcgcaatttattctcgagttgcgagtgaggaaattctggctcgtggcttcgattccttcatccgtacaatgggggcgacttgagacggagttcccacacaacgggtgctcgccgaagcgccgcatccctccgcactcccttccgggacttcctctccctgtcttgccccgccccggcatcggtaacgctcgcctgtgattggatgccggccggccgtgaggcggtggaaggggttgcggtggccatggtgacaggaggcggggcgccgcgcccctccggcagtcaccgaggcccggacctgcggcgtcggcggcgcgcgcagagggccaggcgggcgtagaggccggaccgacgcgtggcggcagagggtatccaaggccggacctggcgcgcaggcgctgacccgacctggcagtgagctggccgcggccttggctgagaggccttaaccccgccgggcggccgcgccctgcatgcgag

SEQ ID NO: 16156 - DNA, 2300 bp, Homo sapien
aaggccaaggcgggtggatcgcttgaggccaggagtgcgaaaccagtctgggcaacatggagagaccccatctctacaaaaaaatttaaaaaaattagtcagggctgggcccagtggctgatgcctgtaatcccagccctttgggaggccaaggtgggcggatcacaagaccagcctggccaacatggtgaaacccagtctctattacagatacaaaaaattagctgggcatggtggctcgagcctgtaattccagcaagactccatctcaaaaaaaaaaaaaaattagttgggcatggtggcgtgcacctgtagtcctagctactagggaggctgaggtgagaagatcacttgagcctaggggttggaggctgcagtaggctatgatcatgccactgccctccagcctgggtgacagagtgggacctcgcctcaaaataaataaaagtaaaaagaaaaaaataccaatattgtacatttcttttctttttttgtttttgtttttagatggagtctggctctgtcacccaggctggagtgcagtggcatgatttcagctcactgcaacctctgcctccctgggttcgagtgattctcctgtctcagcctcctgtgtagctgggactacaggcacccaccatcatgcctggctaatttttttgtatttttgtagagacagggttttgccatgttgaccaggctggtctcaaactcatgacctctggtgatctgcctgccttggcctcccaaagtgctgggattataggcgtgagccacagcgcctggccctaatattgtatatttcaaaatatggtagctagaagtggggattttgaatgttctcaccccaaagaagccataaatgtatgaggtgatggatatgctaagtaccttgatttgatttttttacacaacgtacacaggtaccaaaacatcacatggtaccccatatttaggtacaattataggttgccgaaaaagtaattgcggtttttgctatacttttatatgcaaaaaccgtataacttttgcaccaacctaatattacatgtcagttaaaaacaattttttaagtggctctctttttaagtgggtatttgggaaaaaaaaaatgtgggagccaagaaggccttgtctacttcgtttcctgctgtatccacagggcctggcatgtagtaggtgttcagcaaacattggttgatgaatgcatgatgacctatctgtgcaaacctctaggctcaagaggtgtgtgtgtgtgtgtaagtattttagggtgcatgtgtggcaatgaaactgtatatgacctcccatcttctgagtgacccctcctccctcacgctgtcaggagctttctggggaatatttcatttattccctacaacgctctgtgaggcaggtttccttcgtatctatatgacagacgaggaaactgaggctccgcgatcatctaagttatataaaatatgttcagaagtgaaaacagcattaataggcagaaaaggacctcccccttctaccgcttacccaccgcttacccagaccctccccttccccgcgctgggtctcccaggattcttctttactttcttttctataaaatacagacggggggagggggggcgtctcactgtgttacccaggctggtctcgaactcttggcctgaaattatcctttcaccttagcctcccaaagtgctgcgatcagaggcaggagccaccgcatccagccttctcccgggactcttcaagagtcgctgcgccggggcctaggccgagggtgcacagcgcgtagaaagcgcctgggagagcggtgtcccccgcgagctaccacaagtttatccctaggcgcggaagctaccacggcctgggcgagagccgggaaattcccagcgggcggcttgccccgggggaggccggcgaagcggtctaggctggtgctggcggagccgattcacggacccggggttgtttactggtccggggagtggacgcggctgcccacgaaccggtcgcggctggggcggcggcggcgagcaaagggttaagggggcggccccggcggcgggggcggagccgggatctcggccgcacctggcgccccaggctcccagccccgacgcctcctgcagcgcctggagccacacagggatccggagcctgggggaaaagcggcgcgggagccggcacccaccgctggaggggcggcgacggcggccgtagcgacctcgggaggcaagcggagccgccatggccgagttcccgtcgaaagttagcacgcggaccagcagtcctgcgcaggg

SEQ ID NO: 16157 - DNA, 2300 bp, Homo sapien
ctctacaagaaataaaaatgagcagggcgtggtggcacacacctgtagtcccagctacttgagaggctgaggcagtaggatcgcttgagcccaggaggtcaaggctgcagtgagctgtgattgcaccactgcactccggcctgtgtgacagagtgagatcctgcctctaaaacaacgacaacaacaacaaaaatcctaaaccctaaacagtcacatctgcaaagtcctttttaccatgtaaggtaacatattcataggttttggggattagaatgtggacatttaggggggccattattctgtttaccacagcgttcaataaatgtttgctgaatgaaggaattggatgaatggatgggtccctttatacatggagtcccaagttctgagttccaggcctggcgtagcctctgtgtggctgtgtgaactgggcaagtcctctctctctgaacctcagtttcctccttcattagatgtgttcttttttttctttctttctttctttttttttttttttttttttttgagatggactctcattctctcacccaggctagagtgcagtggcgcaatcttggctcactgcaacctctgcctctcaccggattcaagcgattctcctgcctctcagccccccaagtagctgggattacaggcgcatgccatcacacccggccaatttttgtatttttggtagagatggggtttctccatgttggccaggctggtcttgaactcctgacctcaggtgatccacctgcctgggccttccaaagtgctgggattacagtcatgaatcactgcacccagcccatgtgttctgagcacccaacatgtgcctgatcctcagagggccctgggaatgccaagaaaaatgaagggagaccccagcctcctagagcttggagtctgacttctagggaggggcttgagaaagagaaaacctgacccagtctgctcagggccacattccaggtcccctagaaggctttgaagtcctgagagggtgtgcttaccaaggacatgacatttcaaacagctttgacgcataagtaggagtttatgtggtagagatgtggaaagtgacattaaaggccagggacaggccgcagtcccttttgaggaagtgtgaggagtgtggtgtgatccctcaggggaaggagaccagtggggaaaggcctgtccggaaacggggccttgaaggccacagacaggagcccgggacctgcctttaggtgaatggggagccacggcagggttctgaagcaggagagagagtgtgtagctctggaccactcacgctggctgctgcagggtggggatggcattgaggaggccagcatcccagcctgaggtggaggtggcctggactgggcaggaacagtggggttggagagaaggagcagatctgagagagatttaggaagcagaatcaacgggacatggacatggtgagggactgagacaggagtgggggagggagagcccggcagccactgggaaggaagatcaggcaggacagaagtgtgggtagatgctttccataaaccgttgagaaatccacgacctggcccaaatgtggacttcacgagaagccccagatgggtcaatgggtccataggcctctcccattgaagagagaccagtaatgccgtcattaagggtacaagacaggcctcaattctaggtgagggttggtccacgttctcacttgatttacaaccagtgaagtcaacagagctgtgaaaccatctcccccatttccagatggggaaaccaagtcccagagacacccagacatggccaaggccacacagtgcagagaccctggggagcacaagcctctaagagggggattttacaagtctgtctgaaaccagaggcgaggacagagttgagggggggtcccctctgagtggttccccgccaaagagaatttctccactttggaggaagtgggaggtagttcttcttttgagatgtgaatgtcaagtgactctgggcaccccggtgactaagaggtaagtaagtgaggcttgtgggtggagccagcaccttaaatagcaggtcttcctatgtccctttgcagacacctgggctgagacatacaggacagagcatggatcgcctacagactgcactcctggttgtcctcgtcctccttgctgtggcgcttcaagcaactgaggcaggtgaggctggggagcaggaagaccccctacagaggccagggcagacggtggggtgtcttcctcatgtcttggacaagcactggaccaagagcagaagacctcagtctg

SEQ ID NO: 16158 - DNA, 2300 bp, Homo sapien
gatcattcccattttatgggagtagaagctggacctggggagggtagagggtgtccaaagggtcaaatgaggaaaagcagagccgtgctttgcattttcgcttctattttatgccaggctctgtcccgtaccctatggacataaactcacttagtcttcacattggtcctcgcagtgagggtggaggcaggtggtggaccctactggtcttgagctcagacctcagagccagctggctgggacgaatccaggatccctcatttcctggctggtgaacctaagaaaatgtctttttttttttttttttttagacagagtctcactctgtcacccaggctagagtgcagtggcgtgatcttggctcactgcaaccctctgcctcccaggttcaagcgattctcctgcctcagcctcccaagtagctgggattacaggtgtgcaccacacccagctaatttttgtatttttagtagagacgaggtttcaccgtgttggccaggctggcctcgaactcctgacctcaggtgatccacccacctcagcctcccaaagtgctgggattacaggcgtgagccatcgcactcggcctcctcctctgttcttacatgaacagagcagaaagaacacgacctcagtttttatccctccttgtccctctctgggcctcagtttcaccagttataaaaagagggattggacattgggaatgagaaggctactagcttcccatgtgcacaggccaggacagattctctgagcatgagtggaccttggctcctgccaagggtgttccgctacttcaagaagtatctagcctcctaacccctaaccccatgcaccaggcagcccattgggttgggtgggggggcgggggggggtggttgaggagagagaggtccctggccttgggatctgtggcccctctgcccagcccaactggctcatagcgtgggatgctggctccacaactggtttccctcagattggcagcctggagacaccagtacagctcagtcctataccaaggcagagctgctgactcttctggagtctcagggattgttgccactgcctttagggaaggctgccatgaaggcagactgtgttctaatgtgctcccaaggctggcaagcctctgcacccttcggtgagagcctgttggagggccggtgctgggaagccctctccccattgcactagcccaatgctctctttgggcagatagagaactcaggccccacgagaggcaagccttatccaagccacggctacagagttgaggagccaagagccacagagttatcggggatgggttggcagccaccttgttctttgggctaacaggggccagagcagaggtgggagtgggtgcaaagcagggagcgggagaccgggaggtggaggcagggaggccagggctctctcctgggtcctgagctgtccacattctgctcatcatggtggtgggaggggagttctccactctgatgctgtggataacctggggtggctccgggcctcagtttccccatctatccatatgaagttggactcaatccttctttcagcagaccctgcaccaagcccctgctgacttcaggctccctgctgggctctggagatgcatagatcaacaaggtcccccaggagcttgggattctaagaggggaaatttaggggtccatcctgatgtgggcgaggcattctctggatcaaagaagagcttgtcagacccaggatggaggggccctgagtctctcccggccccttggcgccccgctctctattccacggcctgctggccttttgtgtgttgcccacttaggatcaagggccccaggccagatcctagggcatgttcccagcttgtggcaggagaggaggcctttgtacccaggcaggcccagtccagcctcccggggaaggtcccagtatgacaagcctaggatggtgagaagcccagggacacaaagccggcttggttccttggcaacatcctgaggaatccagcggctgcacactggctcccttcctctcccctcccaccctcctgcctgcgggggctggaggcggaggcagccaaccccattataaaaagccacagatctctggcggcggcaaggggacagcactgagctctgccgcctggctctagccgcctgcctggcccccgccgggactcttgcccaccctcagccatggctccgatatctctgtcgtggctgctccgcttggccaccttctgccatctgactgtcctgctggctggtaagtggggcttgacttgggcacaaacaggg

SEQ ID NO: 16159 - DNA, 2300 bp, Homo sapien
ggcactcatttacaaggcttgagtggaagctcagaagtcctggagcccaggcatcagagagacattgagacaagtccattggtaagagtgagagtaacaagaagggtttctgcattctgcttcaggaacaacaccagccatttatccattcactcacttaatccaaaaactatgtattgaaggcctaccatgtgccgagatatattccattaaagaaaagaaacagaaacctctgtcccatgcaacttacatcccagtaggatgggggtgggggtacaggtgggagacagatagtaaacagcagacataagtaagcgaatggcctagcatgtcagaggatataagcatttcagcaaaaaaaaaaaaaaaaaagagcagaggaagagatggggatggcatgcaatttgacttcactgaaagatgtaatctaaacaaatacatatatatatttataatatatataatatatattattatctataatatatataatatatattattatctataatatatataatatatattattatctataatatatataatatatattattatctataatatatataatatatattattatctataatatatataatatatattattatctataatatatataatatatattattatctataatatatataatatatattattatctataatatatataatatatatattataatatatataacatatattatatataatatatatattataatatatatattatattataatatatattataatatatatattatattataatatatattatattatatatattatataataatatatatattataatatatatattatattatatatatgttatatatattataaatatatattttatatatatataatatatatttataatatatataatatatatttataatatatataatatatatttataatatatattatatatattataaatatatataatatatatatatatatattttttgagatagagtcttgctctgttgcccaggctggagtgtagtggtgtgatcttggctcactgcaacctctgcctcctgggttcaagtgattctcctgcctcagcctcccaagtacctgggactacaggcacctgccaccacgctcagctgatttttgtatttttagtagagatgggatttcaccatgttggccaggctggtctcgaacccctgacttcaagtgatccacctgcctcggcctcccaaagtgctgggattacaggcgtgagccaccacgcccggcctaaaaaagtttgaaaaaggtgaaggagtgagtcctgcaggtatctggggacaacattccaggctgaaagaacagtccgtgcaaacctcctcaggaaggagcatgtctgtctggttggtttgaggcatagggaggaggccagggtggctggggcagagtgaaccagggaaccaggagatacaggtgggcagagagcagggcacagaactcgcggggcctcgtggctgctggagggtcttggacttgtcctctgcgtgaggtggagagccacggggacgttctgaacacgggagattcatggtccctctgctgctgtgctgagaatacactgtagggggcaaggatggagacagggagagcacccagaaggcagttgtaggaagccagggattgatgctggtttctgggtgtatttggaaagcagagacatgagctcacccaacagatgggaagttgggggcgagaggaagaggcgtcagggatagcgcccaggtttctggccctagtaaccggaaggaaggggctggcagagaaggaggagagagcaggtgtaggggtgggtgggaatcagaaattcagcttcagacttggggggttggagctgcctatttggtatggcgagtaggcagctggacgtagaaggaggctggagtttgcgagagaaacttgggagtggttggcatatagatgatatttaaagtcagaaacgtgtactatttgccagatataagcagtaaggcagttgatgcaaaccaaagccttctaatgtaattattgttattattttcattttgcagctgtagaaactgaggctcagagagaagtgactttgagctcacagtgtcaccgcctgctgatgggagagctgaattcaaaaccaggtgacctgacctagagtctttgctcctaacccctccactgtgaggtgaccccctcgctggatctttcagggcatgtgttagatgagcggtggatggactttggatcaagggaagataatccatacaagaa

SEQ ID NO: 16160 - DNA, 2300 bp, Homo sapien
cctacttgtctgataacacttagcatccttttaggggcgcttgcagttggatcatatggaaggagctagataaaaggcatgatgaggggaaaatgcaaagggttttcatagaataaggagggatcactttggaatggtgggagatacaggtagagccagattatggaggccgtggatccagaaggccaattgacatcagtctagcaaataaaacctttagtaactcctttaggaaaagagtgacaaatcaaagtgctatagtatttaatgcttgagtgttaaatatttaacatcctgagtatgttttgtaggcaaagaggagagttacttgaagtgaactttggtttttttgagacagggtctggaatgtagtggcacaatcttggctcactgcagcctcaacctcctgggctcaagcagtcctaccacctcaggccctctcctccaccccagtagctgggactacataagattactacataagactaccatagattctgtcaccacgcccagctaatttttgtatttttagtagagatggggtttcaccacgtcgcccaggctggtcttgaactcctggactcaagggatccacctgcctcgccttcccaaggtgctgggataataggcatgagccaccacgcccagctataattttttattttttatttatttatttattttgagacggagtctcgctctgtcaccaggctggagtgcagcggcacgatcttggctcactgcaacctccatctcccaggttcaagcgattctccttcctcagcctcgtgagtagctgggattacaggcatgcaccaccacacccagctaatttttgtatttttagtagagatggggtttcaccatgttggccaggctggtctcaaactcctgggctcaggcaattcgcctggctcggcttcctaaagtgctgaaattacaggtgtgagccactgtgcccagccgaagtcaacattttaaaagaaacaagagtgtagtgacttcgcttgaattcagtctgtatctgtggtggcatgattgccactgagttggccacctctgcagaagtctgaagtgttcaacataaaactaatccattttgactcctctaccacaaattgtttgtttcatttatttgagctattttaaattggaaactggtgtcattaatgtttaagaaagaaaggagaaactgagtagagtactatctcttgacctaatttctttgtgagcatattatatactcacctaagtatcaagtggaagaggaagttgatccctggagggaaatttccataggttaaaagcatgggatttacagtcagatgaatttgggttcaaatcccagctctcactttatccatgtagcactcactagctgtgtgacttgggcaacgtaaattgcctcagtttccagactgtaaaatggtaataatatctagtttaaggctgttctgagattcagttgagataatgtttagaagatgctttgaacaatgtagctaatattaaatggtacagacatagtaagtattcttgatcactgcagattcagtggaattaaattttcatattttgatgaaagggaaaataaccagtattcagtttgcaaatttaaatgtgttgtttctttttaaaaacattgaatctgtggttgggttatttctgtcaatttatttgccttccttgccaagtcacactttgcctaattgatgtcctgtgtgttttccattccgttcatgctgaattatcttaggtcaaagaggaaatcatctttctgcctccaaccttcttacttgcctctaatcccctttcttgactcttccaagtcaggattctcaccaaggaagctatctgccttctttgggaatgttgggcttatgaagacttgagataatggggttcatgtattcagactctttagcatatacagtagagtttctaatgttgtcagcattccctagtgggcggttacaagttaggttgggattctaatcatattttatgatatctcacagattaaattgcactttgtctctgcccagtcttgattcccttttggccagcagtttttaggtctgtcagtactgcactgcaagaatggcagattttgggatctctgctggccagtttgtggcagtggtctgggataagtcatccccagtggaggctctgaaaggtctggtggataagcttcaagcgttaaccggcaatgagggccgcgtgtctgtggaaaacatcaagcagctgttgcaatgtaagtacccacccacgttgtctttatgaggctggaggggttt

SEQ ID NO: 16161 - DNA, 2300 bp, Homo sapien
ggagaaaacccgtctctactaaaaatacaaagattagctgggcatggtggcgtgcacctgtaatcccagctacttggtagactgaggtaggcagaattgcttgaactcaggaggcggacgttgtagtggaccaagatcttgccactgcactccagccagggagacagagtgagactccatctcaaaataaaaaaaaattaaattaaaaacataaaattaactaactgaagctcttgtgcacatacatgtcactgcctggcctctgggtgaccagtaccaagtgggcctaaccagcctgctgtgcaatccaagtcagccattgcccctctctgggcctcagtttccctgccagctttagcagaatggtaggaaggcacaattacaacctgcaaatgagacctaagaaacctactatgtgcctgtccctacacgggagacagacaagaagacacttgttccctgccctcaagagaacgctctgtctagacacttagactaagaccttagaggtttttttttttttttttttttttttttttttggcagagtcttgctctgttgcccaggctggagtgcaatggcacaatcttggctcactgcaacctccgactccggggttcaagcgattctcccgcctcagcctcccaaatagctgggattacaggcacccaccaccacacccagctaatttttgtattctttgtagagatgcggtttcgccatgttgcccaggctggtctcgaactcctgagctcaagtgatccacacgccgcagcctcccaaagtgctgggattacaggcatgagcctggcccagaattttttttaaaaagtgagaatcaacaatgaaacaggaacgtctccaggcatttggcgtgtgtcaggaattagggtttcagaaaggatacccaaatgttagtttccacaggaaaggctcattcaaagatggatggatagaactcagaaacaaatccttatggagaggagtgttttacctaaaaccagaaatatggatctaaaattttaacctttggggtaagttttggcttaggaggtcttccccgcacccgtgcaggggggagccggatattctgaaaagactagatttgacaaggggtgtgcaaagcacaactttaacagacacaatgatggggtctgactgcaaacacaaaatcgacagaatcacatgctcttgtcgtcagttactcttagcccaaaaaccgtttacttcttcctactaagccttctctgatgacacccccgtgaagtgctctgttagtggctagaccgtgacctccttgagccatccagagcttggcactcagtaatgtcagaatgaagggcaccagcctttcccgaacttgcagatcctacaaatcacccgagggagtggttaaaatgagattcctggaccacacccagacccactcaatcaatccttctggacaaaggcctagctgtctgttctagtaacaagcatccttccgatctggatacttaattatatcaactcaacacgctgggggttcggacaagttgcaggttcgaaattacaatcgtgagctcaggtaccccccgactccaaggctttcgtgctttgctgccaggaacccccagggaccaaaacgtcacggggactgaggcccaaggtcacaacgattggctactggtaggaccgggtctcagaaccaggtctccccgatcccaagctcggagccgtttctcctcagcgtggtgtccccggggcctcagagtagggccggctgcgcaagggacgaggcagccggggaacggcagaaattcccagtcaggaccccagggaggttagggccggccctggcccctcacaccgacttctcaggaataaaccagccggggctttcagcggggcggccgtggctgcgttcccatcgaggaacggggtgggaagagaaaatgagaggatgtgggaacgagggtgggccgggaggggacagttgagggagctctggcgctcagctggcccccaccactctcacctgccgcctgggctcgctcccggcttctctccagccgtcgactccacgccttgcgcctctcgcgagaggaggaggctccacggagcgacgacttccgccctccttagggccgtggtcccgtagctaccggtcgcgtcgccgtgggcgacgtgcccgcttccaaaatggcggcggcggcggtatctggtgcgcttggccgggcgggctggaggctcctgcagctgcgatgcctgcccggtgagggggctgccaagccggggagaggcggggagcgcggaggggg

SEQ ID NO: 16162 - DNA, 2300 bp, Homo sapien
taagtttaaatagagacagagtcttgctatgttgcccaagatggtcttgaactcctcggctcaagcaaccctcccacctcagcttcccaaagtgctgggattacaggtgtgagccaccacacctggaccacttagtatatttttgagattgatccatatttttatgcctatcagtatatctggcaaagattctctccttgatcaggctctaaccaggctcctctgagccctcttcttatctaggcctcaaccttggcctataaagacttgaacacacactaacataagcatcactcagggccacatcccttaagataaccctacccccctttaaagtgcctgcctgagaaaactcaaggctgtcaaaaaaaattttactgtttgttcaggctaacacttaagaaggatagggcttgtctccctgtgggaaaacagaatcctaactttgttaactgccagctagcagaccaatcttatttataattattcactatcctgactctactgagtccccacctgccttcctccctcctccctcattttttctttgaaacacccagtgacttctgcatgctctaaactcaaggttgggctccgttcatgctagactcttttccctattgcaatagttattactgattaaaaatggtccttatcactttagtgtccagctttctctttgactgatttttagtttttattgcagaatagtattccataaaaaaaatactattctgttgctagacaactggactgtttctgtgtttggctactatgaataaaattgctatgaatatacttgtactaacttttttgtagacacataccttcatttctcttggtggatttgcggggtcatagacattacttttactacacatctttagtttggaattttgtataaatacaacaaaagggggctaggcggtggctcatacctgtaatcccaacactttgggaggctgaggcaggcagataacttgaggtcaggagttttggactagcctggccaacatggtgaaaccccgtctactaaaaataaaaaattagctgggcatggtggcacaaccccagctactaggaaggctgaggcaggagaatcacttgaacccaggaggtagaggctgcagtgagccgagattgtaccactgcactccagcctgggtgacagagtgagactctgtctcaacaacaaaattaagccaagtagggtggcacgcacttgtagtcccagctccttgggaggctgaggagccagaccctgtctcagaaaaaaaaaaaaaagaaaaaaaagaaacagaatagtatgtgccaaaatatcaatattttaatacatgtactgaaagatacggcacaaatatccgcaaaactttgaaaaggaaggagcagatgcaaagtatgactgtagtaccactgagggtcatgagaagattttaggtgaaatacaggtgaacgtttcatcagttatgtatgtatgctaaagtgttaatgcatacgttctaattaaggaaggcgatattagttttccatttatgacaatgatataaagtttcctctttaagaactcctatttaaaaataaaaatactgagtacatagtggcaaaggtggtaagagagtatcacagaattcgtgaagtggtgaggaaacggctggctttcgggaaacaatggactaggctctctgtggccgtgtccacctgtccttccagtggacttggcaatggacttgagaatgggtctgcgactgccagttctgtaaccaacaggctcaggctgcgtgactttcgtaccccgagccctctctgaggctctgccaactccatgaaatgggggtgacaggccctgccccgctgcatctgcccctcacagacagcggagcagggccgaagctagccaggcggctcgcccgagcccgcgccgatgcccttcacctcaccttgctcgtgggccgccccaacggcctcttccccccaccgtcgaacccagctgaagccggcctcgcgccccctccgcgctccccgcctctccccggcttggcagccccctcaccgggcaggcatcgcagctgcaggagcctccagcccgcccggccaagcgcaccagataccgccgccgccgccattttggaagcgggcacgtcgcccacggcgacgcgaccggtagctacgggaccacggccctaaggagggcggaagtcgtcgctccgtggagcctcctcctctcgcgagaggcgcaaggcgtggagtcgacggctggagagaagccgggagcgagcccaggcggcaggtgagagtggtgg

SEQ ID NO: 16163 - DNA, 2300 bp, Homo sapien
ggtagaaacaggtcaagatgctaggtagatcatttttcctggcttaccacttttgctaccacttcgtgtcccaaagttcccagtttacccaatatttttgtgtgggacccaacacttggataagtggttctacaggagtctctggcctgcttttcctcctccttatctgtgttaccactctgggtctgaaagggtcttctctgttgaatgtccctgactgaccagtttctgtttcagtggcccgttgccgacaagccctggtgccgcgtgccttccatgcttcagctgtggggctaaggtcttcagatgagcagaagcagcagcctcccaactcattttctcagcagcattctgagacacagggggcagaaaaacctgatccagagtcttctcattcaccccccaggtaggcaccaatccacctatttctggccacttcatatgcttcattatgtctgttcctccttcacttcctctctcctctccatccccttttgtaccttccttcatttccaaggccatctttgttttttagaattttttattttttgtagtgatggcttctcgctacgttgaccagactggtctcaaactcctagatttcaagctgtcctccgcctagatctcccaaagtgttgggattacaggtgtgagccactgcacccagccacaaggctgtcttaggaaagaacctattgtttttataaaattggtgcctgtttgttctaaaacacctaaacagtatagagaagttcacaaaaataaagcagttttatccaaaattacagagataaccctgctaacatttttgtgaatatccttttagatgtttctctaagcttatttcatatgtaaatttttgtatagaatagatataatgtgtataaactctacatgctgttctagaacctgttttttcactcaacagtacatttgtaatgtcttttcatagcttaatagttgtataacattccagcaaatagctgtgccaaaatttatttaacctgtcttttattgatggatatttagatttccttcactagtataagaaataatatgataaagtgtgtgaatctctccttagaagtgggagcactgagtcaaaggatatgtacatttaaagattttttacttatgtgggccagttgccctccagaaaggtaatactaatttacatttccattagtgtttttttttcctaatcctgccattgaaaagtttctctatatctgaaattagcgtgttccttttcatttttctgatttcctaactaaagtacttttcatttcaattcaagaaatattttttgaggccctactatcatgccaggccctgtgagtaatatagcattactcctgccctcagggaggtagtctggtgtaagtttagatgaagaaaccctctgagcacagtgtgctaagggctgaaaacagggaactccagggtgcagcaatgccttcataccacatggcctcatttgctggattcctctccgtgcctatggggaggggaaggatgatctagtttttactctgttggcattaaaacgttgatactggctgggcgcggtggctcgcgcctataatcccagcgctttgggaggccgagacaggcggctcacttgaggtcaggagttcgagaccagcctggccaacatggtgaaaccctgtctctactaaaaatacaaaaattagccggacatggtggcacacgcctgtagtctcatcgacttaggaggctgaggcaggagacttgcttgaacccgggaggtggaggttgtagtgagctgagatcacgccactggactccagcctgggcgacagagggagactctgtctcaaaaacaaaaaacaaacaagaaaaccacattgatagtgacacaagagtaaatgtcttcccagcatgtgcttagaggagatccagagcccctagtttctggtcatgcccattgtacatgccaggagatgaagtatgctgggctgtgtcctcttgtctcaggtatacagaccagggcggcgaggaggaggaggactatgaaagtgaggagcagttgcagcaccgcatcctgacggcagcccttgagtttgtgcccgcccacgggtggacagcagaggcgattgcagaaggagcccaggtgtgtataggtgagggtggggccacctaaccaagatgagccaggatggagtcacaccaggcagagcggggggcctcatgccttcttccagtctagctcagagcccctcacagctgcaagattgactggtttttttcccccaatagggtggaactggctttatttt

SEQ ID NO: 16164 - DNA, 2300 bp, Homo sapien
tttatttccattcccgtgtcagctcaagaacttgacaggtctaaaccagcgtcggtgagaggaaggggtataagctacaatgcctagaagagaatgagcggacagattgaaagagctttgaaaagtataaggtgccatccacataacctggtgttcacgagaacacactaaaggactcctgagtcactaccacagccacctggaaaccacaaggcatttgatgctaccgttctggtcagggattgggctgcttcttcagttcctaataccagaccaagcctcctgatgcctttctgcactgcaactgtgtgattgaaaaatgagatgttcatccaagcagtcaagccacagaaacccagcatgtccctgtcacaatctcatgggcaccttgatcatgtcttaaccttcccttaaccttggggctcccaagccagagtcaaggtctgacgccacctcaaggtgacagctcatctccagcacagcacaggcgtgtgcacacagaggtgttccttgcagccccctccctctcaggtgtcctgagatgctgttcctgggagccccctcagaaaactgcctcacctgagacaagtgcctgctggacagaggtgtgattccaggcctggtgtcacatgacaccagcatgcattgcaggattattagtgtattttgagtctgtaaaaataataaatatgtttgaagtagtttcccattgtgtagttagtttccttatcaatcatgataggtatccaggaccccagagggagacaggttaagttatggcagccaggagacctgtgttctggcgctgccactgcctaatacatagtggtaattatagtacctctgcgtctctgggctcaagtcttcccatcagtaaaatacgggtaacagaagccttcccacagaccatcagctcccttggctgctcttgtctgacgattttagtggtacattctttagccccagtaattttctcagcctctacactggctgggttccctttgcacgtctggttagctctgttttctgctttgctctcttctgcctgtcagctgaatattaatgggggaaagtcagcaactaattgaatttcagatctcttgtgggtcttccactggatcttttttgcacctctcaattccttgtatctcttgacatcctgtgaagttttcgcagtagctgttccagttttcattgcattctcctttttccttcatagcatccatcttacactcagcagacaaccataattcttaatttaccaagatgacacaggttatggagcagggttccatcagtgcccaccctctgtttcaggaagaggtgtcactctttgcaaaggcaaactcctctttatctggttactcttctcccaactcttaaatgtatttcctgccacgttctattttagagcttttctctgttggagcagcagccactttttttgaggcccatttaaacctctctccagtctgtttaggggacttcagtagttctttgttgagcatgcaccccacatggtgcccactgccaggcactggggatgcagagacaaagagttcccactcacccaccacagctacacagactgtagaggaagcattaggttaaagaacattgtatcttttcctgaagttttcagaagtgcatggtccatacttgagactgcaagggaaagggtatttacttataattcaggtatactttgctaaaatatacattcatattaaaatatacttttgtttttctatagatgtacaagttctttttaagtgcttcatagtattccatgtgtgtatactccaccaggtctcttatcaatggacagtacaaacagtactaccacgaacgtccctgcactcgtatctttgtttacaactgcaagtgtttctgcagtatgaattcttagaagtgttactgttaagtgaaggacgtatgcgtgttttgccaaactaccctccgagatagctgaatctggtacattttaaagcaggaggccgcagaagacgctcggcagttctggcctccgagcagcaggcggcgctgtgagtcgtctttgcggaagccgcggaggcctcgctgactgacttccggtgttggcggtggcgccgcgcagtcaccgcggagcagacgcggaggctggtggcccctgggcgagatgccgtacgccaaccagcctaccgtgcggatcacggagctcactgacgagaatgtcaagttcatcatcgagaacaccgacctggcgtaaggctaccgagggaagaggctggcggctctggggcgccgggaggcccaagccg

SEQ ID NO: 16165 - DNA, 2300 bp, Homo sapien
ggtccagtggcttcctgtaggcgtgttctgactgggggcttccacactgtagacccacagccagtggtcagcctgctaatcatcttggagaggaactcctgagctggtccttgctctgaggagaaggcagccccagaggcaggcggtgaagacagagctgagaaaattgacccatctctggctgccagagcccaggtgtagcagagctgttggggatcagttgccagtgaggggaccccagaccagaccttataggaggaatgtagactgcctaactgtgggaggttcttggaccccagggagctgggatagaggcagtgaatgggcaggagtggaattgaggggctatcagggtgcaagtgggataggggcgcattaccgtctctgcccctcccttgtttgcgtgtgcccactggggtagtcccatctgtgcgtgtgcccactggggtagtcccatctgttccttgttaggcactcaacagacaggcctccaggacattaattaatgccaagctgctggcacaaccagcagcatgcctgtcccagggccccgttctggcagcacagatacccagctgaccccagaaatgctgctccgttcccacccgctgatcctgaagacacaggggccacattgctggcataaccctgcccccgaggatggatggcagggaaggcttaggtggtggcaggcagccagagacggcagcaggatgttccccccacagactggtctccatcaccaccctggaccttctccttcatccctggctctgccccaggcctgctgtgtgaccttagtcatgtagcttaccctctctgggcaacttttctttctccatctataaaatgaaggggttagactgggtcaacactgagcctccccctgagtctgagtctttgttgtctgtagatctgcctgatttggggtggctctgctggtactcccacttcctgctccatatctacctccccttggtatcccacattgtctcctgcatgtcttgttgccccagggccctgactggtactcctataattaactcctgcccatgctcaggacatggagggcctgcttggcttggccagacccagtggcctgttggggcccgggccccaccctcacggactggccagcgttcccaaccccagggccagggcaaggcgtctgctcccacagtggctacctccagccggcccagcacattcctcaggcttatctggaggcccgccccactggactctgccctcccacccaggaagcagcacccagagctgcgtgcggaagagttgcagggcctgggaacaggccctgcgtgagctcgaggtagtgattcttagcctggggctggagagaaacaggtagaggaccgggtggggcaggagggtagaggggtttgtgggggctgctgagctgaccaggcaaattgtctttaacattgcagagcatggggttcactcagacacgcaggggtcatctcctgcgaccctcctcctccatctctgggaagcgcttccctgctacccctgggagctcttgtacccaggaaggggcttttgctcttggcaagttgacctaaatttgcaccagagttatcacagttgatggggccacgatcccaaagtgctgagggacagcagctccctgccacttcccttcctgggtccccacctccacagtaggagccagagccagtcctcccaggaaggggttaactgccagccccagccgtgagggaggggactgggctggaccattttcctcactgccgcctccacctcggttttcctgaatggttctgtcgtcctggggtggggagggaagggaaggaagaagggcgggaggaaggagggagggaagagggagagaggaggagtgtgggaagaggaaggaaaaaagagagcgagacagcgagaggaagagaaagatgtcactgtctctaatctccctgtcatttttatttccagcaggcgcggggcgaaggagctgctagaacaatgctgaggcgggtgaggtgaggagcagcccctcgcggcagccccgacagagtgtctggaacaggtgattggaggagccggagacccaggcacctgggcatccttcccctcgcctctgccaggccccgcgcccctaaaaggtgggaaaaccatggcgaccaatttcagtgacatcgtcaagcaaggctacgtgaagatgaagagcaggaagctcggggtgagtgaccctgagctgcggaggggccctgccaagggatgggggcccgaggactcggtcccaggcttggaggcatggcgcgtgg

SEQ ID NO: 16166 - DNA, 2300 bp, Homo sapien
aaaaaaaaaaatgaaatcaaacctaaaccaaaaaaagacatcaaaacctctatcaaatctcacacttcctataaaattcaactcaaaatggatcacagacttaaatgtaaaataaaattatggaactttcagaataaaacacaggagaaaattcaaagagtttttagattaggcaacaaaagtgtgatccataaaaggaaacatggataattcagactttatcgaaatttaaaacttttgttttgtgaaagactctgttaagtggatgaaaagacaagccaaaaactgggagaaaatatttgcaaaccacatattcaacaaaggactagtaggtagaatatacaactctcgaaattcaacagtaaaaaagcaaatcatcacatggggtgcagtggctcatgcctgtaatcccagcaccttgggaggccgaagcaggtggattgcttgagctcaggagtttgtgaccagcctgggcagcatggtgaaaccctgtctctacaaaaaaatccaaaaaattagctaggcgtggtggtgcacacctgtagacccagctactgaggagcctgagcagggaggatcacttaagccccgaggcagaggttgcagtgagctgagatcacaccactgcactccagcctcagtaacaaaaaaagaaggctttttattgtgaaaattcatttgtgttgttgttgttggccaaagctcccctagaggtttctggtgttgaaaaacagtttgctatgatgaatcaagtgctgggagctttaggggctgtggtttgaagcaaagcaggtgaggtcaagtttgaaagacgcatagggaggtcaggaggttgaggcccaggctagcttggccatgggcctggggctggttagctcaggctgatcacagacaccacaatgaccatcagggaaattttcagacatccagaggcagcctccttttaagctccctgggcaaggctgaggcccaggcgtctccggggcaggggcatgcattccatgggtgggtgttgggatccttggtccctcactgctttaggcctattcctctgagacacctggacagtagctggatgtggaggtattttcatttctcaggattttggctgttcaggtggcctattgttttgttttgtatatatggtctaaagcagtggttctcacacattcgtgtgcatcagaatcacctggcctgttaaaacacacatttctgctggaaacccccaaaaattctgatttcataggtctgagtagggcagggaatttgcatttctaacaagtttcaaggtgatgggaagcttctggtccagggactacactttgagaagccctggtgtaaaaaggtacagacgtgaaaaccagaggggggacagctcctccccagaggaggcactgggcaacttctcttgtccctgcctggcacagctgaggcctgtgactggggattccgacagatcagtgagtcaaccactgcacaggcccgaagggcagaggtgagggggttgggggctgggtgggggcagcaatgaaggggaatgaagtttgagcttgagggcaaagtctcagggggacctagaatgggagaactggatgttttgagggtggagaggagaccagggaagacagaggtgctggtgcggctacttgaggaggggtagcagaggaggtcactgtggggctgggagagctgggctgtgagggcccagagagtcatgatggggttaggggagcaatgggtgtgtatgtgattcctgaagaagtgaaggaattgagatatgggggctgggagctgatgtggcgtatgggtgtgtatgtgattcctgaagaagtgaaggggttgagatgtgggggctgggagctgatgtggagttcagctttcaggggctgagaggccatgtgggctttggggcccagggaggggcggtgggaatgagctgggggtaccgggggcgacctgaagcgggtgcgggggtgccagggcgccagggcagaatcgcgcgtcccgcggctcggaggaatacggcgggggccggccgccagggcggggcagggggcggggcgcagcggcgagacctggcggaggggggagcggagcggagtcccagccggagccccagccggagcccgatccctagccctgcggccgcgcctccctcgccgtccccgcctggagcccggcgccgccgccgccctgccgcccccgccagccgcgccgtgacgcgggcatgagcctgctccgcggcgccgctgagcaggcgctcctggcccgggcctcggcgcccaggtaaattggggggc

SEQ ID NO: 16167 - DNA, 2300 bp, Homo sapien
ttagactgtttaagccaaacaagcaaaaaaatcaacctagtgcactaactgaaatataaagtagaagtgaaagtaactttttttttttttggagacagagtctcgctctgttgcccaggctggggtacagcggctctatctcagctcactacaatctcttgtctccctggttcaagcaattctcatgtgtcagcctcccgagtagctaggactacaggcacacaccaccacgcccagctaattcttcgtattttagtagagacaggttttcaccatgttgcccaggctgctctcgaactcctgagctcagggagcccacctgccttggcctcccaaagcgctaggattacaggtgtaagccactgcgcccagcctgaaagtaacttaaaatacacgtgttgtgatatgggagtgcttgggcatagctcctctagaagaaatggtgaagtggtcagagtgggtgtctttaaatgggatgatagtgacgatagttataacagcaaagacatagcatgtgctccgagtcaggtgttgtgttgaaggcttacatgtatctgcacatttaagtcacctcgcaggacagctacaaaggcggctcatgcaggtgtgcagacttagcaactcaaagacacaagtggtgtcactgcgatgcgctttcttgagagatgaacagcctttggtaaagttctgaacaaagcaaagtgcagccgggcaccgtggctcatgcctataatcccagtactttgggagctcgaggtggcaggatcgcttgagtccaggagttccaggttgcagtgagctgtgaacagacaggaacagggtagtctttaagagatgagcctggggtacagcaggagggaggtacttgcccagagatgcccagtgctctggagccctgaccacctccccacaatatgagctgggcacttgcacttgggtagggagtgcagttccagggagtgagctgtgatctgcactccagcctgagcaacagagccagatcctctctctaaaaacaaagaaaagtgcagtcttccttcagtttatacagtgattccattcctagaaaattcagtgtatgttagtataaaaattactttctgtttcaatgtaaatcagaatgaggctgtaggctcagatcatctctaccccgagcaatgtccagtgggctgtgcatgcattcagtaggatgcaggatgcatcctgatgggcaggacgcccagggcattgcagggagtcaggcaccctggcccccgtccactaaatgacccctaatcattgtgatagccaaaaatgttgccatgggttttcaacatgcctcctacagggtgacgttgtcccctctgggaaccccatgttggaggcatggagtgttccactttcagagagagaggccagtgtggtgtggggtcatgaagggcagcgtgctggaaggtgatgctgagctcagccattggtgagcacctactctgccagggccaggcatcatgcttgttacctacagtgccttattcaagatcaaggcagggtgggggttatgggaggatgtagggatcccacacagtgtcgatggcaagagagaaccctctcttcgggtcactggacagtgttttccagtgtttctatctgcagaaccatgtgttcagaccaagccttgcagggaacatagtctacaaaacagacaggagcagggtggtctttgacagctcttcgagaagaacaaggtgggccaaggagtggagtggccagtgctggggccgccacctcctggagccattttcagatgagcctgaggtgcagcaggagagaggtacttgcccggggatgctcagtgctctggaaccccgaccacctccccacaatgtgagctgggcacttgcacttggatagggaatgcagttccaggagaactgcaaagccagggtgcttctagccacatagggtgcctgggcctgaataccaaggcaaggattttggacttgggctcaacaagtgcagagggcacacagcagggccacccttggtgaggactccaagcagagggccttggtgggctcacccccatgtctgtcccttccccagggataaactggcgttgagcaggaacattgagaagctagagggggagctcagccagtggaagatcaagtatgaggagctgagcaagaccaagcaggagatgctcaagcaggtgagtcttggagaccagagggtcttcctggaggcggcaggatcgcgctgttgaatttcagtagtggagatggaagagagaattcattcattaattcatccaacagttg

SEQ ID NO: 16168 - DNA, 2300 bp, Homo sapien
actggggaggttgacgccagattagccttgcattcagagaggcgcctgggggtgttgttctagaaagagaactatggtaaaattgaaacagtcagatctgggatctgacatctcatagggtgaccccgggccagttactcgagacgatcctctggcctctgcctcccaagttagctggggctacaggagcgtaccatcacacctgtctaaactttttatctttttgtagagacagagtgtccctatgttcccacgctggtcttgaactcccggcctcaggcgatcctcccgctttggcttcccaaagcactgggattacaagtgtgagccgccgtgcccagtccagtcatttctgatcttcacttttctcattatgagagggtggtaataacacccagcccctaggtaactaagataacatcatgcgagctgccaaaacctgtggccagcacctactttggttctacgatcgggtgggtcacgtcaccccaccctagcccctgcaaaagacatcctcaggacaatatttactgcttcttcctaaggagagaaggcctgatagtgatgaggttatagctggagttcaggtgcaccatcaactcagtctccaccaccttccccagccccatttccacctccaaaaactctgggcaagacctctgggctcttgatccaaggctgttactggctgtaggaccttgtgcaagtctgagccaagagcctctctgagccttcatttcctcagctgtaaaatgtggatgcccttgtcctctgagtactcaaaccccacatacatctcctatctatctctggctggtgaacagacgctttcaacattcagccacgcataacaaatacaaagcaaatgaatcgacaagtgaaactgccagtcttgcaacgtatgggatttcatgaagttggtggaagcaaagcaggagaaatggaacagccgctgcccacagagaaagggaacgtctgcaagggaagtgacccagacccgaaaaaaggcactggactatcaaaggattcagagtgatccttgagtttgaggaagctctcaaatatttttgcaaaaatgaatctcttactgcaaaaaccagttcagaagggaaggatgctacatactcaactattacaagaaaaagcaagacttccagtgttaacatctgattcattcttggttcattttaaggcgtgcgtggttgcaatcataatctaaactccgttaatcacggggtaaaactaatttatcttcgtaatatttagcttctttttctaggtaaaatcccaatcaggccaggttttccccaccatcttggtgaattgttggtcttcttttaaatagattcacctcgggggccttccagggtacaggatgtagtggggagtcctccagacgcctgtcccggctttccagtcaagaccacaaacatcctacccccaatagagagaaagccccaaaacagctgggcgtccccgaaggcgaagtaccgtaattccccagggcctgccaaccaccatcgcaatgcagagaaaagtctccgcccgccgggccgagtgctccccgcgccccccacctcttaacaagcgcaaggttgctttcgtcaacccttctgttgtacagaaagagaaactgaggcccgatgggcacagacttgttggcccacttccactcggtggcagagctggcccagggaaaaatgcaggtaacaacagtgaagacttggtaagctcgctccacgtgccgagctgggacccgcggtggccgtttctgctgggggcgcctagtacgtagttggcgctgaggaaacctgaaccaagaaagccgagcccccccgcaactctcggcccctcacgggggtggggcctccgttggggtacggcccgctctgcagcagagcccaccgccccggcccgcacccctcgccccgaagttaggctggagcccccaccccagcagctcggtgggccggggtcacagcggggccgcagcctgcgaccgcttcgggggccccgccgctccccctgcttcccctccccccgggagggaggaggagactccgcggccctccctcggcccctccggcggcggtcgcagctgcacggtgcccgctctaccccgccgcagcggctgggacgtacggagcccgcaagtcccggcccgaggtgagcgggggcggcaggccggggggcggcaggccaaggcggcccgggaacttgctccaggccgcgcgccttccgcgggaaggaaggggttaagttgtggggcgtgctggaggagcagacacagtcggggcgcc

SEQ ID NO: 16169 - DNA, 2300 bp, Homo sapien
agaagccttcctggaggagcaggaggcagagaagccttcctggaggaggcaggatccagtggagccctgatgggtggagaggagctggagggcttcccaggtacatgtgtgggaccacagctgggaccgagcagggaggtgggtattaatatggcaagcacaatcagactgggtggcaatggaagttggacggggttagactgtgaaggcaatagggagccaccactggttttttgtttgttcgttttgtttttgaggtggagtctcactctgttgcccaagctggaatgcagtggtgcgatctcggctcactgcaacctccacctcccgggtttaagcgattcttgtgcctcagtctcccgagtacctagaattacaagcatgtgccaccacacccggctaatttttgtatttttagtagagacggggttttgccatgttgcccaggctggtctcaaactcctagccttaagtaatctgcctgcctccacctcccaaagtgctgggataacaggcctgagtcaccgcacccagcctcaccactggcttttgagcaggagagtatcttggtagtgagcttcaggatcaggagtgcagggctaagtaacgggcactaacttagcccccaactgaagcaaggcacagtgaggctggtacagacccaggctagaggggctatggggtaggcagggcctcctcctgagccctaagaatagccagttgggctcacattcagcatgaggaaggaggaggttggcatggcaatcctagaggtagctgggtgacctcggaaaggaagagcctggaggtcaaggtctggatcctgatcaaagaaaaccgaagcgcaaagaagggccaaggcttgcccaagtcacccagagggagtgtagcccaggagtcaggacacaggtgcaccggtgtccctgcaaaaccttcaccgtgcagctggggtggggacctggctgccctccaaggagcagctccctcctgcttcagcagaggccacttgtactacctgcaagctgtatttgggctgatgcgggaagggccccagtgaggcagagagcggggagaccatgttaggacctgtctggtttctcccttttgctgcctctccatctttcccccagggctggaagagcacattcctgagtcagttttcccaggagtctggatggggcccaggcaagagagagcaccgtctccccattaccaacactctctctctatcccccacacacacctccttgctttcccttagagctcttcagagggtatggctgatgcaggacaggcctatccagctgcctggctcaaggagaagctggccagctttccagcctcatgttttctgggctctgtggccagggaggcccctctccaccatgctctgccacttggcaactctgggccaggcccaggtcctctctgggcttcaggtccctcatctgtgaaatatgacggcttcatagagcacttccagtgactttgccagccttaccttttgtaagccccacactgccctgcaagatggtactgtcattatctccattttacagaggggaaacaggttcagagagcatgagtggcttgccccaagtcacccacccagtaagtggtgggcttggtacttgaacccaggcagtctgaccaagctgctgcctgaggtctttgccatcatcaatatgccatcaattgtcaggtcaggcagggatcattttcccttttctatagatgggaaaactgaggcccagaggggcaacatgtcttgcccaaaggtgcagagctcaggtgggtcttgcgcactgcataaggccacgttgccatgtccttgagcacctccacagaggagcagccaccccaggaagtagctgcagactctacggggtgataccctcaaagggtgaccagggcatgaccgacagctcgaaggaagcaaagaggctgctgctggtgaaagaagaagtgaagtgagagtgtggtgcctgggcctggggtgaagggagcagagagaagtgcagtgggggtgcaggtgtggggcaaagggagaggccacccacagacgcctcccgacttccccttcttcctgcagaagctacaagacagcagccgagacagcagctgagacggcagcggcagcttctcaggtcagcctcctccgggcctctccccactctcctctgcccagttctctgtccttatccacaggcccctcagtgggcactggccatacccatgtccaggtgggcacagacctggtgatatcctggtgagcaagctggggacccaccctccttccc

SEQ ID NO: 16170 - DNA, 2300 bp, Homo sapien
agtcttagagacctggctttaggcaggtttaagtaaagcaagaccctttgcccttcatcctcagcttcctcatctgtgaaatgcaggagtggtgagtcaaataagatgctgcatgtcctactcttgggacatgccagacacctagaagttagaggttgctcttttatcatcatggtgatggcatgcacctttttcagggccggagccagttcttggaggagactctgcacagggcatggatcactgtggtgcccttttcctgtgcctgtgccttctgactttgcagaatgcaacaacaggtaagggggctctgctgaactgggggcagccctagcccagtcgtgggactgtgatgcaaaagggggaggcgtcaaaccatgggagattgaaaagggccacttaggcttcctgggggcagcaggagctgcttgtgaactagactctcagggtgggatggaaagcccagaggttgtggggccagagggcagttgagacacaaactgagggggaggtgtgtccccacagagacatgggaagaactcctgagctacatggagaatatgcaggtgtccaggggccggagctcagttttttcctctcggtgagttggatgtgcctcccaccccaagcctgcaccttgaatcagtgggtcagggttagtctaatgtagactcttaactgtgcatttcttcagcacttttattgagcacctactgcatgcctgacactaggctctggggatgcaggatgggcatgtcactgccctcatgaagtttatcatcgaggaatgggggcccttaatcatagatgtcatgacactaagtgcagaattatgggtctccatgcattttcctgggaagggggtctaagattctggctgggctctccagggtctatgacccaaagactgagcagctctaggtgagcggccaatgctgaagactggtcagggctaagagtggctactgggaagctgtgagggagcagtcagggaaggcttcctggaggaggtgacaataaactgggacctgaacaggagttaatcaagaggaggggatagatggggtagggaggtaacagtgtgccaaggacactgtgtgtgcagtggtctggaggtgcgtgtgacagaggtgtgggtggggaggccctgccctcccaggctgtctacagccccctctcacccttaccccactccgggctctggcctccctggccatctctctgggctgcagtcaactccaccagctggagcagatgctactgaacaccagcttcccaggctacaacctgaccttgcagacacccaccatccagtctctggccttcaagctgagctgtgacttctctggcctctcgctgaccagtgccactctgaagcgggtgccccaggtcagaggctgcgggttggggggtgtggccagctgccccgccctagaagtcctccaggcatttaaggtctggactttctttaggctccactgtcttcctccccacaccccacagtccaggctctgccctaactggcagtgagttgcctcctctgtaaaatggggctcatactcgctgtgtgaactgtggaaagggaggtgctttattgcccctgcagggcagaatcttcttcctgctttggctggaggctgcccgctgcgggaggcgctgtgggagaggccagaaaccctggctccttttaggaccctggggtgatcagctggatccctggcaggggctggggctggtgctggggctgggtgctgaggtagctccatcttcaggggttcagtgggtcaggtaaacatccaaaactcaggaacagcatggagggaaggcctgggatcttgggaagtttgggaggagatgcagcctggggggagaaggttctgtgggtggaaaccccaaggaaggtttcacggggagtgggaggcagtgaaggtgttggggtcaggtctccaggtcctggttgccaaacagcctgtttgcgaccctctgcaggcaggaggtcagcatgcccggggtcagcacgccatgcagttccccgccgagctgacccgggacgcctgcaagacccgccccagggagctgcggctcatctgtatctacttctccaacacccactttttcaaggtcagtgtgatggcgggccaaggagggtgggtgccggccccttcttgggatccactgcaggtgcccatgtcactgcctggcctctgggtgaccagcactgagtgagaccaaccagccatctgtgcaatccaagccagcaattgtccctctctgggcctcagtttccctgccaactttag

SEQ ID NO: 16171 - DNA, 2300 bp, Homo sapien
ggtcccagcccagggcctcaggcccagcccctgctgctccatcacaagccagggaccctgaggccagaggtcatgggggatggagcatgggtgtcaggcgtggcggagttgccagcgggtagacaggaagtcactgggactcccttggtgtccttatcagggtgggtgacatctctggggctgtggggaaaccccggagcctagaggtcaggctgtcatcctgcagatccccctctctctgacactccttctcccttctggtaccccaaccctgtctgtactcaagcaggagactcgtagggcagagcaggcctgcaggcccatgggtgcggcaaaggtggcatcgactgttgggaatttgccatggggaagaggggcaagagggagctgggactgggaatgccagtggggtctgggctggtcttcaggaatggacctgggctgtggccagcagataacccttctttactgccttggggagtcagagagggctccagtccagacctggatccacctctgctcccatctgaccacctgtccacatccctgtttcacctcttgcatctcatctctacctcagctcctttgttcagccacagaatcaagctggcctcctcctccttgctccttaaacaccaatccctggtctcaggggatgtcccaaaggccgctttccccactatattcagtccgtgcacaggtgtcccttcccagagagcatctaagctgcccatcccacctccatcactctttcccctttcctggcttatttttgttccataattcttaccactggatttatttatttatttgagactgagtctcactctgtcacccaagctggaatgcagtgtcgaaatctcggctcactgccacctccgcctccggggctcaagcaattctcctgcctcagccacctgagtagctgggactacaggcatctgccaccatgtccggctaatttttgttatgtttagtagatacaaggtttcaccacgttggccaggctggtcttgaactcctgacctcaggtgagccacctgcctcggcctcccaaagcactgggattataggcgtcagccactgcactccgccgccactggatatttttaataattacttgcttattcatttcttgtctctcctacagttctgagggcagaggtttctatgttttcttggctgcaggatcccccatgcctggcacaggacctggtgcacagcaggccctcaatagacactcgctgaaggcgtggtgcatcccctgcctgtccacactttcatccatccaccgtctgtgctttcttcccacacttcctcacccatcaatcacccagaatttctcgatcccaggccctgtgctggttcttgggtttggtgcgctagcagggcacacggatcaggaaagaaagaattccgacacttagggattggtcccagccaagggggagcctgggggactatgggagaaacagtggggtgaggggaggtgagggaaggtttatagggtgcattgaggtgcatgcagcacctcgcaccaggcgtgacccacagtggcacctgatagagactttgtagaataaatcagccattgcccggatggcttctagaaggggtggcggggctcagacggtgttctcaatgttgaggatgtgatgcaggaatcagaaagcatctagaggaggggtacctgggtgtgagagcttgagaaacttcccctggagaattgccagactgagacaaggagtgaagggtgggacaggggccaggcaggcagggttaggggcgagtgggccaaggcctgcctggaggactctgctgggcaccctcccaggatgccttgagcggtggccgctgagctctttcctggaagaggcttccatccctgcccctttgtctacctcagttctccctctgtcaggtgtcctgcaggagcctggaaactcagagagaagaatgagcaggactccccatccccctcgcttcccgcctcctgaccccaccagctgctggctggggcctgtttttattacaggcaggtgagtctggcccaggattccaggcggggcctggactgagggaggaggcaggaagaaactcacaaagagttggcagatcacggatggagggcagcatctcccaacagcctgggcggccgctgagacccagagaacccaaggactcccctgggctcatccagcagcctctgcttcccaggagagaggtgctgaagtccacgaagaggtgaggggtggggggactcagcacctaagggtcaggttggcccctgcaaggacacc

SEQ ID NO: 16172 - DNA, 2300 bp, Homo sapien
aggcctgcaggcccatgggtgcggcaaaggtggcatcgactgttgggaatttgccatggggaagaggggcaagagggagctgggactgggaatgccagtggggtctgggctggtcttcaggaatggacctgggctgtggccagcagataacccttctttactgccttggggagtcagagagggctccagtccagacctggatccacctctgctcccatctgaccacctgtccacatccctgtttcacctcttgcatctcatctctacctcagctcctttgttcagccacagaatcaagctggcctcctcctccttgctccttaaacaccaatccctggtctcaggggatgtcccaaaggccgctttccccactatattcagtccgtgcacaggtgtcccttcccagagagcatctaagctgcccatcccacctccatcactctttcccctttcctggcttatttttgttccataattcttaccactggatttatttatttatttgagactgagtctcactctgtcacccaagctggaatgcagtgtcgaaatctcggctcactgccacctccgcctccggggctcaagcaattctcctgcctcagccacctgagtagctgggactacaggcatctgccaccatgtccggctaatttttgttatgtttagtagatacaaggtttcaccacgttggccaggctggtcttgaactcctgacctcaggtgagccacctgcctcggcctcccaaagcactgggattataggcgtcagccactgcactccgccgccactggatatttttaataattacttgcttattcatttcttgtctctcctacagttctgagggcagaggtttctatgttttcttggctgcaggatcccccatgcctggcacaggacctggtgcacagcaggccctcaatagacactcgctgaaggcgtggtgcatcccctgcctgtccacactttcatccatccaccgtctgtgctttcttcccacacttcctcacccatcaatcacccagaatttctcgatcccaggccctgtgctggttcttgggtttggtgcgctagcagggcacacggatcaggaaagaaagaattccgacacttagggattggtcccagccaagggggagcctgggggactatgggagaaacagtggggtgaggggaggtgagggaaggtttatagggtgcattgaggtgcatgcagcacctcgcaccaggcgtgacccacagtggcacctgatagagactttgtagaataaatcagccattgcccggatggcttctagaaggggtggcggggctcagacggtgttctcaatgttgaggatgtgatgcaggaatcagaaagcatctagaggaggggtacctgggtgtgagagcttgagaaacttcccctggagaattgccagactgagacaaggagtgaagggtgggacaggggccaggcaggcagggttaggggcgagtgggccaaggcctgcctggaggactctgctgggcaccctcccaggatgccttgagcggtggccgctgagctctttcctggaagaggcttccatccctgcccctttgtctacctcagttctccctctgtcaggtgtcctgcaggagcctggaaactcagagagaagaatgagcaggactccccatccccctcgcttcccgcctcctgaccccaccagctgctggctggggcctgtttttattacaggcaggtgagtctggcccaggattccaggcggggcctggactgagggaggaggcaggaagaaactcacaaagagttggcagatcacggatggagggcagcatctcccaacagcctgggcggccgctgagacccagagaacccaaggactcccctgggctcatccagcagcctctgcttcccaggagagaggtgctgaagtccacgaagaggtgaggggtggggggactcagcacctaagggtcaggttggcccctgcaaggacacctgggaacaagagagggtggcggctgcagtggctgtggggcagccggaaatggggcgagacagacaggcggagcctcacctggggctgcccgccagcccagacaagctcagactgggtgcctgtggccctgggaggaggtggaaggggaggagcaggccacacaggcacaggccggtgagggacctgcccagacctggaggtaagagacgggtgggggacaggggtgggaaagataagtagggtgccactgccagcctgtcccccttgaccttggccatccctcaggtctagttcaatgccctgagagt

SEQ ID NO: 16173 - DNA, 2300 bp, Homo sapien
gctcatagtaggtctctgcaaagtccgacggtgagagaggcaggcagagctgggcagccaactccgcccagccaggcagccccataagcctctcctatgtggccagagtggcagctggctccgcactctcttcagccatctgcagagagagtggtgccttcaactctccatctgtgcccttctggtcagcacgctctgtggggtgtgtgtgtggtggtggtggtggggggacagctgccctgtgggcctggtccctggggaacagctgaggctgcccgggttaccagttgatcaggccctgaaggactgaccttggggaaactgaggcagaggtggtggtatgtcagggacaacccatcctcccctagataactcacttgtcctcccttgttagtgggcccccagtgtaggctggcctctgctgctttggcaataagggagttcccactgcagccccgggagagagcagagggtatgacatgggcccagtccccactgtgcctccctgccccaggtattggcccacagcctggactggggactgtgaatgtgggaagcacagtgccgttttctggaagctctcaccttatggcctccctgcaccccacggggtggctttgtggcccttcctttctgcagcttgatttcaagcaggtaggtgaggagtgcagttcacctgcagcagccctggctcctaggctgcccgagacgttccattcattcttcctccacgtggcatggggaagcttttcctggcccccttgtttagaaggcagatctctaccggagagaaggaatctcaagttccccaagcatccacgtgtccaggccccaggctgaggcctggggtgctggattgctgagtggttaggagacccgctatggagccagacggcctgtgctcccgccatcccaactcgggcacctccctgctgtgtgatcttgggcaggttaattctcatctctgagctacatgtatctgccttaagctccctcttcttcatcaccacattcacagggagtatttattgagggcttggcaagtaccaggcactggtctgagtagcaggtttgacttctctccactgccaggggcgctctggagctggaatgcagacggtggtcagcgagtgtaattactgttattgtcaccactcacccttctggcattgtaaaagcctcccagcacatctgactgaggaatcatctatcctcattgctcggaggaggagggcagacaggagcctctgcagggagtgtgagttatccaaagcctcctgactcgagaagggcactgaaccccagcagcgggaggtgctgctgacagaggaatgaccagaagggggatggggcatggtccatttccacacttctctgtctgagcttttggggccactgggaatggctcttcacccaggcctcggtttcccctttggctcagcagatggattaaaggaggccgtttccagaagcccctggggtctcagaatccaaaatgacttgggatgttgaaactgtgggtgcttgaggagcactgagaggggagacgggtcaccccccggggggacgcaggtcagccggtcagtcgtgcgtggcctggctggcctcctgcccggctgcctgtcacccgctccctcccgactgccttccgctctgccggtcagcactggctcccgtcggctgccaaggaggctggactctccttcaggaaagggcagttgtcgccctgacctggggggtgggcggacagcatccaagggccctgttgccgtggcaaccccggcctctctgtgggaactttggggagactggccctgggaggcgacagatggaggctgaggaagcagagtgatccccggccccttcctgtccctgaacactgtctgcctggatgaggggtgaggctgaggtgcccccttgcccggcgctgagtcatgggcatcccccaggatcactgcctcagcgctctcagccctgccccctcctggtctccctctgagaaatccatgactcacatatatcgtccgtcatccccagtcaagctcagggaggagggaggagcccagctggggcaggagaggggtgtctccccaccaaacaaacccggtccctccctctccgcactagctgtctgccctgccctgccgtaggagatgggctgggagcctcccacgctctccagctcactcggcaggcagcggggaccagggctggcaggttaagcctctgggggtggatcctgaaaggtggtccagccgcctggccctgcgtgggaccctccacctggcagcaggtaccca

SEQ ID NO: 16174 - DNA, 2300 bp, Homo sapien
gtgagtgccaagtgtatgtaaaaggcgtggtgtgcctcgtctgtacctccccccaggtcccctgaaccacagccccttgccagctccctttaagcacaggatcctttgatgcaacagaggccgccttctccggccagcaagccttgtgagcctttccgggagaaggtttcaccagagaacagcaagtcctttctttgctttcttttcctcttcctccgggggccaaaaatagggcctgaatgggacccagctctgggcctgcagtgagacaatagcagcctcctgactgaagctgcctcctggctctgctccacggaggggcgggggagaaggggagttgcagagacaccatcccctcagccccaagcccctgctgcctttcccatggcctctgccagaaatcatcccaaagccccttcctctgttggactcccctcagaatgtgattgccagtggggttccccacttgtgctctgagaaagtgcttgtagctggttgactgagaccccaggaccttttgcacccctgagcaaccccaccctatctgctggcctggaaccgaaaacctcggtgggggttctaacccctggttcttttctgtgccctgtctggggcgtaccacagtttttatgtccttttccctttgactcagtgggtatgaaaaacttagagatcaaaggaatgtgccctcttggaagagagcgagctccctgtcactggagatgttcaaataaagttggctgagcattgaacgtgggggagagttagggattagccaagtgccagatggacaactggtcttgatagcttcatgtcccagagaaaatctccatttaaattccatacccttcccttaccagctaggtggctcacagcaagtcacatcccccgagtctctgtttcccaatctgtaaggtgggtcccctagggctaaccttgcagagtggtagaaatggatctccaaaatgcccagtgtagttcctggcacacagtaggagtttcagaagctctgcctctattttcctccttccccagactggcaaaagagaatctgagctcccagccccgccccgggagctctagaaggaagccaggaggaacctccaggcctagggctaactcagaagggggattcttggtaggctgtggcaatctgaggaggcttcctggaggaggtggaccctaaggagttttcagagaaatatgatgcacacattgtgctcacaaaagccagtggtgggattagagggtgttcagcttgttttgagggcagggccacaggctggcagcttccagaagcaaatccagctactgttaggcataatttggttactgggtggcctgcactgggttctaaaaagatttggttttgggccaggcgcggtggctcacacctgtaatcccagcactttgggaggccgaggcgggcatatcatgaggtcaggagttcgagaccagcctggccagcatagtgaaaccccgtctctactaaaaatacaaaaattagccgggcatggtggtgggcacctgtagtcccagctactcgggaggctgaggcaggagaatcgcttgaaactggaaggctgaggttgcagtgagctgagatcacgccactgcactccagcctgggcgaaagagcgaaactctgtttgagaaaaaaaaaaaaaagatttggttttaaagtcaatgttgacaaacttgcagatttcatgtaaaaacctggggctctgcctctctcgagaaattggaagctctggctctttgtggtcccttcaagacaggcaggtgtccccggggctccccataaatcgctgtcctaacccctgccctccctcctgccagctccctgtctggcctgggcagcgtctgagttgaggacttgggaacaggacaagttacggagccacgttgctttgctgggtctgagccggggtgtgacgtagtccctgcagctgccaacggttgccagggcaacggttgccaggggctgctgtcacctgcgccccttctcccgcgctggcggctggggcttctcagcctctattccctggctgtcccctttgtttgaagctccagtgagggagcagtggctggggtggcccagcttcaaagtctctgtcctcttgaaaaaaggtggtcgggggacattgacccaccagccccgcaggctactgcctgcaaacaagaacccctcatctgccacgcacgttcttaatgtatctatagtctgcctgatgccacaaaggagtccaggtacgattctcccgcctcctctcccctcctccccgtccctttcactc

SEQ ID NO: 16175 - DNA, 2300 bp, Homo sapien
tccagtgagggagcagtggctggggtggcccagcttcaaagtctctgtcctcttgaaaaaaggtggtcgggggacattgacccaccagccccgcaggctactgcctgcaaacaagaacccctcatctgccacgcacgttcttaatgtatctatagtctgcctgatgccacaaaggagtccaggtacgattctcccgcctcctctcccctcctccccgtccctttcactcctgctccctctccctgctccccgcttctcccctgtcttcctccttcactccccttcccctccagctcgcctccttcctccccatcccttcccctttatctttttcctctcccgtgcattccccttctccccagcattgatggtgtagccagtgggtgggggtgtggtggcactagggaccctgggggggtcagatggtactccaagggacttgggcagtttaagacagcagcctcaactacaaggaaatagttgggggtgagagctccacacccgtccctgcagcccagcccttgctgaagattcttttgggtccctgggctgcacccccggtgtcagaaacaagcctctgacaagtccagggcgtgaggggactggaagtgcaggaaagagccaccagtggggctgggatccaaggtcacctgggtgagttctgatgggctccctgatttgggcccttgggaggatggcgtccagctgaacccatggaaacacattgttggaagctttctttactgtgacttttcaagagatgtgctttctaagagtcaggtaagttcaggagggaaataggcttgcagatggacagcgtgtgtcctggagccagccctgggttcgcatccaatcttcattacttgctagctgtgtgacctcgggcaggtaacttgacctccctgggcctcgctggccttatttgttgagtgggtgtgatggtacttgtctcaagggttttgaggaagcttaaatgcgtgaacatgtgtaaaaagctcacaatcctgtcttgcattttcgaagagcttaatgaacatagttgtgtcactggaggtggtgagcaccccgcctgcggggtgtgcaacctctgatggtcagtgatgctgtgctgtgtgctcaggagtggggatggaactcagtgcttctacttcccttccctggacggggcccaggcacagtcaggctcgggcccccagccttggtaggggagaactttgttcttctcagcctacttagtaggggagggtgctctcggcccctcagccagtgatccaggacctcgaggagggggaggaaaaaagaaagggagggttggtggccagcctgggaatgctaagtgtcctgcgctccaaagatgggagtttgccagacctggggtagttgaactgctaagcaaggagggaggtgactgggctgaccttgcgggcctggccttgggcaacgtgggaacacagatagggaaggggaacctcagccagacaactgaggtccggctgtggtttgagagggaagacagtctagaggggtcaggggagacggttcagcatcctctttgtcccttgctaccagcttggaggtaagctctgttcttacctgtaggcatcctgaagcctgcgggagcctggagggccctggctgcagagaaggcagtcaggggacaaacatcagagttgcccacttgacagaggagaaaataaggcccagagaagggacaggctggcctcaagattccagttggctgcagagcttgtctgaaccttatgcccctaactcctgccacccctgctctaggcatgtacattccctgggcaggtactgactggtgtgtgccctggcgcccaggaggctggcctcagctgctccttggagatggccaggtggagacttggccatgaacctctacgtggctgcagaccaccccaggagcataagctgaacaggcctggcaccagagtcttcggactgctggctctttggctctttgaggtcccttcaagacaggctggtgtccccagtgccttcctaatccctgtttctcctttaggttctaagtctcttcaatcaattctaaaagtccttttttttttttttttttgagacagggtctcgctctgtcacacaggctggagtgcagtggtgtgatcttggctcatcgtaacctccacctcccgggttcaagtgattctcatgcctcagcctcccgagtagctgggattacaggtgtgtgccactatgcccagtaattttgtttgtttgtttagagatagggtttcactgtgttggccagactggtctcgaat

SEQ ID NO: 16176 - DNA, 2300 bp, Homo sapien
gtgaggggggtctctcagagccccatggctgggctaggtcctgggatgggggttgaggcaactccccccatcttccagaatgggggggaaatgacccagccccgttcctccgcaattctcctgcttctcaaacattttgtttctgcatctgaggctggctcaggtagtggggaggggtcttgggttgggtctcaccttctcaggtaggccctgcacagggcaccaacagttccatgctgatccttttaccccgatggttattatcatgcactttcccaggctgtggggctttggacagtgggatcgccctttctgccagcatgtggccaggcgtgcatctggaaacatccctttagcttgggaaatggattggagcagctgagggctgaatgctggctgggtctcgctggaggacttgaggccctgcccactggagccattgggagaagctggggcaggaggcggcaggaagggacactactgttttgttggccctggggttggggggggtctcagggttctgtgagtggctccaggctagtccctggtccccagggggcgtttcagggaaggggccttaggaaaaggtggccctccttccagccctgcctgaccttcccctgcacctgccctctgcccacttcccaggtgggctggctgctcggaatctcagtctgctcacccccaggcgcttcttcacacactggtacctgcgagcctctctgagggcccaggtgccaggatggggcttcagcgatgggcccagcacatccaagtccactgccccacctcaccctcacctgcagctgggagggaggtctgcagatcttccaggagaaggctggccaggtgtggagcagtggcaggcccagccattcatctgccttcgcagccctccctgcagaggaagtttctggggctcaggaagccctgggctctgacctgctgctccatgctgaattcccacctgctcccacaccatgagtgaccctgacatcccctccctaccccttcccagacccagagggctcagcaggagacactgagtgggaggaggaggaaatggaggccagcaggggctgagcggctccccagttcaatcccaaggctgagtagggctagtgccagccccgtgggccagagggggatgccagcaaccacacaccttggtgggatgcccttcaccttccaattgccaagtggccatggcctcatgcacagtgcatccgtggggcctccagagttggcccgagtggctggcgccctaattcctttaggctgaagcccaggagtgtttgccacccccacctcccacctgatcagtgaccatttggggtgtaaagacaacaatttcacagctctgatgatcagaaatgatgtaatggccacaggcggctccgcctgcgtcatccatgatttcatcacacacctcgggaggctcagggtgacagacagtgcatgcaaggtcacccggccaggaagtggccaggatggatgttagctcaggcctgaccagcccccggggccgcactgctgtcttcccgctaccctgcctctgggtccgtcctgttatccaggctggtgggggaagctcaggctgcagggccagctcctgctctcctcccacaccctccagcctggttcaagccataggcaccatctgggtcttcgtcctcatgcccagagccaggctctgtgcccagcttgttgcaggtctcatcaaaccctgacacagccttaggaggcagccccattgccatcttcactttacagaggaggaaactgaggctcagagaggctcccagcttgtgagaggaggggtctgagtaggtgcgcctgactccaaagcctgtgctcaccacagttcccagggatccgctctgagccaggcccctgtggccacccagcccctagccccgtagatcccaccccagtggggccccgggggcacatacctgggtgggctcagcagctccctctgcaggtggacccagggtgcggtgagactgggagcactgcccagttccccacactcacctttcacaacccaaccaatggcgccatcgagcaggaagggtgagaaagaggacacaggaagccagagtggtggggctgcagggtgggggcaggccagctcagcagagcctggggccagagggccagacagccacagagctcctggcgtgggcaaggctggccaaggatggcgacgcccaggggcctgggggccctgctcctgctcctcctgctcccgacctcaggtgagtggctggcacctcatcccctcctgccacgctggg

SEQ ID NO: 16177 - DNA, 2300 bp, Homo sapien
ccttattaaactgatgaactagaaagctagatggtaccaatgggcagggacgatatgggagccagggagagtctagactgcttcagctgcctggagaaaaacacagtgcttctgctgagccagcaatcttgctactggttgtttatcttgaagaaacattcttccagatctagacccctctagacctgtgtagcattgtctgtgatggaagggagctggtagcaaatctgagtggtctgtccagcccacccaatgtctgctggggagttccctcaagactgccccaaaccgtcaagaggtagggccagttggaattccaaagaaataaacactaagcgccggggtgatccgtatccatccaaagcatttattagggaaacgtacatagggaaggctgtagtgttctcatgacagacagcaagaagggagatgagtctgttcataacgaggaggtgggtttatggagtttatatgagtgtttaagggattcggttcagggctggggcacgtttagcatttgtttgatctttccatgtttccagcaacaacctaaacaactatcagtgcctggggacattgaaagctccctctagaacacctggacaccgagtgcccgtcactggaaggacgaagaggtaataagtgtggatccacacaataacgtggagagatcttaaaaacacagcccttcatgaaaatataagaaccagaaggatatatttgttcagtctcatattaaacatatattaaaaacaccagcatgccaaacaatactcattttggaaaaaaaaaatacacatcagaatggttactttatagaggtgggaaatgaaagtgggtatgaagagaaaaaggaatgaataaatatgtaaaaggaatgaagtgttgcatagggttgaaaaaggacaatgaagcctatgctgcatcccactagcataacgcatcacctgttttcctttctcctccctcctcccttcctgccttcatcccagccagttccccacagaggtaattacgagttgcttagcaccaagtctgaaatactacacacactgtctcgtgagctctccacagtgcaattgatcctttagcaccaagtctgaaatactacacacactgtctcgtgagctctccacagtgcaattgatcctttacagcttatttttatggctgcatgatattccagctgggagggggaacatcattctctattcatgagaattgaggcaattcctaagtttctagcagtaacactaactgtgcaaacttgtcagcacagtgacagtctggattccctcctggcagccctatcccctgaccaaaaaaggcccatgcacccctccctccaaaaataaaacagtgaagattatattttaggactgtattggtaaaaacacagatataattcagggcagattcacacttatatagtcattattattctcatttttttcttctgaatttaaaagaaattaaacattttcatgagccactagcctaatggataggttttccccgtacttcgaggtaatgttctacatcacagctccggcctggactagaacccaggactcagtcaaggcagcctggttctgtccaccgcagctggcagctactccaggccccacactggtttctgtctgtctcgatcaaggccacattcggcatgccgtggggcaggggctgtgctgtgctggtaaatgtttaacaactggctggctcagaggaaaagccctggtcttggcgtttgctaatttttgtggtgtaaataaccccatggccaattttttttttttttttttttagagaggttctcactatatattgcccaggctggttttgaactcatgggctcaaaggattctcccgccctggcttcccaaagtgctgggattacaagtgtgagccaccgtgcccagccctcttaatttttaataatggctgtgtttcacaaaaattttggaaagtttaacaactatcaagttgatgccccactataccagtgcaccgctggcagaaggacccatgaaacctgggaagactacatttcccagaagcctcctctcccaggaccggcgttcagcttcccaggttgttaccatggagatggctaacagctagagcaggctgtcctcggaggggtgaggagggagcaagggacttggggtggctggaccctgtctggcagggaaagggtgaggctggtggcccccttctgcctgggggcctccagccctgatctttctggggaagttgttggtggggtgtgtgtgcgtgtttatgtgtgttgggaggaggaa

SEQ ID NO: 16178 - DNA, 2300 bp, Homo sapien
tacccgttctgtggttggaatcaggccggaacctcaccatggggtcacacggtggaggccacatttaaaggaggcagtgccggacacaggggctcacacctgtaatccaagcgctttgggaggccaacatgggcagttgagcccaggggttcaagaccagcctgggctatatggtgaaaccccatctctacaaaaaatataaaaattagccaggcatggtggcatgtgcttgtaatcccagctactcaggagactaaggcaggagaatcacttgaacccaggaggtcgaggctgcagtgagccgagattatgccactgcactccagcctgggtgacagatagagatcctgtctcaagaaaaaaaaaaaaatcctgaccaagaaatttacaaaagaaaagcataggagtaatatacattttttttaaatgatcaacctcatttggaagttgataataaaaaaaaagaaactaataaggtccctaaccaataaaggaccatcttataacccccatgttggcaaagatgaaaaaaatggtcctactgggtatgaacaagtatgggagcaacagtcactctgtgtcactgttgatgggacagcagattggaacttttctggaggacagttgggcaaaatattgataatgaccataaaacgtgtacgcttttggctgggcacagtggcgcacacctataatcacagcactttgggtggatcacctgaggtcaggagtttgagaccagcctggccaacatggtgaaaccccgtttctactaaaaatacaaaaattagccaggtgtggtggcaggtgcctgtagtcccagttacttgggaggctgagacaggagagtcacttgaacccaggtggcggagactgcggtgagctgagatcacaccactgcactccagcctgggtgacagagcgaggctgtgtctcaaaaaaaaaaaaaaaaaaaaagtacacttttgggcccagcaattccactgctgagaatttattcttagcaaataatggacaagaacaaaaaatgcacgatgcagatgttcatcatggtgttggtaataatcagaaaaagttgtacgcaacctaaacacccagcaataggggactggttcatagctaacctcatccataatgtgggtctgtcttctccctgggcctggggttgggcgaccaagccagcagccatacttcctagtgcttatgaagctgtctcctcccaactcccgctccccacccagtgcactcgtacaagtccatgcaacctgagatggaccgtgtcattgagttttatgaaacggcccgtgtggatggcctgatgaagcgggaggagacacccaggacaatgacagagtactatcaaggacgcccagacttcctctcctaccgccatgccagcttcggaccccgagtcaagaagctcactctgagcagtgcagagtcaaacccccggcccattgtggtaagagctcgcgggggctggggacaggtcgccctccttctctggcagctgatgtcacctctgaatggtgagagccctggctctggggtggcattaaggcctgagacatatccaagggcaccaatgatgaaccaagcattttaccaaatgtattagtctgttctcatgctgctttgaagaaatacctgagactgggtaatttataaagaaaagaagtttccttgactcacagttctgcatggctggggagcccttaggaaacttaaaatcatggcagaagggtccttttcaccttctgcctagtgaaaagggtcctttccaccttctgcctagtgaaaagggtccttttcactagaatcagggcagcaggagagagaataagtgctgagcaaaggggaagctgcttataaaaccatcagatcgtgggagaactcactcactatcacgagaatagcatgggggaaaccacctccatgattcaattatctccacctggtcccgcccttgacctatggggattacagttcaaggtgagattttggtggggggacacgaaactaaaccatatcaccaaatgcgccatcctggggttgtctggtgtcagactgtgccctcagccatggggccaaggatgtgttacttccttattgttatacaaaaatacacactcatgactaaacatttggaaaatatgtaaaaatgtagagaaaagtaaacatatctcagaatggcatctctcatatgttgccacggattataggtttggttttgagagttttttctaatgtaattgagatcgggacccagggattagagtccctgtattacccacttaaca

SEQ ID NO: 16179 - DNA, 2300 bp, Homo sapien
tacgaatatggactggttgttacagaattaaattttcttagcagtggtgataacaatggttattgtagaataagggctttatttttattttttgaaatggatctcactctgtcgcccaggctggagtacagtggccccatcccagctcaccgcaacctctgcttcccagtttcaagtgattctcctgcctcagcctccccagtagctaggattataggcacgtgcgccaccacgcccggctaatttttgtatttttttgtagagacggggtttcaccatgttggccaggttggtctcggactcctgacctcaggtgatccgcccgccttggcctcccaaagtgctgggattgcaggcgtgagccaccgcgcctggccaagggccttatttttaagagatacatgctcagtatttggtgttggggtgaaatgtcatatctacaattttcaaatggttccgaaaagacacacagacgaagcaaatatggcaaactgttaacaagtactggaatctacgtggtatcattatattgtcttttaaagttttctctgtttagttttctttttataatacaaaattaaggggaactgcaggctagacagttttgatccgatgttattctgctaatcttttaaaggtgtcttgcggtgactcacgcctgtaatcccagcacttcgggaggctggggcgggtggatcacctaaggtcaggagttcaagaccagcctggccaaaatggagaaaccccgtctctactaaaaatataaaaactagccttagcccgtcgtggtggcgggcgcctgtggttccagctacccaggaggctgaagcaggagaatctgaagcagaaggctgaagcagaaggcagagtggggactcccccacgctttggctttcagaacaagggttcgaattctggggctattactttctgaccgtgtggttttctgcaagcatcttaacccgggcctcagtttcctcatctgtaaatgggaacaggaattcctacctcttatggttgtactgggcgttatgtgagcccaaggagccctgacctgcggtgagaggctggaggccgaagggcaaggttcgaggggctctgggtgcctgggacaacctctgggcaacagggagaggcggctgcggggccaagtccctcctaagcggccacgcgagaggccctgagtcgagaagggttacggcgcttcccagagcccaccccgcccaacgtgtcacaaataaagctggcctttctccgattccctgattgcagccattcagggagcagccccttgcccacgcatccattagtcgaggcggtggctgcgtgtgcagtgctacagggttcagcgcctgcctcggctccggaatcaggctgtttccttctagacctcccatgggggattcaagccggcgtccgggtcaaagaacagggacaaagtcctcctgccacgggggaccatctgcaggcaaagtgaagaatgaggagcttcggcaaaatgccgactaaggcctccttaggttttgccccactccaagatggaaggcctgaggcttcacactgcccccgaagttcctttcccattggctatctgggaattgagttttccaataatgcggacgctgattggtcaatccaggacggttgctcaagccattggcgcagccgccattggagggcggctctcaaaagttttcagacacaaattaggttcgagggaggaaacggagaggaaagggaaaacttgagacggaggcgggactaaggaaacggcagcttgcattggtttattagaggccaaggggcggctcttgaacgttccttcctcttgattagtcctatttaggaaaagagggcgggtactgaggaaaagcggcagaagcgcctgcttccattggtcagtcctggcaggaggcggagcacccgcggcagctgattggtgcgggaggcaaggtgggcggggctctgagccggaggttttgttgtgagggtcggttgtcaagcagcggccaatcaaggcaggggatggaggcaagtgggggtcgcgcctggagcggagcctcggcctccggagccgcagctgcaggtggagtgggcaaggggacgaggtggcgaggggacggtgggccctgggctgggccgagccaggcggggctggctgggcttgcgggcagagagctctgagcgtggggaggctagagcccgtactccgcaagcagagggttgggaggatcagccgtggccgagggacctgcccccgcccccggacgagaggggtcggggtggaggccggagggggc

SEQ ID NO: 16180 - DNA, 2300 bp, Homo sapien
gctacagggttcagcgcctgcctcggctccggaatcaggctgtttccttctagacctcccatgggggattcaagccggcgtccgggtcaaagaacagggacaaagtcctcctgccacgggggaccatctgcaggcaaagtgaagaatgaggagcttcggcaaaatgccgactaaggcctccttaggttttgccccactccaagatggaaggcctgaggcttcacactgcccccgaagttcctttcccattggctatctgggaattgagttttccaataatgcggacgctgattggtcaatccaggacggttgctcaagccattggcgcagccgccattggagggcggctctcaaaagttttcagacacaaattaggttcgagggaggaaacggagaggaaagggaaaacttgagacggaggcgggactaaggaaacggcagcttgcattggtttattagaggccaaggggcggctcttgaacgttccttcctcttgattagtcctatttaggaaaagagggcgggtactgaggaaaagcggcagaagcgcctgcttccattggtcagtcctggcaggaggcggagcacccgcggcagctgattggtgcgggaggcaaggtgggcggggctctgagccggaggttttgttgtgagggtcggttgtcaagcagcggccaatcaaggcaggggatggaggcaagtgggggtcgcgcctggagcggagcctcggcctccggagccgcagctgcaggtggagtgggcaaggggacgaggtggcgaggggacggtgggccctgggctgggccgagccaggcggggctggctgggcttgcgggcagagagctctgagcgtggggaggctagagcccgtactccgcaagcagagggttgggaggatcagccgtggccgagggacctgcccccgcccccggacgagaggggtcggggtggaggccggagggggcaaaaccagggaggccggaagcagagctgggggtctgcagaaggacaggtaatgaatagggagaagagaagtaggagaatgaatgaatgggagaccccgcgagcatatgggaaagggcagtaacgggagtctggcgaggcaggggccacgtgagggatatcgggagacaggatgtgcataagtgggagactcagggggcagggagaaaagggggtgtgaacggaggactagagaggcagacccggggacccaggagaaaggggacggaggggagcgggctcatgggaaagaggtgaagtggctgtgggaaggaggtgggaggctccatgaggaggccttttagagttgaagagtcatagccacttacgcccagactggaggcctagttcctagctctgtccttgggaatcgcagggagcaggagcggttcccttgccaggagctggggaattggaccatcagggtcgtcttcgagattctttccaaggaggacttcagtggccgtctctgggatgcctttcctaggcccctaagcttagcttctgactccgctctcccacatcccacacgtcagacaaaaacaacgactcgcaggaaatctatgtgaattgcagacacgtggtcttctccgccccactgcggctgctgcactttaggcagccagcatcccggaacagagctgcagctcattatcctggcctctgggaggagtttctttttccttacgttccaaatcaccctacctgaggtgccccctctgcagattcccaaacctaatttgcagtgcagcttctgactctggtggctttggtgggtgtcagtctttatcaagtggtcttggtgatccagggagcaacagctcttaccaagcattttctaacatgacgtcacctcttgtttgtattgcagccctgtattgagctgagatggctcgagcctaacattccatgatccaggatcgtgacagatgtgcacaggctgctgctgttgctgctgtgggtaatttggaaccacgaggcaccccagggccagaagacgaggcattctgtctgcctggatgtgtgggaactctctgccaacttgattggtggatctggggggggatccacccccaccccacgaggaaagcacagtttattttgtgggtggggcttcaggtgccagccagctgaaggatggccacccctgtggtcaccaagacagcctggaagttgcgtgagtggttttcatttttctttatcaccccatttattctgttagcggcttgttgctgggaggcctgaacccacagctttgtttcctgttcttggcacaggaggagactcctagacttggg

SEQ ID NO: 16181 - DNA, 2300 bp, Homo sapien
gagggcagtggaaagctagccctggctctgaggggtgctgtgggattgattccctaggtcaggaggaggccaggtggtgtggcgtctggacaggggaaggggctagccaggcctgctgggcggccctcttatttcccatctggactctgctgttccctcgattctgggactggtgagactagttagtgggggcaggccaggccaggcaggaggaggaaggggatgtgtgcggcatcctctgggctccccgctctgctttgggattgcttagtgttgaggtgaccaccaggaacatcagagcgttcatcctcaagtgtatctgctgatgcataaggtgtatcaggcatcgtgccaggcacagctgtgacccaaacagtccctgcccccacagagggccctccccacagggccaacctggctgtggggagacagcagggtctacacaaatcagcaagtgtcctgtcaggccagggagaaaaataaagccaggaatgcggaactgactagggggagggacagggcatttgggggtgctgggcgaaggagcagcctccctgagggggcatcttgggagcagcctccctgagggagatgacggagccggccaaggggcggtcagaggagtacccggggcagagggagctgcagggctgaggccaagaggccagagcatgccaggggcacctgaggcccagccaggaggcccctgtggccggaatagagagtgagtgagaggtgctatcagaagaggggtgagggccaggctcccagggcctcgaggtcccgggtggggactccaggtttccttctagaaaggccggcccacccgtccttccccaggacactggcccgctcctccttgtgcctcctctctaccacccacagagcccaggtctcagcctccctgagactgagcgcctttctgggcagtggcggggtcattcatttccagtgcccctcccaggtggccccacagggccaggcatgcatctggccctcagctgccctgtgtggggtctgggccaggcccctcatcccagtgctgcactataagtctcagggtagtcctggcagggcgatgccattttaatggtggggaaatagaggtgcagttgcccgcagctggtggagggcattttgggggacagtggcaggtaggtaagagctttgggcaaggaggcttgcttgtgaggggtagtcaaggggctttggggacagacaccacacgagcgtctttggggacaggcctggcttactggggcctttccttctgtccccaggggaccgctgagaacccaggtatcaaccagcgggccctgcagctgctcttctccgaggtgcaggagaaggcgtctgactgggagtacaccatcaccgtcagcgctgcggagatctacaatgaggtcctcaggtgggagccccagggtgtgcggagcaggcctcaggggcagctttggggtcctccggggtggtgctggaacgaggtcctcaggtgggacccccagtatgtggggagcaggcctcaggggcagctttgggatcctcaggggtggtgctggagcaatgggggataggaagtggggtcttcctgaagggagtgtagggaccagatgaggccgtcaaggtgaagggagtgtagggaccagatgaggccgtcaagggacctggctgcaagtcctgactcagcccagtgggttggatggttctggggggaggaggggctctctctgagacccaggcaatccttgcccctacctgtgggctacaccaggtggccatgggtgagagtgggcagctaggggccctgccaacaggggctcattgtattgtggagtgagatctccacgtcttcagctgaatgcggtggaggagctggaggaggagagatgcactcagctgatggctggagaaggcttcctgggttgggggaacattcctggctggggggctgggtgcagtgcaaacagcagctggaaatgggaggagggggtgactgtctcacctgcccctccagggacctgctagggaaagagcctcaggaaaaactggagatccggctgtgcccagacggcagtgggcagctgtatgtaccagggctgactgagttccaagtgcagagcgtggacgacatcaacaaggtgtggaggcgggagcccctgaccacagccacactgctctagaggacacaactgggtttgaatgtaggctctgctgtgtcctaagcacgcacccttgggcaagtccgcacgcctctctgagcctcagtttcctcatctaaactgcggagggtggtgccactc

SEQ ID NO: 16182 - DNA, 2300 bp, Homo sapien
ctagggctcggaggacctggagtatgtaccatctgggggcccttttaaagagagagaacataaaattacatagacacaggcaggtacaggactttgggaggggctcgtgtagtgaggggtcctgagggtgggctgccgttgggtgggcccagggggcatcggggtggccttggttgcacttgccctctgggctttcctgaagagctggggttggctctgtcctgtggagggagagggtgcgggaggctgtcagcaccagcccaggtttctctcacctgaagtcccaggtgtgatgggatgcttgaacataggggaacctaaggccacagccttagaagaagccacagccacatcagtcatccctggtgctgggcaggaggcctgggtgtaggctggagctgaggactgaggctcaccttgctcctgactctgtgcccacaggtagaacacctgaaggagaagctcattagccaggcccaggaagtgagccgactgcgatctgagctggtgaggccacaaggctgtcctggggtagcgcagggcctggcctgccttgtgcagatgggccctgccaggggcaggggtgcgaccctctctctcctgagcccgcatatcccaccctgtctcagaaacacaccgagagccttatccccacctcctagtaccctcagaggccttgtggctccagggggtgggaggttccttctctgttgctgacattaaacgggagtgtgaaccctggtataaatatgtctctccttgtgactttcacactcagaatagggtgggggcagcagggagagcaggctctgggtcaccacccttctcaactctgccctccactgtctttctcttggtttctctcttgagcttgttccctcctctcttgcccttgcctttttctttttctttttctccttccctctgcctttctccacacctctcctctcttccctgcccttgtgccatctccgcgggcctctcttctttcccccgtcatctgccctcgccacatgcgccccctcggccctggctctctgcaggggggcaccgacttggagaagcaccgggacctgctgatggtggagaatgagcgactgaggcaggagatgcggcgctgtgaggccgagctgcaagagctgcgcacaaagccagcaggtccctgcccaggttgtgagcacagccaggtgagcagaatggccgtggtccccatgctggtcctggagggccaccccagctcctcacagtgagcctgtcccttgcactcatccagtgcctcccaatggctgcaggagagcgcccagctccgtgacaagctgtcccagctgcagctggagatggcggaaagcaaaggcatgctgtcagagctgaacctagaggtgcagcagaagaccgaccggctggctgaggtggagctgcgactcaaggactgcctggctgagaaggcacaggaggaggagcggcttagtcggcgcctgcgtgacagccacgagaccattgccagcctgcgggcccagtccccacctgtcaaggtgagccctggcccacctgatctgtgcctcagcccaaggcccctggcacctggggcagggctagcccataaggggggcttgtcctggtgaataggtaggtgtgtgtgggtggaagaatcattccagttctgtgcttggtcctgccccttccccttcctgtatccagggccaggcaccgagtaggtatccaacagctgaggtgccaggcacagatgcagcgcagcccctggattctgccctcgtctttttgcctttcttgtctgtacccaggatggggccccagccaggctcatagtagcctcttgttaagctgagaaggttccaggagacccccccagctttctggaaagccaggacctcaaggctcctctagtttttttctggtttctgagtgggatgttcccgagagttccttcccctggcctgctgcgtctcaggctcttgggtgaggtacggtgcccgctggctccacgtgccattcctccctcaccctgcagtatgtcatcaagacagtggaggtggagtcgtccaagaccaagcaggccctcagcgagtcccaggcccggaaccagcacctgcaggagcaggtggctatgcagaggcaggtgctgaaggagatggaacagcagctgcagagctcacaccagctgaccgcgcggctccgggcgcaggtacccaggctgtgtgggggcacatgcccagccaggaagccagaggcaggcccttgggccaatgcatcggttaaacatttgggtaccccacagacac

SEQ ID NO: 16183 - DNA, 2300 bp, Homo sapien
agaatggcctggcctgcccacctgccccttgctgagtcgggtggggctccttggggcacccctcatgctttgtgtcttcctcttacacacttaccccacagcttgactatctgggcctgccttccccactaactggggactcctctaggctagccctgtatcctcttgcctgctgcatgcccgcctgctcccttgggtatttgtgcacgccccttttgtactggcactgagctgggcacgggggataccccagtggacagcaggctcccacctggtggaggctctgcctgggggaaaacggacatttgcttcacacacccacagaaagtgggaagggctcactgggatgggcacacacatggcctcgagggcttgtccctgggcgtcttgagctgagctctgggacagagcagaggaaagtgtactctgagctgaggcctagccagtgcaaaaggacttgtggtaggagaggtgtggctcaagcgccttggggggttgcagggggtccagggcccaccctgaaggacacgtgtctggcctcaggcaaaggctgagcagcccctcttccttccctgaccttccccagttaggcttttcagacacttcattttgcaaataagtgttttttaaagggctttgtgggctgggcgtggtagctcacacctgtaatcccagcattttgggaagcagaggtgagtggatcgcctgaggtcaggagttcaagaccagcctggccaacatagtgaaaccccgtctctactaaaaatacaaaaattagctgggtgtggtggcgggcgcctgtaatcttaactacttgggaggctgaggcaggagaattgcttgaacccgggagggaaaggttgcagtgagctgagatcacgccactgcactccagcctgggcaacaagagtgaaactctgtctcaaaaaaaaaaaaaaaaagaaaagaaaatgggctttgtggagatataattcacatgccataaaattctccccttgaaggtgtacaattcggtggtcggtggtaagtatattaaggtggcaatgcacccatcaccagtgtctcattgccaaacgtcttcatcactccaacaggcctattgatggtcactccccatgctccttgccccacagcccctggcaacctttaatctgctttctgtttttatggatttgtcttttctgaacatttcatagaagtgaaatcgtagtatctaaccttttgtgactttaaagaggtttttgaaaacactttttcctttaattaacaaaatcaacttactttttaagaagggaaagtgaggaggaaacatcccagcctttttagttatttgagccccagctctctagcctctcttaggagaacccccgagcttaccccactcccacaagtgacttaggaattcagaatggttcctggtctttgttctcattttgtccttgaatgttgtttttctttttcttttttgagatggagtttcgctcttgttgcccaggctggaatgcaatggcgcaatctcggctcactgcaatctccacctcccaggttcaatcgattctcctacttcagcctcctgaggagctaggattacaggcattcactaccatgcctggctaattgtttgtatttttcagtagagacggggtttcaccatgttgttcaggctggtctcgacctcctgacctcaggtgatccacccgcctcagcctcccaaggtgctgggattacaggcgtgagccaccgcgcccagcctgtccttgaaccttctgactgcagctcttttctggaaatttctcaggggatgtatctgaagctccaggtctctgagatactctggagggcccgaccttgtggagatgtggccaaccacatgggcctggagctgggttcaaaccctgactttggcactacttattagctgtgtgaccttgggacagttaattaccactctgcaggtcagtttcctcatctgtgagatggatgtaataatagggtgtgatgagatgatccctagtgagtcattggtgttgctgtggccaccaccattgttgttactgggagagttttggatttggaatcccgtgagcaggattctattctggctgtgccatgtgccagctgggcagctgtaggaagtcacttcctctctgagccttcacttcccagtctctaaactggggctcacaaatgtcgcattgcagtttgggggtggatctgttgtaagaatggacagaaaaaagatggtcaactgtaatgtgtggtgcatcgtgagctgtcactcccgtgtgccctggtctcct

SEQ ID NO: 16184 - DNA, 2300 bp, Homo sapien
ttggcatgatgcactgggcactgaccaacctctccttcccacttacacttcagtcacttctgaaaactctatacttgcctggagctcctgtccctctctcagcttccttctgcagctttccaccccgcagtgagccctgttatcacatggctgtctcctcttgctcaagctttgatgattgcctcctcacctgtggcgttggtggccctgtttagctctgagtctgtgtccagccctgacctctcttccaggcttcagttcaagcttttgtgtgtgttcatttcagaacgttcaccccacaagccatcccagagttcttagtgtgggtgcagctgcagactgggtgcagtggggctgcaaacatgaatgtgtgtgggcccatagtgggtcaggggaggtggacacccttcaaatagctatcttcacttcctggcaggaagtggccactgcagtgacggatggggagagtagtcgacagcccaggaagctccactaggaagtccttcagttacccccacctcaatcttaaaaccccatgttgcctctccaagctgacttcgcttcttctgtaaatgacattactgtctgagtctgggactgtagcatgatcaccttaaatgtcctcaaggttgctttgcacacagtaggtgctcaataaagacttctgcagggaatacctgagctctgttcatttgttcagttcatgagggacctatccctgactgaagctttctatccctgaccaatgctctctgcccccctccattccccacaccacctggtgcctggctcgcacctgccgcctccagtagcctgctcagactgtgagggtttttttgaagtgtttatctcccttctgactgggagttttcaggcctcatctcttctgatccaaaaggacccctggcagatgcctggcacccagtaggcattattaaatgaagactgaatgaatctttgtatctcaacacccatacggtgcctgccacatgctaggcacagagcgcaggctagtcgaatacatgaatgagaacttactgtatatagacttcacttgtcattggccacagtcagggcccttttgagtccctcctcagtgaaatgttaatattcagagcattcactgctctgctgacaggccttaggcagagcagcctgaagcctaagggttaagcatgtggttaagtgcaattagaaaattagatgtcttggaggaaaaggattagacttacggagatgctgctgactcgcggtgcctcctctgtgtggggctaggacctggcttgtcctcaggctccaggctcagctgggaagggctcaggtgtggggtctcaggcacagctgatatgcaactttcgcacttcggagcctccgtattcggaaacaaatacccccaaaaggcagcaggccccatttcatcctgcgagccctagggtctttgggggacagtgcagttggagctgctgcgctgggtaaccagcgaccggtggggcgtagacccttccagatggctggctctgcccgaggtgcagttgtgctggtccacggtcttcaagcttatctccccttgttctctccgcaggctgcctggtgccccgaggaggctgctgagccccaggccatggtcccctctcgcaggacgtggaacctgggagccacgccctcgctgcggggcctgtggagagtgggccgggccccggagcccgagccggggatggctcgccccgccccagccccagccagcccggccgcccgccctttcccacacaccggcccggggaggttgagaactggtgagtccgcatttttaaaatgcctctttatttcccttccttcctccagataccagagatgagactgaggtttctcaccggttcctaagcccagtcagagctgtcaggtaattacagggtaaccgacagcccagagccaggcgggcgtggagccggagcgtcagtctcgccgggcgctccttccctgcgcccctgtctggaaaagaggagacctggaagccgggttaaactttaacacgggtcgggcacagagcagggggaatcagctgcattccctctggccaagctggtcagagctctgcgggctgccgtccttggccaagagcgtgtgggctagctccggtctctgcccaggctggtaaacaaggtaggtgaagtggctgcctgggcaccaagcgccgctgacacttgatcctgcctgggctggcccctggacggcgttgggagtggaccgaggctgctcgggaacgtggcctggcggggcttggggtccatgtgctcatttca

SEQ ID NO: 16185 - DNA, 2300 bp, Homo sapien
aaccatgaaacaagtagtttttacgtttcaaatcggagttttgctagaattccaaaaatacaacctccttacacttcaatttcctttttccttcgctggtgctttgatcttaataagttgttatacccatatgcatctgatagtactgtgtgagtacctattggagtcatagctctatcacacactgcatttgtgaacaaactttctgaggctcagtttcctttcctgaaacacgggtgtcctgaaacagtactggtgttcatagggtgttcagggttaaatgggattttgtttataaagagcttagtgctgtgcctgacacagtgttagcttcaataatggcatctattatgtacacaggaaaaaaaaagacttctaaagtgttggcagcatttatctccagtgtgtgggatatggttacaatgaacatctattacttttgtaatcaaagcaaaagaacaataaatgttattattaatttaaaaatctggctttggctttggtgggaaggacctacagttaatgtcaatgtactcaatccctgagtaagaaaaagtctccagttttgaaccaggactttaaagacattctgtcctccccatcccccgccccatcaactcatagggactataatcaagggagatagatactaaatcagaattctagagacattttgccttcatccacccttgcggtcccctggatcactgctgtttggagggcaggcagaggaattcagagatcataactccccaaataaggctttctctcccattggaagggttctccagtgtggtgttcagctggaaatctaactctctagggaatgattccaggagcgttacattcaccctctatcaggccttcactgaggaatctcagttgtcaaataaagcatgcactaggctgcttccagctgggggactgtgactgtcctgctctggcgtccagaacaatctgaggcccaggcccttggctccgtcgctggtcgagattcttgactggcagcccagcgcctgggcggcagcaggagatagaacccacctggagttgcccgaccccctccagtcctctccttgatcttcttgggccatcccctgacaagcaggaagggacagagtacccgccctcctgggattatctgcagaaccgtcagcctgcatgggctggcttcagagtgacttgctttctcctcttccgcacccgggggtgtggagagtgagggagaatattgctgctggctctggaataaaatgctgcctctgtttgggagacaaagaacagagtggctcctccaggtcagctgtctctcccggctggcaggcccctggcctcccccaggcctcttctgaggctctaggtgccccagtagcagggccttctgcagcaaggccgggaactgctgcaccattggtgtgttttaccttaagggactccaggcagcttccttgctgggaagatattcatttgctggggtggggctgggggtgcagaggtaggaagtgctgtggctagaaggcggcctggccagcgagtaggtggtggagcgagtgagagcgtgtgcgctgtaaacagtgtgagtgcatgtgcgccagcgcgtgcaaggacacggtaagggatgtacatgtattgtctcgtgagtaagagcttgtgtgtgtgttgggatgggaagacacgtactggtatgagagcccgcgtgagaagtgtatgtgtgagtactcgcgtggaagttttgcactcgggtttgaggctgtgcaaaagtacgcatggctcaccaggtgtggggctgtgtgggctgcctcgtgtgtgccagcccgtgtgcaggcctgttttgtgagagccttcagggaacgcatgagcacgtgtgccagtgcgagtgcgggacgcggggaggcgggagagaccgagtgggaggccccgcgaaggagtgggagtgggagtgggagtgccggcgggagacctgcgggggcgcgcccgggctgacgcgtgcgcgccagtgcgcgtgagtgcgggcgcgcgccgccgccccccgccggggtcggagccggttgccatgggaacgcgccgcggcccgagttaatcatttcctgtggaaagtgtgcgggaggggcgcgagcgggctggccgaggaggaggcggcggcgtggagctgcctcctgccggcgggccgggccgggccgagccccgggcgctgcggcgacgcctggatcctgcctccgccaggccggtgagtggggggcccgggcgggctgggtgcgagcggggcgctgggctctgcccggcccgccgtttggggcgcc

SEQ ID NO: 16186 - DNA, 2300 bp, Homo sapien
gtttttgaacttaaaatttttttttttctgcacaaatctaatagaaaccaagagagagaggaaaaacacaaaaactaaaacaccaaatcccaccacccttcacttattgtcattggcccagatttttctttccagtatctgaccttgagctgatgtcatttctgtgttaaggagagacagtatagagagatggctaaaggtggttctgaggccaggcagacctgggtttgagctcattcactggctcagtcacttctgctgtgcctcagtttcctcctgtgaaaatgagagtagggctagtgtctaacccattgagttatggtgagatgtaaattggagcaagcacatagcaccctcagcccagcatctggcacacaattggcatttctgcaaacacaagctgcagttatagtgggaggcaaagaccggatagaattttttactctgccttttcttactttgaatcatgtaagtgctgggtgtggtggctcatgcctgtagtcccagcttcttggaaggcagaggtgggaggatcgcttaagcccaggagttggtcagcctggccaacatagcaagactcccatctctaaattttttttaattattataataagcattttccatgtcactttttcctgctaatgcctacatttttctgaagtgcagacatcataggataaagccaaggtcacattcagaatggaggttccagtgtctggggcgcacctagcactcaataaaaatggctgaaaagtatttcatttattcacttatttagagttggggtctcgctctctcacccaggctggagtgaggtggcatgatcagagctcactgcagccttaaactcctgagttgaagcagtcctcccacctcagcctcccgtgtactggaactacagctgtgagccactgcacccagcaaaaaactattttaaatggctgcataatattccactgagagcctgtgccctgactgagctggccattccgtagggtctgatatttgagtagctcccatttttgtcacttttataaacagcattgctgtcaccattgccacccacacagcccgttcattccctggtgtggggagggaagggagaagagaggttgtcaatttcataaaaaatctttctgaataaagagtctgagcatttttttttcactttctaaacatgttgccagattgcccctcagaaggcctgtaccaaatttacactgtcgttggcagcattttttgacgagaactacttttcacgctaatttacagtttttctcttggatctggaattctcgccctggctggttctcctgggaggcatgaggcatatataaagatatctgagcgatggctgtcaccagaggggcgtatctggttcttctgccaggtgctcaggccgggagtgtttctgtctgctgggccaggccaggtggggctgagagcactgactcagtgctcccaatccctgcctgctgttaagccctcagagatcttctgaggtcagtcctggaacgcctcagtaccccgcggtccaacactctggcccatcctagacggatgagtctcatctggtgccaccaccatgattcctgctctcacaccctggcacttcactggggctccttgcagtaagtcaatcagctactactgggggaaaaaaaaattcctcctgggtggggagatggggacaggggccataagggaagccacgtgctcctggaaagccatagccacagcccctgaccacctgctgaactcttagcaccactgctgctgctgcctttaaactgtagcttcgctttgctgaggttctgtggtgcgcagcctctcccctagctctggtcctcctcctctgggggtggcccttgtttgcaaacagcaacaggaagttttgacgctgctgattaactagactcccacagctctcagtgctgagtcatcgccaccagtgtcaacctcccgcccgccccgctgacaccaccagcttccaggtgaccgagaggaagcagcaaggatcctgcggttccagtggcttccatctgccaccttccaagggaggggagggacaaacttccatccaccccagacaaccagaatgtgcagggccctgaatgccaggacgggaatttaatctaattcaacttcagcaatgggctgagggacagcttcatgccaggcaaagggaaaaactctttacacacaggattgcctttgctttcattcaatccccgcaacaacatgtgtggtaggtgttattattcccattgtacagatggagagactgaggccagtggaag

SEQ ID NO: 16187 - DNA, 2300 bp, Homo sapien
aaagaaaagaatgtagacactagtattttgttattgtttcgctgcttctctcagaattatccttatttcctatagtgttaattagtcatattttggtcttatcacactccaataaaggtaaagaggttgggcttggggctcacacctgtaatcccagtactttcggaggccaaggtgggagaatcacttgagcccaggagttcaagaccagcctgggcaaaaacatagtgagacctccccggccccaatctctactggaatttttttttttgagacagagtctcgctctgtcacccaggctggagtacagtggtgcgatctcggctcactgcaacctccatttcccggggtaagattctcctacctcagcctcctgagtaggtgggattacaggcacgcaccaccatgcccagctaatttttgtatttttagtagagacggggtttcaccatgctggccaggctggtctcaaactcctgaccttgtgatccacccaccttggcctcccaaagtgctgagatttacaggcgtgagccactgtgcctagctgaaaaatttaaaattagctgggcatggtggtacatccccgtagtccttgctactcaggaggctgaggtgggagaatcgcctgagcccagggattcgaggttgcggtgagccgtgatcatgccactgcactccagcctgggccacagagcaagaccctgtctcagataaataaataaataaataaataaataaatagtaaggaagaaacttgaaaatacatatatattcttaataaatacttaatttgtggttttattgagttattggagtcccatgccataggcccttcaaaagtacatgtcctcccaagaaaaatatttaattacagtaacaagcagtaaattgataaaagaacaagagggccagggtacacaggaattgttttattgccttttccatgtctcaggcattctataattgtctacttcatccatgttctgaagctaattatttattccatccccaggataaagttaggtctcttggtttaactttgtatttgcaggtttgacctaattccttgccggctcataatataattaaagttggcatttccttctcttatccgccctccccactccccggctttccctccccgctgtgtgcctgtttatcactagatggtgctaagacttgggttatagctgccagagactctgggaaagttgttcaggagccaagcaggctggaatttgagaactggaagatgccttcagagctcatccggacagcacttttgttttacaaatgaggaaacagaaactcagtgaaaataagtaatttgtcagagacccagagatctctcccctccttttttttttctctttcttatctgttaatagcttccagtgttacctcatcacccaggaaggagcacagctcagagagcaacaaggtcagagttgctttgcagaaagcactttggcagctgcatggtaccattcattgattcatttattcattccaaaagcagttattgggtacctactttttgctttgcatagtgctagacgttgggaataaaaatcagatgagaattcctaggattctaggaattcacattctcttaggaaatacagaaatgcaaaaaaaaaaaaaaaaaaaaaaaagaaagaaagaaaaagaaaaacaaacaaacaaacaaaaaaaacaaaaatcaccccctaaatcaaagatgctataatagacgtgattataggacactctggtcacttggaggagtttgcagccagctgcattcataattcaaagggaagattttggtgagctaacattggaggctgaagcgcatatcggatcttgtaggcagaggaatgggagggagggcagtccaggcagacagcatcatgggtgaaggcttggagagctggtgaggcttggtggagacagcagctgattgtggctgatgaccaaagggcagggtcaaaggggcaggtggtaatctgggaaggaggggacggacttcatccgaggtgtcatgttcaggaatttgtactttatcctgaaggctacaggacaacccagtaaaacgtattgctcggaaaatggcacagatggagtttcttttcaggaagaacactctgacagctgcatggaagcccagacaccaggaaaccctcagattggaggctggtgtcccggagcagtgcaaggtaagggcctggctgggttggggcagtgggaatgggaggaggaggcctgttggagagaaatttcagaagcaggactgacaacatctttttgaaaaacag

SEQ ID NO: 16188 - DNA, 2300 bp, Homo sapien
gagacggagttttgccatgttggccaggctggtcttgaactcctgacctcaggtgatccacctgctttggcctcccaaagtgctaggattacaggcgtgagccactgcacccagcctctctcagacatcttaacaaagtagtgctcatgattttccctccaaaattcttcctccaaacttccagcctcaggcttcttcttttcagtacatgtgtaaaccagcctggggcggtttactggttcacccactaaaccagctacccagtttcccagggtgagcccctcaatgcccgcctttttcctcccctttcccttctatctgtactcccaccagcatagtccaagccccatcatccctcccgtcaggctgcaggcaagggcgaatgtcacctgtgttagtctcaggcccaagcagagcagaagggcttgctgctgttccttggggaggagctctgacccctgcagcctggcatatttgtagggaagggtcagggagtacattgagctttaccgttggggtctggccttgctggcagaaagaactttcttgtgaatcacttgccatgtagaggttgcattatcagaggtcttgaagcccaacactggaggggaagccaggggtcatccagtcaccaatcagcttgtccctccgcagcctcctgaccagtttcctgtttccatgcttgcctgctacacagagccacacagatcatgcccagcccctgttcaaaaccatcatctaaaactacactccttcctgtggcttacagtctcacaacatctgcccctgccctctgtcaacctcatctcccaccactctcccctgcacccgttaagctccaggctccccggttcccattctgctcctcaaggctcattccagcctcagaacctttctcgttgcagtgtccttggcctggagcaccactcacccagcttttttcacagctgagtctttcttacttttcatgtctcagttcaaatatacatccacctcgtcataggggcctgcctacctgcccctactgccctccacaacatgcttctgccctgtttgtttcttttatggcacttagcataatttgcaatattctttatttgtcagtaatctcctccattggaatgtaagctccatgaggacagggcctatgtctgtcttgctcagtgtgccaaggctggcacactgccaggcacaaaggaagagctctaggccaggtgcaggggcttacatctgtaatcccaatactatgagaggctgaggcaggaggattgcttgcatccaggagtttgagaggttgaggctgcaatgagctgtgattgcaccacttcacttagcctgagtgacagagagagactgtggcttaaaaaaaaaaaaaaaaaaaggaaaggaaaggaaaggaagaactctagaaatggtgcggataattaagtcaagtcctgccctttgccaaatatccctcagggccaccacactgagcccctcttccttgggccctgtcccttgcaccctctcctcctagatctctgtatcccttcaagtgtccagcctcagttcacagggcaggtcagatgcctcagtcatctgccgggtcttggatccatcctcaaggcccaggcctgggacacagcctttctggcagagcccaaggcagggctgctgagaccctgcccagagaagactctaagccagaaagaacctgcctgcgtcctggcctgggggctggagagttggggtacacctcttgccaccgctgagtgggagctgacaagcccctgctaccatgaggagtctccaggcatcacatgggaactccaagctgttattctcccatcagccactccgtgtcttggccaaggtgtatgggaagccaggcccctggtaagccgggcaggtcccctggcaacccatggtgctccaaacctgggccatgcaggagcccttccctggggcccacatccttgctggaccctgggagttgggaggtgctgctggtttcctgggcatcaacagcctcttttctccccctcccccattcagcacctgctaatcctttgcacacggcccagctactgccaattaatcttccttgtgtctgaggggccagctacgagtggcagcaagaaggcaattcctggctggcggttggcatctaagcaggtaactcagggtgaggtggaggctcggtgggaccccgaggggatccccatgttctccctctagaaaggcatttaggtaggaccaaactggcacggtgggaaacctgtggcttccctctatctggtggagcttggactttagcg

SEQ ID NO: 16189 - DNA, 2300 bp, Homo sapien
tatttaagacagggtgtcactctatcacccaggctggagtgcagtggcgtgatcatagctcaccgcagcctcgaccttctgagctgaagtgattatcccacctcagcctcccaagtagctgtgaccacaggcacatgccaccatgcccatttaattttcatattttttgtagagacagggtttcgccatgtttcccaggctggtctcgaactcccgggctcaagcaatccacccactcggggttcccaaagggctggaattacaggcgtgagccaccgccccggcctaactcatgatttttaacacattgactgaactgtgcaactcttgccacatctggttttagaacattcccgttgccccagtaagacccctcacaccagatgataaccactcttcattcgtacaccccagtcccaggcaaccacacatctgctttctgcgtctatagatttgtctttcctggacattttatataaatgggtcatacaatatgtgagttttcacatctggcttctttgatgtagcgtaatgttttatgaggttcatccacctcgtagcttgtatcagaacttcatttcttttcattgcccaagagtattgcatggtatagacgcaccacagtttatccactcatcagtggacacaggttgtttccactttttggcgatacatcatgttgctatgaacatttgtgtgcaagtctttgtgaagatatatacttttttttttttgagacgaagtcttgctcttgccgcccagactggagtgcgatgctgcgatctcggctcactgcaacctccgcctcccaggttcaagcgattctcctgcctcagcgtcctgagtagctgggattacaggcttgcaccaccacgcccagctaatttttgtgttttcagtagagacaggttttcaccatgttggccaggctggtctcaaactcccaacctcaagtgatctgctcacctcagcctcccaaagtgctgggattacaggtgtgagccatcgtgcctcacaatatactttcatttctcttgggaagcctcctggggtagaatcttccagatgacccaatcatatggtacatttctgtttcattttttaagaaactgataaactgttttaaaagtagtactccatgtcttgaccagggtgggtggtagttatacggggtctcattttgtaaattattagttacattagatatttattcactttctgtatttcttctattttataactttaaaagagtcaagaaataaattgggggtggggtggtgagtggagtcaactctgggaaggttttttgtaaggggtagcagttaggaatgctgttctggaagctgtatggagcactggaggaggagcaactggggaaacaaatcctacaagaatttcacaggaggggctccaagacccatcaggttcagcccctgggcaggtatatgcaaaagcacatgccaatatatgcaaataagttaggatctcctggggtttcctcaccttgggggtctgtctctaatggttgtgaccaggatggtgggcaggccccagggctttggggtgctggccttgggcactcacagcctggcttttctgggagcctgcagtcctgcaggggctgagggtggagtatcatctgctaatccctggcctgctgagtccaccactctccctgatcccctcacgcttaccctggatactggccacagctaatctccactcctggagactcaagggctggcagacagtgcagtgccctcttccctgagggttccagggaggggagatccctctcagcatccagatcctcctaacggcagatcctagagtccttgcctaacacagaggagagccttgagtcccagagagaggcggtaattagcccaggattacacagcctgcagtgggctcagtagccatttctggcctgccttggcctgactacctccagggaaccccagctccccatctgacatttcccaagatgcctggcctgtgctaaggcctgggagaccacagccttcaggaaggctggaagggagtggccagagcacaggaattctggcacaggctcttgttagagcctgtagttgccagggttgctaaggagtgggtgcctcagaatcaggctgcaatgggcattgtctgtgcacaatgttcctttattctgctgctgtccataataagggctcgtccacctcccttcctcttctgcccattgagcagtcaaagaactgaaagtccttataagcctgtgcacctgggcctgggccctacagataaggtagctgctattg

SEQ ID NO: 16190 - DNA, 2300 bp, Homo sapien
tgtcaaggcctgcaggaaaatgtaagaaactgccctggtctgccttggcaatgcaggatgcagcatgctaaccacagagcatttctcatcacctctctagagacaactccattcccttactccaagcctataaagttctgggtaattgttggaaggtaaagcccacccagcccaggcaaatctctaactcaccactttgtggcagcatgaggtaatgccagcgagagggaggaactttcagagtcagatgcaacccacttccaggttcccagctcatctgcctcttacatttaaaagtttgtaagttttctcctgagcagaggaagaaggaaggagaagccttcacaggacagtctggcctctaactgctctgccaaagaaatgtaagagtcaggctaaaagctgtcatcctcagcatcttccggaagggagggaggagaggagcggctgctctgggtggaggcagcaggttgcttgagcaagcaggtaccactctaagccttctcgggacagagagggggaaggtgggcttctctgagcgcctgtaggtccgctgtgccaacccactgttttgtttgctttttctggcatgaatggctgtcagacagtgtcccctggcttggtctgcagcaccccctgcccaccctggccctcctgcagcaaggtgcagccaggaagcctctgtgatcactccgcaaaggggagagaggaggcaaggagaggcaggggaggccccccacctgcgccccaccccgtctcttcttcctccctgagaaaccgaatgaaagccgatcacctcccgccggccctgcctgcaggcccagctgggctgcgtcctgtcagccctcgtccgggatggcccggccgctgcgacccgagggcgagccccgagggcggccgggctggagaaaggccccagggctacaggccgggcccaggaagcggctgcgcctcgaggcccggcctgggccgcccagaagctcaagaggccgctaggtcgcggcggaggggcgcgggggggcggccgggccggcagaggaaggggtgcggcgggcgcgggggtggcccccagatgcggccccgggcgccccgccgctcacctgctccaggccgcctgcagggcaggcgcggggcgagcggcgaccagctgctctctcggccgcccctttattccggctccatccgcggcggcgcggcctacgcgcgctgccaatccccggcctcgcgtagcggctgcggccggaccgggggcgggggacgggctagcggcggccggaacggaggaagcgacgcgcgctgccggagtagcggggccggggcgaggagcgccgggagggcgggcggacggaccgatggccttgcggagacgggcggacgggcgggcggcgcgggggccagggaggcggggccgggggaggagcggcatcccgggcggcggcggccaatgcgggaggagcgggcggcgcggagcgaggccgccccctgccggggaccccgtggccgggccaggtcggacaagccgggtgctccgggcggttttcgagtcgccaggcctgggcgcctcgactaaccgaggaagggcgctctgcttccggccaccccgctcgggcttaggggagggggctccgggtgaccgccctcggcccggctctgcgcaggagaggaggggcctcctagaggctctggtctgccacaattgatccgcccctaactgctcagcttggcttttaggggcttggactttgggctggtttgaggagggggctccaggacctctgatcctggccgggctcggggcaggcaggggtctccgctgggtctagtgcgctgacccgggactgtcgtgtctggtatgtctggtcccgggtggctgcagacagcagcgggcagaaaggtgagggccctgagcgatatatgaaatgggtacacgaaggctggggaggtcccagcggggtgccgggaggctgcaggtgaccagatccgcgtgcgcagccggcagacagcttggagtcggtgggctgaatcttcaccactgtcctgccgggttccgcccctcccggctccgccccgaggcggtgccagcccaggccccgcccctgggagggcgcttccggcacagcggaactccgggtgccggttgaggttgctggtggacctgctctggtggtcttggatgaggccccatgagcgcggcgcccctggtgggctacagcagcagcggctccgaggatgagtccgaggacgggatgcggaccaggccgggggatgggagccaccgtcggtgaggagtgaggaagtct

SEQ ID NO: 16191 - DNA, 2300 bp, Homo sapien
gaatatttactggatgaatgaaaaggctctccctacgctttagcaagtattactatcgcaattgtattcaaatcaggaaacggacctaggatggtacagggatgtgtgccaggcgatagagtgggccagcgcgaggctggacccgaacccaggtctggcctcccaacttggccctagccaggtggggccactctggagctttgtctggggtgggggggaggggtatatcttctggatcctcctttcttcctgcgtccccttttccttcccagagccgccccgcatcctccctccccactccacccccagacattcgggtcccgtctggctctagggtgaatgcgcgcgccctccggagagacttcctcactcctcaccgacggtggctcccatcccccggcctggtccgcatcccgtcctcggactcatcctcggagccgctgctgctgtagcccaccaggggcgccgcgctcatggggcctcatccaagaccaccagagcaggtccaccagcaacctcaaccggcacccggagttccgctgtgccggaagcgccctcccaggggcggggcctgggctggcaccgcctcggggcggagccgggaggggcggaacccggcaggacagtggtgaagattcagcccaccgactccaagctgtctgccggctgcgcacgcggatctggtcacctgcagcctcccggcaccccgctgggacctccccagccttcgtgtacccatttcatatatcgctcagggccctcacctttctgcccgctgctgtctgcagccacccgggaccagacataccagacacgacagtcccgggtcagcgcactagacccagcggagacccctgcctgccccgagcccggccaggatcagaggtcctggagccccctcctcaaaccagcccaaagtccaagcccctaaaagccaagctgagcagttaggggcggatcaattgtggcagaccagagcctctaggaggcccctcctctcctgcgcagagccgggccgagggcggtcacccggagccccctcccctaagcccgagcggggtggccggaagcagagcgcccttcctcggttagtcgaggcgcccaggcctggcgactcgaaaaccgcccggagcacccggcttgtccgacctggcccggccacggggtccccggcagggggcggcctcgctccgcgccgcccgctcctcccgcattggccgccgccgcccgggatgccgctcctcccccggccccgcctccctggcccccgcgccgcccgcccgtccgcccgtctccgcaaggccatcggtccgtccgcccgccctcccggcgctcctcgccccggccccgctactccggcagcgcgcgtcgcttcctccgttccggccgccgctagcccgtcccccgcccccggtccggccgcagccgctacgcgaggccggggattggcagcgcgcgtaggccgcgccgccgcggatggagccggaataaaggggcggccgagagagcagctggtcgccgctcgccccgcgcctgccctgcaggcggcctggagcaggtgagcggcggggcgcccggggccgcatctgggggccacccccgcgcccgccgcaccccttcctctgccggcccggccgcccccccgcgcccctccgccgcgacctagcggcctcttgagcttctgggcggcccaggccgggcctcgaggcgcagccgcttcctgggcccggcctgtagccctggggcctttctccagcccggccgccctcggggctcgccctcgggtcgcagcggccgggccatcccggacgagggctgacaggacgcagcccagctgggcctgcaggcagggccggcgggaggtgatcggctttcattcggtttctcagggaggaagaagagacggggtggggcgcaggtggggggcctcccctgcctctccttgcctcctctctcccctttgcggagtgatcacagaggcttcctggctgcaccttgctgcaggagggccagggtgggcagggggtgctgcagaccaagccaggggacactgtctgacagccattcatgccagaaaaagcaaacaaaacagtgggttggcacagcggacctacaggcgctcagagaagcccaccttccccctctctgtcccgagaaggcttagagtggtacctgcttgctcaagcaacctgctgcctccacccagagcagccgctcctctcctccctcccttccggaagatgctgaggatgacagcttttagcctgactcttacatttctttggcagagcagttagagg

SEQ ID NO: 16192 - DNA, 2300 bp, Homo sapien
gaaaggatctgtgtcatgagtgaagcccgggcaggtgtggtctgttcaactttgatcatctggttgagcctaaggtgaccaagagtgggcggtgcacccctgattctgttgctgtgactgaggaaatgctaagctctgtttggccaggcctgggcagcctgcctctggagtaggggtggagagccatcctgcaacacgaggttaccaggagaaggagttttggttgggcacagacatccagtgtccactccaggatgtttgggagacaccttgagaactcttcctaaaagctgcacttaaccaagctcctggtggttctgtgatcccttacattttctccagaggcagagagttggctgactgacttttgcccttgggcagattgtgaggctctacccagcatgctggtatattatgttccctcagatgggggtgagacccttggcctgggggctgtaaaatgatctgtttctgtgaggagactttccatggtgagattgctagtgtctcagagaataaaggacagaaccagtccaagtcaaagcacttacctagctgagcctgactcttcccgtgttattgatctgaggggtgggtgggtgggggcatctgtctcgatttcacaccaacagacctattcccctcacgaaagcgtcataggtgacaacaaggactctggaaacaggcagactgactgttccaatcctggctcaccaaattcagcttcaccatgcctctgtttctttgtctgtaaaatgggcataattgtaggcctgctcacagagttgtgtgaggattcgagaaacagagtgtgcaaaggcttgagctcagccctgacacacgaagaaatgttgtcgtgattgcttagatgaaatcggagtcatctattttaaaaaactgcaagaaatgaatcagctgttaagtggtccattatcacctacttgatcaataaggctttctcagttcccatcagtgaagttgagatagtctcaaattgtttatcgaaatgaactgctattaacaaagtaaaatttttactagcacctggatgatgttgtgtgttactcgggctgggtgattttaaggtcttgtccagctctaatgtttaaggttcagtataccacctgcataatggggtgataatatgaagtgcaaaatgagttaactatattttcaaagtgctgtttttttttaacataagctattttttctgctttttttcttacgatttttcctgaaatatggtcttctaaatttcagattcttctttactgccaaccaggtaaagatttacaccaatcaagagaaaaccaggtgggtcctcccaacccccaatcaccatcagaggaagattctttggtgcaaaaattgagtgctttgtttctggacttgtttgtcccattttttgtttgcttttaaccaactctatgactataaaggcagctatccccaaatctgaacctttctttaagaaaaataactgggagatcccaggcacagtagcgcatgcctgtaattccagcactttgggaggctgaagcaggtggatagcttgagctcaggagttccagaccagcctgggcaacatggccaaaccgtgtctctatgaaaaatacaaaaattagctgagcatggtagtgtgtgcctgtagttccagctacttgggaggctgagatgggaggatcgcttgagccctggaggtcgaggctgcagtgagccaagattgcaccactgcactccagcctgggcaacagagtgagaccctgtctcaaaaaaataaaaggccaggtgcggtggctcacgcttgtaatcccagcactttgagaggccaaggtgggcagatcacctgaggtcaggagttcgagaccagcctgcctgacatggcgaaaccccatctccactaaaaatacaaaaaattagctgggtgtggtggcaggcgcctgtaatcccagctactcgagaggctgaggcaggagaatcgcttgaaccctagaggaggaggttgcagtgagccaagatcacaccactgcactctatcctgggtgacaagagtgaaactctgtctcaaaaataaataaataaataaataaataaataaataaataaataatgactggaggagcatgtagtggggtggtgcccagagattgagagaagcatcttggtttagtgaaaacctgtgaaagtcaggaaacctgtttctgcccagctccatcccagttgtggtgtttagtccgtgtcttcatctctgtgacctttcattttcacactggcacacgcctcccaacatccactgttgg

SEQ ID NO: 16193 - DNA, 2300 bp, Homo sapien
gcttcacctttgatggtgggtcgggtgggtgcatcgcccgaggggcccctggaggggagagctgggggagggggtgtcctgggcctagttccatcccacagctactttccttcactgaacaggagacctcccctacgacctcagaactctccttttgcaaatgaggaaacaaacccaaagaggggaataacttgctcggattgcccagtaaattacagctgaggcaaaaacccagggacctggcttctgatccagagctttttacaatccctcacaccacatcgggacctctaaatgaaactgctctgaaacaccatgtctgggctttcattcaaaagaccaagaaaaaaaaggtgtgtggtggtgggcgggggtgtcagggcatagatgaaacggtattggcaaaatatggataaggtttaaagctacttgatggaagggctgcagttcacacatctcagtcccactgactagtcctttcgggctttgggtgctgtccagacccagtagaaacccagctatcttgggttggatgtagatgcaaatccaccttggactcccaaagtacctataggagccagaaccaataattgggagcttcaagatctggtcacaggggatgtcatttccttaaggcaggattggaccccaagagaggaacctccaacagagagaaaatcaccagacttgaccgacccaggcctcaaagaacgttgctccactcattcctgggctcctctcactaacagctagccccttaaaccccaactttttttttctttttttctgagacagtgtctcgctctgacagccgggttgaagggcagcggcatgatcatagctcactgcatcctcaacctcctgggttcaagtgatcctcccaactcagcctcccaagtagctgggcctacagacgtacaccaccacacctggctaatttttgtattctttgtacagatggggtcttgtcatgttgcccaggctggtcttgaactcctgggctaaagcaatcctcccacttcggtctcccaaagtgctgggattacaggcttgagccactttacctagccccaaactttttaaaattggctaatcgggactaaatatcatgaaagagtgcgacgtggtcggttaaacaaggacaaccccgttgtccgtgtctgaagaccactgcacatttcccaaaagcaaatttcgaagtggagaatttagaaaccaacttcccagatgaaggatcccacagagaagtgagtccgtggaaatgatagaatcgcccggttcctttctctaaactccgacttcctttccccaaggacatcccaggagggttcaaacgcgccctctctaaggcactctgccaggtctcctgatttccagtttccgggaggtgaggccggctagggtgccccgagggcctgctctagagaaaaccgccctcaggtgaggacggcttccatttccgggtctgaagataaggaacagcttatcttcggtctccgccctcctgcctgcaaccctcacccactgaccacgccggccagtccgccgcgccagggctgcccttggcctggtccccgggtctcggtggaccttcgacccgggcctcccagctctggcctcctgcatccaccccgccccgacctcaagctgcttccggaatagaatgaaatccagctcgttaagcttcgcggggaggtgtgtccacccgccccgcgccgactccggccgcactgtcgcacttcactcgcaccagccagtggccaaagtgcttgggcacctattgcgccaggccaggagccggaagtcttacctcgccctcaccccaactctttgccccacgttcccgataagaacatggaggctcggagagattaatttgcccacgtgcaagcggcagctaaggggcggacgcggaacttgaaccgtgtccctcctaaacctgccccttgtccgccgcaacgcgccctcgacgcgcacaaaaccctcactttgctactgaggaaagttattcaatggccagagacaccctgcggcttttgaaaagaggtttcaggctgacaaatatccatatatacatatatatttatatttaagcctaaaacgactctttgatccctcccctaagacctccttcccgtccgcctaggcctcggtatcccccaccaggtatgagaaggaggagtcttcattcttcccaggcggggagaccacgccttccctgcctcctccctccgcggggggtcgcgttggaggtcacccccgccccctaggcgctgggttgggagtgacgcggggtgggc

SEQ ID NO: 16194 - DNA, 2300 bp, Homo sapien
ccccaaactttttaaaattggctaatcgggactaaatatcatgaaagagtgcgacgtggtcggttaaacaaggacaaccccgttgtccgtgtctgaagaccactgcacatttcccaaaagcaaatttcgaagtggagaatttagaaaccaacttcccagatgaaggatcccacagagaagtgagtccgtggaaatgatagaatcgcccggttcctttctctaaactccgacttcctttccccaaggacatcccaggagggttcaaacgcgccctctctaaggcactctgccaggtctcctgatttccagtttccgggaggtgaggccggctagggtgccccgagggcctgctctagagaaaaccgccctcaggtgaggacggcttccatttccgggtctgaagataaggaacagcttatcttcggtctccgccctcctgcctgcaaccctcacccactgaccacgccggccagtccgccgcgccagggctgcccttggcctggtccccgggtctcggtggaccttcgacccgggcctcccagctctggcctcctgcatccaccccgccccgacctcaagctgcttccggaatagaatgaaatccagctcgttaagcttcgcggggaggtgtgtccacccgccccgcgccgactccggccgcactgtcgcacttcactcgcaccagccagtggccaaagtgcttgggcacctattgcgccaggccaggagccggaagtcttacctcgccctcaccccaactctttgccccacgttcccgataagaacatggaggctcggagagattaatttgcccacgtgcaagcggcagctaaggggcggacgcggaacttgaaccgtgtccctcctaaacctgccccttgtccgccgcaacgcgccctcgacgcgcacaaaaccctcactttgctactgaggaaagttattcaatggccagagacaccctgcggcttttgaaaagaggtttcaggctgacaaatatccatatatacatatatatttatatttaagcctaaaacgactctttgatccctcccctaagacctccttcccgtccgcctaggcctcggtatcccccaccaggtatgagaaggaggagtcttcattcttcccaggcggggagaccacgccttccctgcctcctccctccgcggggggtcgcgttggaggtcacccccgccccctaggcgctgggttgggagtgacgcggggtgggctggagaggtttcctgccgtctgggaagcgtaaacggaccgcccacctgtcgggcctcggccgcccgcacctgcttgtgagaagcctgcggctggggcaccgcccccggtccccgcccgggtccgcgcattgggagcacactggccctttaagagcgcggcggccgcggcgcgcggggaggagggctgggagcgcccggagccgcgctgaactcgccggggacgtcgggcgcccgctccttggctggctcgcttgctctctcgctcgctctctcgggtcggctccctgcgcctcctcccgggactgcttggggacccgggcccggtcgggcgcggcggcgagcagaatccccgtgcaggaggcgcgcgctccgggcagcgcccggccccgggcatggacagagggagctgggcgcgcagggagcgccgcgggaccgggcggccggagcgctgagccagacaaaggctccggagttgcgcttgctctcgggagccgggccccaggcgctgggcgccgaggctgcggaacctcgccgggggcagctccggtcggccccctttcccgccggctggttccgagctcccggacctgccctgcccgcttctcctcgggcttgggaatttgccgaggcgacctaggcggctccggcggggaccgggagcccgaggtccgcggcgcgcctgccgggccaggagccagggagcgtcgcaagtttccaaggcgcgtgcgaggatccggcgtgcagtgttccgagctgggctgggcgccgagagcatgggcagcgacccgagcgcgcccggacggccgggctggacgggcagcctcctcggcgaccgggaggaggcggcgcggccgcgactgctgccgctgctcctggtgcttctgggctgcctgggccttggcgtagcggccgaagacgcggaggtccatgccgaggtaagacccccgccctgccctttggctgcgggctgggggcttggagggagaggcgccacgtccgcaggctgggacttggaggtggagggagcggagacgcgccccctgttctgggccgtggcggggaagcaag

SEQ ID NO: 16195 - DNA, 2300 bp, Homo sapien
tttgaataatcatcgtaataactcttctacagtcaattctttctttaatatgtctgcttttcttaactggaatttttgcctaagatatttttaacaatttaataaaaatcaaaggatacattgttcatcagtctaaggtatagcctctccagaaatcatccaaaaatgacagtttcatataaaaagtttttgactttctacagtaataagattcatatattttctcactatgtccagaaattctggctggattatttagggggctgatgtgaggactgaatgagttaatacatgctaaggtgttaatatatagtgcctgacacatagtaaatgttcaacttactgctataatggacaaaaactgctaataatgatgatattagctacagactccttttctatcagccataccacccagcacaggcctaggcaaaaaatacaatatttaggtagatgctcagtgactatgtcaacatttgagatttccctttacactcaaaatgtagcttactttatgttttctaaaatattctaggtattaattaatttattaatttatttattttgagacggagtctcactgtcacccaggctggagtgcagtggcgtgatctcagctcactgccagctctgcctcatgggttcacgccattctcctgcctcagcctcccgagtagctaggactacaggtgcccgccaccacgcccggctaattttttgtatttttagtagagacggggtttcaccgtgttagccagaatggtctcgatctcttgacctcgtgatccacctgcctcagcctcccaaagtgctgggattgcaggcgtgagccaccgcgcccagccgtattaatttttatttttatttttcagagactgtgttgcccaggctggagtgtagaccagcctgagtttgagaccagcctgagcaacacagtgcaaccctgtctctacaaaaacaaaaaattaacgcaggcatggtggcccacgcttgtagtcagctactctggagactgggtggaaggataggctgagcaggggaggtcgaggctgcagtgagccatgatcgcgccactgcactccagcctaggtgacagagcgagatcctgtctcaaaaataaataaacaaataaataataaaataaaaatcagctgttggttcaactcaactttcttaattttgtttatgaatgtctgcctttatcttaatgttcaggattatttatttatttgagaccgggtttcgctctgtcgcccaggctggagtgcagtggcgtggtctcggctcactgcagtctcctcctcccgggctcaagggatcatcccacctcagccccccaagtagctgggattacaggcgcgcgccaccacgcccggctgatttttgtatttttttgtagaggaagggtctcgcttttttgcccaggctggtcttgaactcctggactcaagcgatccgcctgcctcggcctcccaaggtgctgggatttcggccgtgagccaccgcgcccggcctaatcatgttcgggctttcttattttctaatcaatgtatttaaggcgatacattttcctcagagtgtcgctttgactgcatgccacaatgtgaataatgacaggcagggatgtatattaggcgcttatcacagttagtgctgaatattggttagttccctttaaccttatcctgtacttggccgacaagcatgtgttgggcgtccgcccgacgccaagaagctctttttcaaagccgctttccctgcgcagcccctgttctcccgcgcgggcaactactcccggcctggccgtcacgccccctcacgtcactcaccgccccgccacgttctcatgacaccacgcaggtgccagcaacgaactccagaaccctccgtgcccttccgcttttccaaaggcatctctgggacgacggcaagaaaaatagttccttgacaactgagctcttttcaggaggaggcgggaccaggcgggacttacaggcggaacgaaacggaagtccgtggtccttgtaacgggattgggccccgcgctcccggggggcgggctcagatgggcggagggattcattttaagcaacgggcggccctccgcctccattgaaggcggggaaataccgcggcgcggacggtagttgctgtggtttccgttctgagctcgcagcttaggagctgaagatcgcggacttagcgttgccgcgtccgagtccggccatcagtggctgcagatccggaggccaggagctcaaccacccttcttcggaacagggccggcctgctgctgtgcc

SEQ ID NO: 16196 - DNA, 2300 bp, Homo sapien
aatgttcgtgtagcctcaaggtacttcaagggaccagagctcctcgtggactatcaggtaaacttgttagcagagctattctgggttatttatacttgcttagggcttttctggtttgctgttgatctagtcagtttgaatacactcaaaacccagccattatttcaccctaaaatgctgattttagttttttctcagctagttttttggggggacagagaagtttttaaatctaaaatatctgcaaaggttaaatgaagactagaaattcagatcatttctaggagccaggaagttaaaaaaaattttttttaaataaattatctatggccataccaccctgaacacgcccaatctcgtctaaaaaagaaatttatatcagaaaaatggatttctaatacccttggctaatgcgttgtccttattgcctcagatgtatgattatagcttggacatgtggagtttgggctgtatgttagcaagcatgatctttcgaagggaaccattcttccatggacaggacaactatgaccaggtgagcaaatgctttctggttcttatttatttgggggtgaatgccaaaaaaatagcatccttagataagaatactatccttgagccactaagtatcactcagtgtctgcatatgagcttttcttcaagataaagatcgcacagaattttgtgtttaccaggtccgcagaagtagaggcagataatgccatctatgccaaacttccaaagtgaatctgtgaagaagtcaggcacctccttgtctaataaaactagattttagtcattagattgtgatgccctgtactggtccacctctagaagattattatcgtaagttgtattattttaaaggccgtttggaaatttgcattcatgtgaacttcttgtccttgggtctgtctgcctgccctggacctgggtttgtatctcgttcctagaggtttagtggtgtggaagtcttctgattccttggtgcagtgtcctcacgggctcatggtgtgttctgtgctcagtgatttggtcagtttgttttgtgtttcagcttgttcgcattgccaaggttctgggtacagaagaactgtatgggtatctgaagaagtatcacatagacctagatccacacttcaacgatatcctgggacagtaagtaagagagagagagagagtgctttaccttaccccgtttcagaagtggaaaggttagccaaaatcactttcttttcccattctgattatagtaaaatggaagtagccctcttttttcctatgcatattttcttttaacttattgagatatttggactttatgtcttttaatcattttacttctctgagagataacctattaatagaaaaggtaaaacaaaaatcataatgttatagaaaaaagttttctggtacagcaaaagcttatttttaatggccaaacttggagagcaatgattctttgaataagagacttagtttgttttttattatattttattttatttacttcatatctcttcaaggtggacttacaatttcttcttgttctctgtaatggattttctatacaatagcaaattttaaagcacattgagttttcaggtacattgcaataatgttgagaagtaaacattttgttaacagttttcaaacagtattttatggaacctccctgtttctgaggctagccctgggaaatatatctgctgaccaataaaaattgcccactcttctgcatgccacccagaattgactaaaagtctacagcataaaaaataatctagaaaggttccacatattctaaatgagatatagaagttttacctagttgtatttttctaatcacagagcaccattgtgtttcaggatgctatgctgtaactatggggccgtagggcaggcaccagttagagatttaacaagcttgtaatcagtacattattctgagattttgttggctttagccctagtagataaggattcttgttgaatttagtctctggttactaatgcttcatttttcttctcagacattcacggaaacgctgggaaaactttatccatagtgagaacagacaccttgtcagccctgaggccctagatcttctggacaaacttctgcgatacgaccatcaacagagactgactgccaaagaggccatggagcacccatacttctgtgagtctccagggactgtgttcagggagtaattcagtcaagagaacaaatcttccactctttgtctttgagaccagtcaggagaattctagggtatttggattggattattcctaga

SEQ ID NO: 16197 - DNA, 2300 bp, Homo sapien
ttaagctgagacttgagctggaggcatgcctgtagtcccaactcctcaggaggctggggtgggaagatcgtttgagcccaggagttctgggctgtagtgtgcaatgccaatcaggtgtccacactaagtttggcatcaactatgatgacctcctggggctggaggaccaccaggttgccaggtggcaaacagcaggtcaaaactcctgttcggatcagtagtgggatcatgcctgtgaatagccactgcactccagcctgggcaatatagagacaccctatttctaaaaaaatactactaataaagaaaaaggtgaaatttgaataggaaaaaggagacacccttgggaaggtggggtggaggggttgggggtggctcctagttaagcttggaggatagaaggaaccaaaagacggatgcacggtggtctcagggagggaggaatgagcagagaaaggccctaggcctggaaataatcatattgaacacatgctatcctaatagtgaacaccatcctaagtgtttcacatggtttaccttgtttaattctccttgcagccctgtgaagtgagcgttattactggttttatgctgtagaatctgtgacacagagaggttgagtaattgccctaaggtcacacagcttctaagtagcagtgctggatagatctgactccacagactgtgctcttagctgtgtcaagcaggaaggcccagggtttcatccagaaaacagaatgtgaaaagggactggaatgaaagcaacctgtactgggtgcagaggtgctgtcgataaaggatgagggatgggaaaggaagacagaagaaaggcctagaagatcaaaggagaagggtgttcaaggctgcaggcagcactggaagccaggccagctcagttgaccacctactctgggcacatccccaacccagcctgtcccttcaggtcggatttgcaattctcctgctctccctcctcctaaacacaaacaggagatttacactctcaaagtctctccccacaaatgacttattaatcacaaagggaaaaattgtaactttgcagtggcacaacctggtcaatgccagcttaaccaagtgaccaaagtggatattcagggaaggctctggaagggcatttgggggaagtgtagaaaggttttgtgaggagcactctgaatgacgggggtaggaagccttggggactgaggagtctaccctaacagggcagggtccagagggggaaggaggggtatgtctcgggggaagggagaagtattgaggtgggggaggttctgaggtttgagtgaggccctggggagggacttgacagtttgggtgacaggagggtcagaatagggtcagtatgggatgtgttgggtgggtaaaagctgggtgagtgcagggctggggatagggtctccaaggacagtgaaagggtcgggagtcgcgggcgagggctctagggcaacggccagtggaagggggggctcctgtggcgtgaagtcaagccagcccgagggtgaggcgatttggacagtccgacctgtggcggcgggagggcgagggtggcggagggcgcgaggtaggcggcggggcgtgccggggcggggccggggcggggccggcaccgcccggcgggtccccccgcgctccagggggcgctgtgagcctgggcggccccaggccgggcggcggccgctcccagtgagcgcggccccttttccgggtttcctccgcctcctcctcctctcctccttcttctccgctgccgccgccgctgcccctttcccggccggtggctgccgctgccggtgccgccgccgccgcctcctgggggccgcgagccgagcggagaccgccgcggagcgcgagcgccgcccgccccgccgccccgccggccgctccagggccgggccggctcggccggcgccccccgcgcccccagcccgcccgcccccgcgggcccggcctggcgcggccgcccgccgccgcgctcctcctcctcctcctccagcgcccggcggcccgctgcctcctccgcccgacgccccgcgtcccccgccgcgccgccgccgccaccctctgcgccccgcgccgccccccggtcccgcccgccatgcccggcccggccgcgggcagcagggcccgggtctacgccgaggtgaacagtctgaggagccgcgagtactgggactacgaggctcacgtcccgagctgggggtaaagccgtcgccgccccccgccgggcccgctgatccctgcccccgcccggccaccccctgcgaaccgcactcgggccc

SEQ ID NO: 16198 - DNA, 2300 bp, Homo sapien
gtaaaaataaactctcccttccaaaaaaaaaaaagaacagagtttccaattagatgtgtcccctggggccatttctctctccacacaaaatagatgaccagccacaccaccactcacaactctgccagttgggaagctttccctctctactgtctttcactacctttcgtgaagtggttgtaatgcagccactgtccatttttggcttccaagccagcccatctgtaaactgagctcaagcctttgccttctcttccaggtggtcatgaactccccaagcccctgcaaatatagtgataaatttgagctgggggagggatcctggtgcaaatgtggtgggtgccatgttggtctgggctacctgctcatgcagcttactcatgctttctggtcctgctggagcccaatgctggattaaccatttccatttgcaatggactgaggctgggcctgtcctgcttaataactcagctggtagagggcaggactggatgcatggtcacttggtaccccatatatccagcgttctgtctctaccagggtatagtaacaggccaggagttatttctcaaaagacacgtaattctctgctgtggattgtatggtcttgtttcagaatcctgggtcctttattgtgattctcctgctgggtcttgctttaagattcctgctgcatcttttttcaccactgacacccccaatgccatagagtctgttgtatcacacagcccagttggcagggctgtttgcatcatagcctcgaattgctacagagcccattcttgctctgggttcacttggagctggcatctatttatgtcacctggggatagcatccatttgtgtcaccttgtatatggacatattaagtattgctaaatgtggtctgcattgtccctagaacctaaagaggcctaccaccagagagaaggtggtagggctccagctctctgctgtcatctccagtgattctattctggccccaaccttgtgcaccctgagcagcaaaacaaaaaccctccctcagatccagggagtgcctgtcaatgctaatgcatgccccttgcaggggaagggggctgacccgctccccaagcacttcatcacagcttgctttctaagcacatccagagttcaccctccctaggagaagtctccccgtcctgccctctgtcctctttcatccccatggggagcagagagagagctcctgtgttgcctccctgatccttaccatgtcccacatcagcgtagaagttaacagcatggactttgggttccaccggagcttgattccattcttgagtggaatggaacctaagctactccattccttggttttctgatctgtaagatgacggcaataataccaactgtaccagattgttttgaggatttaaggagatgactacgatgcacagtgtgacgcatgatgttgctgtcatcaccccaggttccagcggcttgtttagaggctgtttcactcatttaattggaagctccttgaagatcagaatggtcttttccagacattccccctaggatactaaggacacagtagatattcagtaactatttagggatgtctcttgaatgtatacccatttttatcagccacgtttttttccttccagaaatgcaggatgttaatatctgagaggagctgctgttagcatgtaggaagcaccaggtggtgaacagagcaggggcctcccagtgggacaggggaagaaggacactatgataaatcgtgttaattttctaggccccagtttccttattgggagaatggagagattgatagataccattacaaggttgtggcgaaggttttcataaactatgcttaacacgctgccaaggacacagtaagggctgagaaacagcagctgctattattactatcaatttaagagttattgttaaagaagtgaaactgaacgcgcttaggtgtgcgctcaaagccagcaacctggctgggtccgcacggagacaggcggggcagcgcggggaggggccaccggaagccccacccctttcctcgcgtccggtcgcccgggcaacgcgccaccgcgtcgcagccggagtgacgcgtggccgccggcacccggagctcctgggcacacggcattggcaggggccgcttcggcagagtgatgactgatgatgagtccgagagcgtcctctccgactcccatgaagggtcggagctggagctgcctgttatccagctgtgcgggctggtggaggagctcaggtaccgccgcccgcgcctgggggccgcccctcttcctcctagg

SEQ ID NO: 16199 - DNA, 2300 bp, Homo sapien
aaaaaaaattaggaaaataacacaaactcaaagaaggtagaagaaaacagacaataaaagataagggcagaaaataataaactagaaaactaagtacaaagagaagttcaacaaagaaatttatactttgatatgtgctggagtcacattggagacttgtgacaaatgatgctggcataactaagtatccacaccatgcacaaaaaatgaatccatacagttgaggacttacatgtgaaaaacaagacttcaagggtttgagaagaagatagagtagactagatctctgatgctgagctacggaagaatttcttaaacaagacacaaagagtcctaactgaataagatgaatacatgtgagttcatgaaaattaagacttctggtcttaagtggagacagggtttcaccgtgttagccaggatggtctcgatctcctgacctcgtgatccgcctgtctcggcctcccaaagtgctgggattacaggtgagagccaccgtgcccggctggatacgggtattaagcaaagaacaactgaatgagaaacacattctgggccaccacgttctcacctggaaagctcaggaaatgcctttgtcctgccagggtgactggggattgtgagggaggaaacatatggtaatgaaagctctttgagggccgggtgcagtggctcatatctatataatggctaatgctttgggaggtttaggtgggaggatcacttgagcccaagagttcgagaccagcgtgggcaacacagtgagaccccatctcttcaaaaaaatataatatgaaaaattagccagacttggtggcacaggcctgtagttccagctacttgggaggctgaggctggaggatcacttgagcccaggagttcgaggctgcagtgagctgtgattgcaccactgtactctagcctggacaacagagcaagaacttgtctctaaaaacaataaaaaataaaaatttaaaatacagctttttgatacctgtgatgtggaacaaattaaagaatcaactcgcacttctcccactgccaaaaattttctgttcttgtagcagaagccaatacccccgcccccctgcccagggttaaaggtgagggagggtggtgaagccggcaggacatcaggggaaccatgggggaaggaggtagcggctccctttggactcaggcctcactttattattattattattattttgagacaggctgtcactctgtcgcccaagctgtagtgcagtggtgcgatctcagctcactgcaacctccacctcagcttcccgagtacctgggactataggtgtgtgccaccacgcctggctaaatttttgtatttttggtaaaagacagggtctcaccatgttacccagtctggcctcaaactcctgagctcaagcaatttgcctgcctcggcttcgcaaagtgctgggattataggcgtgagccaccgtgcccagccagtttccactttctcaccagccttcctgccttccatcagccattcatctacccatccagtaaggatcttctgagcgtctgcaccagaggcctgtgcgcccaccctccccctgtggctccgtggaattaacatcttacctcaaccttgtcgacacttctcgagtcctggcatttgggctgaaaccaaagctgctcacagtggctggagtggcagatcccatctgggcctctggtttggcagagctggtctggtagcttagattggacccggaaactgagaggctaaagaaaactgggctaagtctgaaagaaaccaccctgggagtgtaagatgctgacggggactggaaattccaaacccaccccagttgtgggcttcctcagtccagtctgacaagcatgtgtggacacagggcgggcgctgagtggggtagacagaccgtggccacgaccagagaagactttgtaatccagcaaaaagcttgccttctcagactaggagagagcctggcttccagaagagccctgccaaggctaagcaacaaggaggcctttcatcctagctcctcgtaagtccccatgtccagacagttgcttggtggtgccatggtaaccgtgatgccacaatggaacattcttcccaaggcagtagaagaaatccttctgttgaactctactgtgtcaggccagcctgagttcatttctccttgagcaggaacagttcatggacgaactctgaggaccattctgaggacaagaggcatccagtgtcatgagtggaacatggtgacttagaactgtgcacatgggttccttgggcttctgtgcattgc

SEQ ID NO: 16200 - DNA, 2300 bp, Homo sapien
atagcttactctccttggcagtaaataacattgccttcaattagccaaattatatttctgtctcaaactacatccagtaccatatattccatgtcatcagagaaattctaaattatcactgcagattgtgtttatttttacattggactgtatcacaaactgaacatttaaaatatgaaaaaggaaaaaaccttcatataactgcctctcagtgtgcctcctctctaaagcttctaggctgctttctccactgggctgcagaccttcctgtctagtagctcttggacaccatgtgtcccaaactgaactcatcccttccctccagctgcccctattcctgtgttctgtgtatctattcatgacatgtccatccacctggtcagccacgttcaaaacttgaatcttttgactactcactatacttcacttcctatatccaattggttgccaaatactgcccactgaacagcttccaagcatctaatctctctcttctttatctactgctggaattctcttcctgaagcccagatttatgttattatttgccttacattttcctcccattttctatggaatggcctaactccttagaatggtaccaagattttccacagtttggccattcctttccaccccactgcaccttgttttcattgtcctcagaatttcatttataaaggtgactgggtgatgacaatcaatgagttagtggccaatgcctttgaaaattttattatagttctcaagagaaggggctgtgcctacggccacacgagaaagtattagggtcaatgaggaggtagagagagcgaggagaaagcccagagcctttattgccgtgggaaggaatgggcgaagcagggaagggaagtctgaacaagcttaggattgaataatttgaataatgttggcaagctctgggatatagaggtgaattttagttgtctggtacttggccatggggtggtttattacagtgacttggggcagggaaaatattggtgtgtgagatggataaagatggtgtggggatataggcttgggttggttggtttgtaaatgaaaggggtgttcacaagcaagttgtttgctatctctaggaattagctaactctgaaaggggcaattcctccccaggtccccaaggccccaagatgtcaaagcatcataaaatacagaaaacagaaactaaaatccatggttaatacacacctcccttcacacacaccctttactcccggctccagtagccccagaaatgctctagacgaagtaagttctgtagtgcatctctcaacaatatgccgccacccatagccctggctgaggagagccaccaaacctggtactatgcgaccatggtccttcccctggtcactggatagtgatcgcacccaacacaggcacccccatctacagggtggctggagatctatgaccattgtggcgtacctggaccaatcaataaactggaccaattggatttccatttttagggatttaaattcagagccacaaaaggagattgtcagttgatgatgagctaagacaccctgaagtatactcacaaccttagcaagccatgtgcagtctagtgctccacccctctacccaccccgtccaacccccaccaaaatactaacaaaatacaacacactagttcatcatctagaccataataactcgctggggatagtgctggaagtttttgtttgtttaacatttctttcaaatactaagattaacggagttgcatagtgaaaaaaactgtaggaaagggtcggacttaggcctggagtgaagggcacaagatgcttttattttaaacccctaaaagtgttgcaaagtgtttttaatttcatataaatagttaaggatcacatgaacacaatccagtacaaatgggtccaggagcttcaacgagcgttccagcttcttcgtaacgttcccacaccgtgcagcaagcggagggaagagaacttccggcgcccccacctaccgctccccagccgtgtcccgctgctctaaatctgcagacttgatcgattgcttctgcctgggcggtaccgcccgaattgactgctcctgtctgatgcgtccccgggcgcgggaaacgagtttcaatccactttcctgaccccaaccatcctgcccagtctccgcttccccgtcttgtacacccctaactcctgaggctcctccgaatcacgcgagtggaagcggagaagctcaagtggccgccatgtcagaggcttatttccgagtggagtcgggtgcgctggggcctgaggagaact

SEQ ID NO: 16201 - DNA, 2300 bp, Homo sapien
atttttagtagagatggggtttcaccatgttggccaggctggtcttgaactcctgacctcaggtgatccacccacctcggcccccaaatgtgctgggattacaggcatgagccaccgcgcccggccctactgtctccacttttaggagttcaaatccacaacctgactcactggaatgctcacaggagttcatgaactatctgagctacatggatagtctgcatgagttcaaggccactgcagacaccatgtctcagacaggcgtgtcatagtgtcaaagctcctgttaggcagcctgcagaacagcctaggccccgtgaattatgtcactagaacatcaacaattaattttgtccaatgacaaagtctgaaatgactgaaaagggtaggactcaggtaagcctgaaagaatctctcatgcgataataacaatttcatcatgaataataataatgaccatgtattgaacacttaaacttaagtcatgcgtctggcactatattaagcattttctttatattctgttatttaatctttacaggaatcctgaggtcagcatcatcccaatttcacagagtatgacatgacgtctcagagagggtaagcagcttgccaaacattccacagccaggaagctgtaggaccagcctgtgctcctaaggactggctcctggctgctatatatagaactaagcctggtggaggtgtcagaaatagaggttcacttctgtcatcaccgacctccctccacacctttgcaaaggaggaaactgagaggcagggatttccgcagagcaaggaacccaaattgctgcctcctgtgatttatacactgcaccccaagctgtaggggtaacccaaggacaaagctgtaacccaagcgggaacatatgccccatctggggccaccaaaatcttaccagcttcctcagctggtggatcggttaattcacggccacagccccctggagctgggggaaaggaaaaccagggcgtctccgcaaaccagcccagagagaggtctgcggaagggcccggaagcctgcaggcccctctgcacccccaaccccaccgccatcctggacctccaagatgacctggtccaacagagtcctgcatggaaaagactggaacccagggaggagcagagccccgcccaaggtcaccggccgagcctgaatagaacccggttctccaggagccctgtctttagctgtcttgtccaaataaaatttttcaggccatcagatttccgtactccctggagtgggacttcatctgggaccaaaggagggctggtgaggggagtggcaggagggaggagtgcctcggggccccgagcaggatgagcctgaggaagagacgggtccccatgttccctttcccgctcagataatggaggtgaattgaggggagcagagacctccccaccttcagggtgggaccctgagggaccaggacacctttgctaggggatgtccctcctcactcctgcacaagttcctcaaggacaccctcgggctccgaaaacggggggagggggacgacgccccagaggcccctgagcccctggttcttcccgaccctaagggcttttctccctcggttcccaggcggcgacggcgggtagcgcgaagcagcaggcgcaggggcgctgggatggggatgtctctgcaggtctaaggttccccttgggagtctaaacaaagactacggcagcgccgtcccctcccccgggaacccgacgccgcgcggccacagggggcctggaggggcgggcagggcctcgcagcgcacccagcacagtccgcgcggcggagcgggtgagaagtcggcgggggcgcggatcgaccggggtgtcccccaggctccgcgtcgcggtccccgctcgccctcccgcccgcccaccgggcaccccagccgcgcagaaggcggaagccacgcgcgagggaccgcggtccgtccgggactagccccaggcccggcaccgccccgcgggccgagcgcccacacccgccaaacccacgcgggcacgcccccgcggcgcaccgcccccagcccggcctccgcccctgcagccgcgggcacgcggaggggctcctggctgcccgcacctgcacccgcgcgtcggcggcgccgaagccccgctccccgcctgcgcgtctgtctcgtccgcatctccgcggtgagtcggcggcgccctcgcccctgagcccagggccagcttctctcgccgccgcggctgctgcgcgcgtccccgcccagcccagcccagccccgagcacgaccccagccccacg

SEQ ID NO: 16202 - DNA, 2300 bp, Homo sapien
gtctcagagagggtaagcagcttgccaaacattccacagccaggaagctgtaggaccagcctgtgctcctaaggactggctcctggctgctatatatagaactaagcctggtggaggtgtcagaaatagaggttcacttctgtcatcaccgacctccctccacacctttgcaaaggaggaaactgagaggcagggatttccgcagagcaaggaacccaaattgctgcctcctgtgatttatacactgcaccccaagctgtaggggtaacccaaggacaaagctgtaacccaagcgggaacatatgccccatctggggccaccaaaatcttaccagcttcctcagctggtggatcggttaattcacggccacagccccctggagctgggggaaaggaaaaccagggcgtctccgcaaaccagcccagagagaggtctgcggaagggcccggaagcctgcaggcccctctgcacccccaaccccaccgccatcctggacctccaagatgacctggtccaacagagtcctgcatggaaaagactggaacccagggaggagcagagccccgcccaaggtcaccggccgagcctgaatagaacccggttctccaggagccctgtctttagctgtcttgtccaaataaaatttttcaggccatcagatttccgtactccctggagtgggacttcatctgggaccaaaggagggctggtgaggggagtggcaggagggaggagtgcctcggggccccgagcaggatgagcctgaggaagagacgggtccccatgttccctttcccgctcagataatggaggtgaattgaggggagcagagacctccccaccttcagggtgggaccctgagggaccaggacacctttgctaggggatgtccctcctcactcctgcacaagttcctcaaggacaccctcgggctccgaaaacggggggagggggacgacgccccagaggcccctgagcccctggttcttcccgaccctaagggcttttctccctcggttcccaggcggcgacggcgggtagcgcgaagcagcaggcgcaggggcgctgggatggggatgtctctgcaggtctaaggttccccttgggagtctaaacaaagactacggcagcgccgtcccctcccccgggaacccgacgccgcgcggccacagggggcctggaggggcgggcagggcctcgcagcgcacccagcacagtccgcgcggcggagcgggtgagaagtcggcgggggcgcggatcgaccggggtgtcccccaggctccgcgtcgcggtccccgctcgccctcccgcccgcccaccgggcaccccagccgcgcagaaggcggaagccacgcgcgagggaccgcggtccgtccgggactagccccaggcccggcaccgccccgcgggccgagcgcccacacccgccaaacccacgcgggcacgcccccgcggcgcaccgcccccagcccggcctccgcccctgcagccgcgggcacgcggaggggctcctggctgcccgcacctgcacccgcgcgtcggcggcgccgaagccccgctccccgcctgcgcgtctgtctcgtccgcatctccgcggtgagtcggcggcgccctcgcccctgagcccagggccagcttctctcgccgccgcggctgctgcgcgcgtccccgcccagcccagcccagccccgagcacgaccccagccccacgcacgaccctagccccgcgagtcccgcaccgactcgctcccgccccatttcgcctccgcgggggcggcgccccctcctccccgcggctcccgctctccttcctcgccttcccggccgcgctggggacccccagccgccgtccgcgaccccccaccgcgacgcccggaggcggcggggtctctttgttcgggcggcgggcacgggggaccacctcccacggtgtcaccgcacccaccccgcgcccttcctccgcctcctggagttcaccgggaccaggtggcggcgggtgcctttttgggggtgcgcggccatgcaattggtggatttttttaaaccgttttggaggggggagcgcggcgttgggggcgggagagcgctcctggctgtgagctgctcctgccgcttcgctccgcgctctcctgccgctccgctccgggtctcccgcgctcctctccccggctcggccgagcgcgctgccccgacgccgccacccagagccgggccgcgccgggcgccgagatgaaggtgctgggacaccggctggagctgctcacaggtaccgcccgcctgccccgcagccggccgccac

SEQ ID NO: 16203 - DNA, 2300 bp, Homo sapien
agcgggagagccttgaggatgcctttctaaaaatacagcccatctgcattgtgttagctggtttcctcggaaaccactgggagccgggactccagcatggcacgtgcacagggacccaggcctgctttttcatttattgtaacaggaattttcccattatattaaataatattttattattgacacacagtttatcttgtaccctattgatggacattttcttccaatttttttctgtgttataaatggcactgtggtaagaattcttatagataaattatttgttgccatctctggtttccttaggcaatttctccacgggagaggattgctgagtctgagagtatgaaccttttaaatagttttaattcatttgtaaaactgccctccagaaagatatgtccatttatatacttacaagccatataagaaggtgcctgtttcagtgcaccttcgctagcggtgtaaactttgccaatgccattggcaaaaaaagaaagagctatccattcattcattcatttgagacacggtcttgctctgtcactcaggctggagtgcagtggtgcaatcatagctccctgtagccttgaactcctggtctcaagtgatcctcccacctcagcctcctgagtagctgggaccacaggctctcaccaccacacccagctactttatttttttcgtagagatggggccttgctatgttgtccaggttggtcctgaacctctgggctcaagcactcctccggcctcagcctctcaaaatgctgggattataggcatgagccactgtgcctggccaaaaaaaaaaaaagtatcttaatttaaatttctttgacttctagtgagcttgaatatttttccatgtatgtactggccaatttaaattcttttatgaatttctagattatgtccttggctagtttttctcttggtgcattctgacctctgccatcctgaagttgagggatggtggtgccattcctagaggaattgtggggtcctgggaccctctgtcttccttccctcaccactggctcctacacacacacacacacacacacacacacacacacacacacacacacacacgcctgcatgtatgacccattcttcctctgaggttcagaaacccctggggtttcccagcaattagggcccgggcccaccctctggcagctgagcagcccctgtgtatcacccctccctgttggtggcctgaactgagacctgcaccccctctttcaacatcactcggcctgccacaccaccagggcctctactcccacccacccctccctggcccatcttcacagaggcttgtcctgggagccctctggggagctctcagctctgttcctctccagtctctctatcctccagaaccccactgtccccttcagacaccagaggccctcggcaggggacttctgtctgcgtctgaccctgtgtttggcctccctgcacgtgcccttctgtttctcaataaaggcagaatgttgcatgtaattgttttaggaatcatgacgttgcttttctgttttatttggaaacgttttaatttttaagagcaaataataggctgggcatggtggctcacacctgaaatctcaacactttgggagaccaagacgggtggatcacttgaggtcaggagtttgagaccaggctgaccaccatggtgaaaccccgtctttactaaaaaacacaaaaattagcaaggtggtggtgtgcacctgtaatcccagctacttgggaggctgaggaaggagaatcacttgaactcaggaggcgaaggttgcagcgagccaagattacgccactgcactccagcctgggtgacagagtgagactccgtgtaaaaaaaaaaaaaagaaaaacggaaaaacaaatactataatggtatcccccaagccagacaggcgggtcttgcagacggaggcctgggggccctaagtgcctgagtgggctgcgcttgggggccagggggacagtgcatctggtttccgcgctcccgccccagccccgacttgcgctgtccttctccgcccgggcgtccccgccgcagcaggcctcaacctcgccctccctccctaggcctcctgctccacgacgtgaccatggccgggctgcaggagctgcgattccctgaggagaagccgctgctccggggccaggacgccaccgagctggtgagttggagtcgcgcctttgaggtcttagggccgagcgcgccacctcgtggccaagagggagaccgcgtgcctttcctgcagccgaccctccctagggccagc

SEQ ID NO: 16204 - DNA, 2300 bp, Homo sapien
tgagcagtcatggaggctgtggcttggagtgggcagtgtcgcaggtcagcttgtcacctgggtccaaaggtggggagaggccactcaggggtcagaggttggagtgggcgtaggattgggtggggccttgggggacatgggagggcattgtgggcagagggcagggctgtgcctcagttttccaagcctcttcctgtgccacagtgcctgcaggaatggggagcatggccaggaggtgacgggccagggggactccccattctacttcctgctgccctggggagcacagggcctgtcagtcttccctaggcctccagagtaagaggtgagagatggaataggtgcccccaggcagaggacatgaccagcaatagtgtacatagcaggtgtcgaccaggtcagcaggtacccagagatgaagagatgaccactttctccaagggcagccagtcagcatgcagggccatcagcatgggctggggtgagtggcgtgttccttcttcagcaagacagggagaggaagccggataggaggcagctactgacgttgacatgcccacctcctgtagacccacccggcccttgttcctggaggcaaccagtttggggcttggctctcgggtatctggggagcaggacactagggctatctcaggctctgtgccctgaccccacccttgcccaggccctggcaggagagaaatggggcagtctgtgtgcctctccaaactgttggccccttttctggcagttgtgcagttatcgtggccagacaaggcagggtcaggtcttgccagccaaaccctgatcccactcataggtctgccacttctttgctgtgtgaccttgggcaagtcagtcaacctctctgagcctccatatataaatgggagaaacagcagtgcctactgcacaggcagttgcaacgataatacatataatcttcatggatttgggagcataggcacgcagcagcccccttctctctgtggctcctgctctcccagccttgggccccctcctctgcttccctctctggcctatttcctctcctcctgtgcacttcttggcctttcttctcctctgctcactccacctgcaggcctcgggcgagctcgccacccagatccttgctgcccaggagaacagggcacggagcctgagatagacctagtgttctgctccccagagacccgagagccaagccccaaactggttgcctctgggaacgagggccgggtgggtctacaggaggtgggcatgtcaatgtcagcaagctgcctcctagccccgcttcctctccctggtggtctggagcccctggcagcagggtgagggtggggagggcagagctggtgtgtgcctgaccatacccctggccctgctatctgcccagggcccctggcccccggcccccaaactccattttcagcatgtggggaaaccccctgtatctgcgtgggcaaggtgggattttcatccctggtgggtggagaaggagcagccccttgaagcagggtgataacccaagttgccccagaaagcagcagctccccaggcctccacaaggttaagcgatggaaccttcctaatgggaaggctgggcgtgggggtctggtccccaagatgttgggcttggggccctctcgggccctccatactccccaaggtgtgggtcaagggctctagctgtctgggcagtgcccatgcaccctgccctgccccgcattggtaagctgtgcatgtctgtgacgaccctgtgtgtacctgacatgggtgagtctgtacgtgtggtctcggcttttgtattcggaggatcccgtgtgagctgcagctgttggcgtgtgcctatgtgctgggggcggatgcaggggctggggaccatcaaggatgatgtgtggctggggtgggaggagcagtgacagggctggggcaaggaggacttcagaagccaattggagccaggcttgtctcccagcagccaatatgggagctggggctcctggtaagcgagtggctgctcagaaaccctgcggggaggaggggctagctaggctgggccaggatccctgtataaatggcccaggagctgtgccccatcacagagccgaccatctcccactcgagctgcccccgccctctggacccgagtgactcaggcctttgtttgtccttcctggtagaggcgggttccctccctcggcaagatgccggagtgctgggatggggtgagtgagggcgctgcgggcatcaaggtgggccgggaggatggtgcatccttatgacccaccgcagggagg

SEQ ID NO: 16205 - DNA, 2300 bp, Homo sapien
gggcgagctcgccacccagatccttgctgcccaggagaacagggcacggagcctgagatagacctagtgttctgctccccagagacccgagagccaagccccaaactggttgcctctgggaacgagggccgggtgggtctacaggaggtgggcatgtcaatgtcagcaagctgcctcctagccccgcttcctctccctggtggtctggagcccctggcagcagggtgagggtggggagggcagagctggtgtgtgcctgaccatacccctggccctgctatctgcccagggcccctggcccccggcccccaaactccattttcagcatgtggggaaaccccctgtatctgcgtgggcaaggtgggattttcatccctggtgggtggagaaggagcagccccttgaagcagggtgataacccaagttgccccagaaagcagcagctccccaggcctccacaaggttaagcgatggaaccttcctaatgggaaggctgggcgtgggggtctggtccccaagatgttgggcttggggccctctcgggccctccatactccccaaggtgtgggtcaagggctctagctgtctgggcagtgcccatgcaccctgccctgccccgcattggtaagctgtgcatgtctgtgacgaccctgtgtgtacctgacatgggtgagtctgtacgtgtggtctcggcttttgtattcggaggatcccgtgtgagctgcagctgttggcgtgtgcctatgtgctgggggcggatgcaggggctggggaccatcaaggatgatgtgtggctggggtgggaggagcagtgacagggctggggcaaggaggacttcagaagccaattggagccaggcttgtctcccagcagccaatatgggagctggggctcctggtaagcgagtggctgctcagaaaccctgcggggaggaggggctagctaggctgggccaggatccctgtataaatggcccaggagctgtgccccatcacagagccgaccatctcccactcgagctgcccccgccctctggacccgagtgactcaggcctttgtttgtccttcctggtagaggcgggttccctccctcggcaagatgccggagtgctgggatggggtgagtgagggcgctgcgggcatcaaggtgggccgggaggatggtgcatccttatgacccaccgcagggaggaagtgcccccctcaacccacatctggtggcagcccggccttcaaatagcctcaccctggggtcactgagacacggccagagtgctccaggttccctggtgatcctgtttgcaggagtggctgggggcagctgctagtcagagcccatagcaggggctggggggagcgtgtggttggggggtgggtgacatatctgcaggaaatggaacgtggaaggcactgtctgacttggctgcattgcccgtgtggacccgggcgctagtgcctgcatgtccctctgaccgtgtgccctctggtgtgcgcttggatggtgtctgccttggtgatgcctggggccatcaggccagggggcgggggtgtccttggtgagcccccgaggctgtgtgcccagtgtgcgtgccgggtctgtgcgtgcaggggctgccgtcccagtgggcggccgtctagcttgtttggatggctgcgccagtgtgatgggaaggacaggcggcctcttccttaggagccacctcacagttcccagggctctgctgcgccagccgggcagaggcaaggaggtctgggccacacaggaatgacagcctttcaggcaggggtccctgctggggaggaacgaggaggggttgcctgcctgccttattttgtaggtgggggaaggcaacgctggagccgtgaagctggcagggctaggggaccccaggtggagcccagggcacctcctctcgccggggcatcaggtaccccggccccattcttcctcaggagggagaggcaggggcagactcacccccacccccgggccccacacgcctgccctgccggttccgcagacgataggtcaccccgcacgcacggaggtgacgacgtcagcacctgcccgcccatgcagaccctgtcccctgaattattgatgcggctgacaggccgaaccacagcaccaccagcaccaactcccacaccggcgcaaagcccggctcaaagccccactcccctccagtgctcaaggtcacaggcgaggggagacggaccgaccgagaggagccgccacagccccctcccctgctgccgcagtgcttcccgcctgcgcctacctggaggcggggccggc

SEQ ID NO: 16206 - DNA, 2300 bp, Homo sapien
caaaggaacagcgagaagggcattctcccaaggctcagggatgccctagcataacagccccctttctggggctttctccaagtgctaaatgctccacaaacattggcttgtctagttcccgcaaagtccctgtgaggtggttctggatggagaggctgaggcacagcagagaagtaacatgacatgctcagtcacaagtaaggggtagaaccaggtcttcctgaggaagtaatgaccttgagcagcaaaaccaaaggtgtgaactcaagaggatcccagagcaggctctgcagaaggcctctagaggggatggggaggggggtctgacccgggcctgcctgaagggagcccttgaggatgctgggctcacacagaagggcgttcaaggtggaaggaaccacatgcgcaagagccttagagtgggagccaggggcagtgccggggtcggggctaggcttggctggcacggggtgttttctgaggattccaggcaggaccactgaggccgttcccctgcagcagcaggaagtgcctgagagttctgagtgtgagagggacttgggctggggaggcagagctgtccaggaggggctgctgcaagatggagaaaaacagcctccctggaccctcaagggcggaggacagtgacagcacaaaccagtggctggtttgcagagaggaccagaccttccccatgcagatcagttcacattgtctctgtactgaacagccctgagaaggggtgttccatccattcagtcctctctgggggcttcttggggtgatgagaacaggatgccccaagtaggggctctaccacaggcctaacaggtaccaggctgcgtcacctcattccccagaggagccaagagcggaggctgcccagagtgtccagcacggtctctccccttcaggaacatgacatcgagacaccctacggccttctgcatgtagtgatccggggctcccccaaggggaaccgcccagccatcctcacctaccatgatgtgggcctcaaccgtaagtgcagcccagcctcagtcagccctcctctgcctcccatcagccagagcggtgaggccccccaccctccccacagggccctgtcagccccactcacactcacctctgttgccttcgccctccgggcctccatttccccgacggacccgaggcttacacttctgccttgcctgccctctgggggcccggccttccttccagtcccccggcccctctgctcagccatagtggaagtgtgtctttgcagacaaactatgcttcaacaccttcttcaacttcgaggacatgcaggagatcaccaagcactttgtggtgtgtcacgtggatgcccctggacaacaggtgggggcgtcgcagtttcctcaggggtaggtaccctgagccccctctgcctgtctccagctctgcacctgaggccacacctgggccctgacctcctgctctgcctgcaggtaccagttcccctccatggagcagctggctgccatgctccccagcgtggtgcagcatttcgggtgagtccccgcacagcccctgcgctagggcccaggggtgcctaccccaactgcagagccacctggctccagctgagggcttcaggctatgggcagggcctgctctggatgacatgtatgggaaatggcacccctagccctagagtgaccagcctgctctgcaccaggttcaagtatgtgattggcatcggagtgggcgccggagcctatgtgctggccaagtttgcagtgagtctccccatgcccccattaccccaaacaccagggcaagccagggatgtcccagtggtggggactggggggaacccttcagccttgaggaagtgtccctgctctcgcttctcctcctcccacctcctctttatgtagaaaacctcttttttcttttttcctccagggaaattaacttttttaaaaaagaggttcctttctccatatagttttctcaagagactagaaactataacttgcttaaactattatccaaagccagaatttctagtagcaacaaactatacaactaactgctctagccactaaataaggatcgtccttcactaattgccatggtatttcaacatgaataatttttttagcaaaaaattttattatggttgggaggtttaaagaaggcacatttcaaaaacatcattgtcggtggctcacacctgtaatcccagcactttgggaggccaaggtgggcagatcacgaggtcaggagatcaagaccatcctggctaacacggtgaaacccagtctcta

SEQ ID NO: 16207 - DNA, 2300 bp, Homo sapien
aaaactaataaagaacctaagaagaattccagtgtggtgatgccatgcccatcatgggaggcttttggagaaacagaatgtttgggcaggggctgctggtgctgcttgggttttgggttgagggtgctaggagaggatggtctccacccatctttctatttccagtacacgtcacattattttaccggtgagatgagaatgtcacaaacattaaaagccttatgtgctcatttctgcttatgtgctcatttctcccctgactctgtgacaaaatacagctctcctcagccaggcacggtggctcaagcctgtaatctcagcactttgggaggctgaggcgggcagatcacttgaggccagcagttcgagaccagcctgggcaacatggtgaaaccccgtctctactaaaaatacaaaaattagctgagcatggtggcgcgtgcctgtaataccagctactcgggaggctgaggcaggagaatcgcttgaacctaggaggcagaggtggtagtgagtggagatcgtgccactgcactccagcctggatgacagagcaagactctgcctcaaaataaaacaaaaaaacaaaatacagctctccagaaaaaaatgccttaaagacaaaacaaaacacccctgccctccaaatctcttgcctgagtcactacattccttcaaagataaatgacctactctttgccttctcctaaacatacgatcatgtctgacagggttaatgattatactctgcaatctataaccagatatacttatccctaaactttgatatgattttacacatactaaatcttcacctatgtataacctaaactaaaataccgtgttagaggagcctcacaagattactcctgggctacaggcctcagtctatagtcctcaataaggcttctaaataaaactaattttaattatttaaaagcttaatattttttctttagtcaacataccaatccttacattaattctacagagtaggtattatcttagtttcgcaggtgaggagactaaggttcaggaaaaaggatttgcctgagtaacagaccaggccgcgcgcggtggctcacgcctgtaatcctagcactctgggaggccgaggcggggggattgcctgagctcaggagttcgagaccagcctgggcaacgcggtgaaaccccgactctactaaaaataaacacaaaaaattagctgggcatggcagcgtacgcctgtagtcccagctacttgggaggctgaggcaggggaattgcttgaacccgggaggtggaggttgcagtgagccgagatcgcaccactgcactccagcctgggcgagactcccgtctccccaacgcgccaaaaaaaaaaaaaaaaaaaaggaaaaaaaaaaaaaactgagtgttgagctgcggcgttgcttggcttcaaaacccattcctgtaacctctatattcacagcctcattttcttacatttaacagcatgctacttccccaggtttaaccaccatttgttttattcatttatttacccaataggtagatattgagtccctactatgtcagctaataaaacccaccacgtgctatgcagcagattaaaaacgaggatgtactggcaaataagggcagagaggatctattctagatccaggagccctctaggccacgccactctgaaacacacacgaaaactgctctgaacgaataccaccagtaaaagggttccatggccatcggcaacaaggggtcgagatcaggaggtcgctcgccgcccagttgcgtcgctcaccaccggccggccaccagaccctcggcttccgatccagaaaccgtattttgttcttgcacccagaccgcaagaagcctcagccctcggggacagaccgaaggccagggctgtacctggctcagaaccaggcgccaagcggcacgggactctccttctgcactcgcagcgcgtgagtgcaattggagatcctggactcaagatgttttcatgaggaacgattccagcccgcggtaactccggccagtctgcagcgtggacgacaaaacaggcaccacgtggttccggcgccggggcggggccagagacgccggaagtgaccgcgcggtgcgccggcccgcgaggaaacgcgctcttagaccatggcgacccaggcgaagcgtccacgggtgagtggcgggcgcggggtccagccttttcctccgcgcctcaccccttctccgttcgcagaaccgtccgcctgcgccccctccgctccctcccgcgggtcccgcgcccctctccgctcgtcccc

SEQ ID NO: 16208 - DNA, 2300 bp, Homo sapien
ccaacactgtcacaaagattaatctgctgaacaaggtctgaaatcctttcttgccttagtcttggtctacatcagtggggtgttttatttatttatttattattattattttttatattgtttctttgagagagtctcactctgtcacccaggctggagtgcctccgaagtagctgggaatacaggcatgagccacgattcctggagcttttctatttttagtagagtcttaccatgttgcccaagctggtctcaaacttctggcctcgagtgatccacctgccttggcttcccgtagtgctgggattacaggcatgaaccaccatgcctggccacatcagtggtttctttttatttgagatggagtctcgctctgtcgcccagactggagtgcagtggtgcaatctcggcttactgcaaactccgcctcctaggttcacaccgttctcctacctcagcctcgtgagtagctgggactacaggcacttgccaacatgcccggctaatttttcttgtattttttgttttgtttgttttctgttgttttgagacggagtctcactctgtcacccaggctggagtgcagtggcgggatctcagctcctgcaagctccgcctcccagattcacgccattctcctgcctcagcctcccgagtagctgggactacaggcacccgccaccgcgcccggctaattttttatatttttagtagagacagggtttcaccatgttagccaggatggtctcgctctcccaaccttgtgatccgcctgcctcagcctcccaaagtgctgggattataggcgtgagccacagcgcccggccacgtcagtggttcttaaccctattgggtccctcaagtgacccgcctgcctcgacttcccaaagtgctgggattacaggcatgagccaccatgcctggccacataagtggttcttaaccctattgaggccaacccttcccccaaacattttgttaatgtctcttttctgtcctgaaattaaatttgtaaataatatgtaaacatacccgctctgtcttagaatatagtgccttaaccgaaatacaaaaagagatcataatgtatttcagtatgttaatgcttggtagtatgaatttgccccatatacagaatcactgtgagtgggtggctagacgtgcctcctgctgatagattggcaactcaagtacatgagtgatattagtcattggcttgatttacacagtggagttcctggaaatttgaatattaaaacaatgcaaaaatacttgtaaaaatggactgtgattttggatttgggaaattagagatgtgttcttcaagcccctcactgttcagtgggcaagtcaagtggaatgggatctctgcagcctaacagctttcctggcccctgcctactaaatgccaagataggagtaaatcattcccacatgtcaacttcatgtcagaccagacaaattagattgttatattgtgttaacatggtgaaatgtgaggggccttgctgatttctagagctgaagaagaaccattgggcatttgtggagaatattcaggtgtggtccaaggatgttgaaatgcaaagaaacacacaaaacactgaaggcggagtcagaccaatttatgaccctatcggctgccagcatgtaattttgtattcaaattgtatatatgctttcctttaatgttgggtttaagaatgcaaagtttaaaaagcatgacatcgaagtggtgagtggattatctgaatgatttacaagctctgatttgtgttttacgtaggtccttggtatagtagtgggagttctccttcaggatcatgatgttcgtcagagtgaatttcagcaacttccctaccatcgaatttttatcatgcttctcttggaactcaatgcacctgagcatgtgttggaaaccattaatttccagacacttacagctttctggtgagtattgtgtttgcgattttgtgttaaggtttgctggattaatgtagtaaaattttgggagtagaactcttgagcattttgagcctacattcatgtgctgttcactgtatttaagttggactgtgcttctgactaaggtttttcttctttcagcaatacattccacatcttgaggcctaccaaagctcctggctttgtatatgcctggcttgaactgatttcccatcggatatttattgcaagaatgctggcacatacgccacagcagaaggtgtggctgcagtttatctcctgtagatgaagactataactacctgggcttatttattagcattgcctatagattt

SEQ ID NO: 16209 - DNA, 2300 bp, Homo sapien
agttcagttgtctttactgcttatcaggaacagttaagttgtttcaaaaatttcaagataaccttgaagttttttttttcggaacttggtttctgtgtttagtaagtagtgaactgttcttcctctgtagccttaatgcatattttactgttgtctttttttgtttgtttgtttaaagggttgaggggaactagccaaataacattcccactgtgcttcacttctagttcatatgtcatatagtttctaatttttcctttcttttaaataaacttgtgtttcccacattattttaacttaatgtaacattttattacattaaaatacctagatcagatttgtatttccatttggtacttacctgttgtacaaattattgatttttctgggggtagcttgttggagttttaaaatctttgttattggttaattcagtttgaggaaattatcttcaaatccttcagaagtaaattaccttaaattctgtgagaaagtaaaatatgtgcaatttagtcttctccttggagtccacaatgtcttaacatgacttacagttaacgaacagtttgttttatttgcatggttaatttttcacattatttggtggggacctactgttcaaaattgccatgataatctgtctgtcagtttccatcttccctgttctacattaaacttaaaactggaggaattctgtcatggcaccttaatgggaaaataattctgataatacatttattacaatgtaagaattagaaatatgacagtaggaacaaatgagaatatctcttaagcctgaaaattaaaggtatatgaagtttatttgtgtgtgttacctcattgtgtctttattttttgttcctgttgtagatgcaccagcaaggaatactgaagaccgatgatctcataacaaggttctttcgtctgtgtactgaaatgtgtgttgaaatcagttaccgtgctcaggctgagcagcagcacaatcctgctgccaatcccaccatgatccgagccaagtgctatcacaacctggatgcctttgttcgactcattgcactgctcgtgaaacactcaggggaggccaccaacactgtcacaaagattaatctgctgaacaaggtctgaaatcctttcttgccttagtcttggtctacatcagtggggtgttttatttatttatttattattattattttttatattgtttctttgagagagtctcactctgtcacccaggctggagtgcctccgaagtagctgggaatacaggcatgagccacgattcctggagcttttctatttttagtagagtcttaccatgttgcccaagctggtctcaaacttctggcctcgagtgatccacctgccttggcttcccgtagtgctgggattacaggcatgaaccaccatgcctggccacatcagtggtttctttttatttgagatggagtctcgctctgtcgcccagactggagtgcagtggtgcaatctcggcttactgcaaactccgcctcctaggttcacaccgttctcctacctcagcctcgtgagtagctgggactacaggcacttgccaacatgcccggctaatttttcttgtattttttgttttgtttgttttctgttgttttgagacggagtctcactctgtcacccaggctggagtgcagtggcgggatctcagctcctgcaagctccgcctcccagattcacgccattctcctgcctcagcctcccgagtagctgggactacaggcacccgccaccgcgcccggctaattttttatatttttagtagagacagggtttcaccatgttagccaggatggtctcgctctcccaaccttgtgatccgcctgcctcagcctcccaaagtgctgggattataggcgtgagccacagcgcccggccacgtcagtggttcttaaccctattgggtccctcaagtgacccgcctgcctcgacttcccaaagtgctgggattacaggcatgagccaccatgcctggccacataagtggttcttaaccctattgaggccaacccttcccccaaacattttgttaatgtctcttttctgtcctgaaattaaatttgtaaataatatgtaaacatacccgctctgtcttagaatatagtgccttaaccgaaatacaaaaagagatcataatgtatttcagtatgttaatgcttggtagtatgaatttgccccatatacagaatcactgtgagtgggtggctagacgtgcctcctgctgatagattggcaactcaagtacatgagtgatattagtcattggc

SEQ ID NO: 16210 - DNA, 2300 bp, Homo sapien
cactgagcccagctgccctttagattttgagggacaagttgatccaataatttggatcagggtaggtagggagccctggattttaactacagcagagccttttatgacaatgaagagcacagaatgaacttaaatcagatagaatttagagtgtgtgtgataggcaactgaaagggatgtttggagagtggaaaggacagggaggctttggaaggtatttggtacttggcattgagatttggtttctggctgtgatagttgggccaagcactgtatttttcatggttttgaacgctttctttctcccataggctgtagagggcttactagatgccacaagtggtgctgatgctgaccttctgctgcgctacagggaatgccacctcttggtcctaaaagctctgcaggatggccgggcatatgggtctccatggtgcaacaaacagatcacaaggtcagtagccatcttcgaaaagtagtgagtattggactgcgactgccttttgacatagatagtactgtttatgtccaggggtttcccttttttctagtaggtaggtcggacacttagacttcctacttctgagaggtgagaattgttaagtagttgttttccatctggtctctaccttctccccatgttggatatagaaaaccagtaccttgttttggggaataaattgtaggtcattgttttaaaaggttacagtgatttctcagaagtggtattcgtgtataagtattttaatgtcttaaatggaatactctgtatcctaggatttgaaaggaaagcttgggctatctgttctatttcattactggctgtttttaaatttggacactgatttggagttgaatctcaaggcattcttagtttggagcaaatttccattgagtaaaatgggcccttttacagtatggttaagcctatatgagtaaagatattgaactttttctaggtgcctaattgaatgtcgagatgaatataaatataatgtggaggctgtggagctgctaattcgcaatcatttggttaatatgcagcagtatgatcttcacctagcgcaggtatggaaggaatttacttgcacggacaaaaggactcagggaagtacgtttgctcttaagtgttttccctctcacattatgttttctgtgttgccagtcaatggagaatggcttaaactacatggctgtggcatttgctatgcagttagtaaaaatcctgctggtggatgaaaggagtgttgctcatgttactgaggcagatctgttccacaccattgaaaccctcatgaggattaatgctcattccagaggcaatgctccagaagggtgaggatgaaatgctttgagatccctgtgcatttagtagtcttctaatatctttaggaatgaatatgcagacttactaacattacttgttataactgctttaccaaccacatatgggtgggtagctttggtaagggctaatattgtcacttgaagtatgaaagcctaattgactgccaagtcttcttggcacagagcagtacatacggtaccagacttagtgtcagagtcctatgtttaagccctggtcatgccacttaaaagctttctgattttaggcaaattgacttatcctccttaaacctattctttatagaaaatggaaataatttctcaaagaactattggaaatcaagagaagtaacgtaaagaaagcatggtacatagtaggcaaacagtgaatatttgtcgactctgaacatcagtttcatttaaatgaacacgttttttgggcaagaagtagcttaactgagggcagttgtttgtgtgttgtatgctcatgagcaagcggataagagactaagtatagttttgtttcagtgtggaagtggtaaagcgaagtggtaaaccactctggtggttgctgttaaataagcaaactatacatgcgtatgtctgtaaaatcacaactacgaggagactgattttcaccctttatttattgtgctagattgccccagctgatggaagtagtgcgatccaactatgaagcaatgattgatcgtgctcatggaggcccaaactttatgatgcattctgggatctctcaagcctcagagtatgatgaccctccaggcctgagggagaaggcagagtatcttctgagggaatgggtgaatctctaccattcagcagcagctggccgcgacagtaccaaagctttctctgcatttgttggacaggtagagcttttggaaagaaaggtgctttttattcaacataagtagggtgtgatgcctccaata

SEQ ID NO: 16211 - DNA, 2300 bp, Homo sapien
atgaaagctgtttgagaaggccgatacaaaatgacttaaagtgatgttgcatgtgcacacacttttcaaataattcacttactagttttgagtctcagatatcatggttaataattcaggtatcatgattaataatttgtttactgctttaatgattttttttggttgttttttgccttttttttaatgtttcatgagacagggtctcactctgtagcttaggctagagtacagtggtgcagtcttggctcactgcatcctccacctctgaggttcaactgattctcgtgcttcagcctcccaagtagctgggattacaggcatgtgctaccacgccccactaatttatgtatttttttagtagagaagtggcttcaccatgttggctaggctggtctcaaactcctggcctcaagtgatctacctgccttggcctcccaaagtgctgggattagaggtgtgagccaccgcgtctggcctgctttactgattttaaggcatgttcacaataaactgataaggtgtctaggatatttttgtcttaaaagtgaggaagctgttaagactgtttcaagatcacagcttgttcataagtagagtcagaacttaaaatgcatttgccaaatgcactgcattttctactatcctgtctgtccacatcaactttcaagtctttttccttctattccccccacccccccacccacctccattaatagactgcttccccacaacaaagagaaatgatggatcaggcagctgctcaattagctcaggacaattgtgagttggcttgctgttttattcagaagactgcagtagaaaaagcaggccctgagatggacaagagattagcaactgtaagtgtttagaatttgccttttaagattttcttttttaatttagggaagtgccttataacaagaacctcagtgactttttttgtttgcaggaatttgagctgagaaaacatgctaggcaagaaggacgcagatactgtgatcctgttgttttaacatatcaagctgaacggatgccagagcaaatcaggctgaaagtgagaattggggctctgtctttccccgtcccatctttgttttatttttaatgttgttgttgattgaactccttactggaattaggacagcagggttaaatattgtttatgagaaaacatcttaacttgatagcatttcactgaatggctgcctgtggaggaggtatggaaatagctctaaattcccttgctcctccagagttgttgaagtgttattactctaaggagttcatgtgcctgctagttttcatgtttcccaacttgggcttctcacattaatggttgcttattgttcccagtgagacagtgagaaatctgataatatttaccagcttcaagggagaattgcactggcatcgtcccatgtgaggcattttccaagagaaactctcagttaatttataaatgaggtgactcttagcaggattcagggaaatgagaagccctcttctgaactgcatttgtgtgtgcgtgcatgcttaatcatgctgttatatgttgtaatgactcttgtgtccctgagcttacccacatgcagactttccactttcaaaacagtttattttgattattgagtgaattctgtcaaaataggttttcttctttcaaggttggtggtgtggacccaaagcagttggctgtttacgaagagtttgcacgcaatgttcctggcttcttacctacaaatgacttaagtcagcccacgggatttttagcccagcccatgaaggtaaatgtgttttagattaaattgagtgttttgccaattaatttaaatgtttttgacatttaatatatgtttttgacttgcttcctgggagaataatttacaggggaaaaaacacctatagtttttgagttgtaggtattctttgtgtccaattaagtatgacatacaggggattaaagaaaaattgacatgggtgtgggtgatttaactttaatgttcggcctaattaggggaattctcatggtaacataataactttcggttttttatttttaaattttattatttatttttttgagacagggtctttctctgtcacccaggctggagtgcagtggcgcgatctcagctcattgcaacctccacctcccagactcaagcgatcctcccacctcagcctcctgaggagctaggactacaggcgtgtgccaccatgctcagctaatttttgtattttttgtaaagatggggttttgccatgttgcctagactagactcaaactgctgacctca

SEQ ID NO: 16212 - DNA, 2300 bp, Homo sapien
gtttataggacttgggcctgacaatatggcatggctgctcagttgatttctgtgctgtggggcactggcactgacatagtttaacatacttcgtgtatatctctgttataacaacagaatttccctttcagggtgggaaaaataggacctgctacatccttccctcctctcccaatttaattcgtttaattagataatgaccacttaatgatattaagctaattttataataaagtcaacaaatgtactttttaaatctctttttattacttgacatttagcaacttctactacaccagctaccaacaccacttgtacagccacggttccaccacagccacagtacagctaccacgacatcaatgtctattcccttgcgggcttggcaccacacattactctgaatccaacagtaagtaaacactgctccattctcccagcttctagtttgtgataaggtaaattttgtttggccaccttttcttcagctctttgcccttccctctggattcctaggttgtagagtttgtcagagaggatggagatctagaactgctgtgtagttcagttgggattgttcttcttcccttaagagatagagtgactagatgttagttatattggttcctcatatccaaacccatgatactaaaatttagctagcaataaaatcacaatctccaggaattccttacacagagtaaaagatgcttaatgtatatcatagctttttattttctttatcttgtcactttagccttctgcagtaagccatttcttccacctgaaggctggaaatgagctgattgtgggtgtgtatacaatttctaggctaagatcttgaagtaggacttagcactttgagttatgttgttgtggcctggttccagaaggaggtctgatacaatatggtcatgtaagatgacctctgatcagtcctttttcctatagttagtatttgctttgtacattcaaggggacattttattgttatctttagtcttttattctacttaacagaatatataatacagaatcaggtgagtggagttttcattgtccttactttttagaaactgaaaatgttcacaaatacaagagtaacattaatacattgaactttttattaaaaggaattgaaagggtatcagagaaatcattttatccttgtccccccatccccactcctatagacatggtacttagttttagaggggtggagtgagaggcagtgggacacctagatccagaaattgtgattcatctttagaatactcttagtgttgtgaacactattatatgctagtttaattttttttttttttaattcaacaagttaaagggaccaagtaagttttggggcataatttacacctgcaataaaagattagaaacagcctttcaaatgaagccaaatacttcagtgggcactgtaaaatgctcactattctgatgaattaattttaatagtttttgtaagaagtcttttttctataaactttattctttttacattttcccaagctagtggagaagttgctttcttttaagagcacttgagccacaaattttaaataagccagcagtgtgtctttaagtagttaatgcatattgtaatgaacagtttgtccattaaacttggatttaaaaaaaagacatatctattattgtgtatcacagggtatactgaatacatttccctgtatggagctcagtttctgttacccgaattttccattggttaactttaagtagaaactggtagtttttggttaatcttgatttacaaaatcatgaatgtgattgccagtaggaattggattgtcttatttaaacaaggtgttgactttgtcctccccaaccccccagattcccttgtttcaggcccatccacagttgaagcagtgtgtgcgtcaggcaattgaacgggctgtccaggagctggtccatcctgtggtggatcgatcaattaagattgccatgactacttgtgagcaaatagtcaggaaggattttgccctggattcggaggaatctcgaatgcgaatagcagctcatcacatgatgcgtaacttgacagctggaatggctatgattacatgcagggaacctttgctcatgagcatatctaccaacttaaaaaacagttttgcctcagcccttcgtgtaagttggctatttccttggtataggtacaaaacgtattactgcttgtctgtaataatttttttctttgtctatatatggcactgggcgttaccacttattcttaataatcaccatatttgtttgatgtcttc

SEQ ID NO: 16213 - DNA, 2300 bp, Homo sapien
aaagcagtgagactacaggtatgagccaccgtgcccagcctcaacaaagtttctttattagaaaatcagattggtactcgggaggctgaggcagaagaatcgcttgaacccggggggcagaggttgcagtgaattgatatcgtgctactgcactccagtctgggtgacagagtgagactccatcttaaaaaaaaaaaaaatcagatcggttggtttacttacatgtgctagagaataggaactgatattttttaccttttcccctctattttaggagtgtttctcaggagctatcagaaactatcctcaccatggtagccaattgcagtaatgttatgaataaggccagacaaccaccacctggagttatgccaaaaggacgtcctcctagtgctagcagcttagatgccatttctcctgttcaggtaaatgagtgctacatttgatacatcttcatttgccatagatttggaatagaataagctcctatgtcattaataaattgtctgaatttattacattttagataactgcatgtctagcatccacttattttaaaggagatatgtaaataggcattgtagttaacaatagattttatcatcaaatagaacgtgactctaagaggaaatatacagacaatttatttaggtaaatgaagagggtttctttttaaaatatgaattacgtagactcttgagacataagcactgcctttgaacctgatgtgtcttgtttgtagcttcacgggccaagcaacagtgctagagcataacgacttgttataactggggctcttcagctctcaactgaactgctcttttaaaaacaaggtacatttaagttactccctgacatcaaccacccccttctctctgggagcaacatattgcgcttctattttcagatgcattgaatggcagattgggttttaaggaagaaagaggctaaaagttagtgattcagtggctacttccctataaaaggcatttgcttgtcattttctatagccatgaaggtatgaagtagtgccacacacttaagcctggaagtgcagttattagatattttaaaaatacatattttggtgaatagcataccttgtttttgttttcaaaattggagctgatcttcccccacctcaaaaatccccaaatttcgactaaatttattttgggagattcgtttctaatttctaatacttttatttatgttgaaacttacttaaatttagcttgattgttttaaagtggcttattggaatttgtgaggatttattaatataataagtgtcccatgtcactactaaatgtttagtttagggcagttcatcttaagtgttgttcattagattttgtagccctttttatggctctgttataggttgagcatccttaatctgtaaatccaaaatgctccaaaatcaaacttttggagcactgacatgacacgccacaagtagaaaattccatacctgatctgatgctacgtgttgagtcaaaacatagtcataattatgtttcatgcaaaaaattcttttaaaaaaactgtataaaattacattctggttatgtgtatataggtatatgtgaaacaagtgaatttcatgttttgacatgggtcccatccccatgatgggattgttaggatatctggttatgtatatgcaaatattctaaaatccaaaattgaaaacttttctggttccaagtattttcaataagggatactcaacctgtactttgtcaaaggcaaactctttaaacctattctgtatgtgacacagtaagaaaagtgactgacacacttgacttgataactgggatttaagtatcatcgtgattgagtgggtgtaatagtttgctttttaagattatgaagagctgttgttaaagattgctttacatgtgtctgcctttcctcgaagtatgtttaatacatttttataatgtttttctttagattgaccctcttgctggaatgacatctcttagtataggtggttcagctgcccctcacacccagagtatgcagggttttcctccaaatttgggttctgcattcagtacccctcagtcaccagcaaaagcatttccacccctttcaacccccaatcagaccactgcattcagtggtattggaggactttcatcacagcttccaggtaagggggaggcaaatgagagcatggattattcataagtttgccttagttatgccttagtgtttggtaaggggtttggagtcactgtgataaggaaagctgcttaaatgaaattgtgaaagctacttcagtatcc

SEQ ID NO: 16214 - DNA, 2300 bp, Homo sapien
aaaaaaaagatgtgtttttaggacatatgctcagttaactaggccagtcacaaaaagacaaatactgcatgattccacttatatgaggtatctaaagtaatcaaactcaggaacataaagaagaatagtgattgtcagggactagggggagggggaaatggaaggtgttaaacaacagatgtagtttcagttttgcaagatgaaaaagttctagagatctgttgtacaacaatatgcatatagttaacactactgtattctacacttaaaaatgattaagatggtaaatttcatgtgtttcttaccataattttttttaagtatttttttgggcacgagaggtaatatgagagagatggccagaagaccacctactgagcctagtctgaggacaggggtgagcacagggataggtttgaatttctttttcttttcttttttttttttggagacggagtctcgctcagtcgcccaggctggagtcaagcggcgcgatctcggctcactgcgacctctgcctcccgggttcacgccattctcctgcctcagcctcccgagtagctgggactacaggcgcccgccactacgcccggttaatttttctgtatttttagtagagacggggtttcaccgtgttagccggaatggtctccatctcctgacctcgtgatccgcccgcctcggcctcccaaagtgctgggattgcaggcgtgatccgcagcgccctgcctttttttttttttttttttttttgagacagagttttgctctgtcgctcaggctggagtgcagtggcgcgatctctgctcactgcaacccacgcctcccgggttcaagcgattctcctgcctcagcctcctaagtagctgggattacaggtgtgcgccaccacgcccggctaattttttgtatcttagtagagatggggtttcaccgtgttagccaggatggtctcgatcacctgacgtcgtgatccacccgcctcagcctcccaaagagctggtattacaagcgtgagccaccgcgcccggccttaatttcaaaaggtaatagagctaaccagtcaacacttccttcccaatcctttctcttttgggtacaggtgagtataaaatcttaccaactatcatagttaacaaacaaaccatagcaaaatatgtttctatgctttttctcttgagagcaaaggacatgggtatcctttcttagacggcttctaggacttaagccaggaagagaacttgcgtctcctacgtctctggaaggcgtctctggaaggtgtcccttcttcaatagacagaactaaaacagaaagttcccttgaccaaagcgaagcaagcgaggacaaggtggccacctgggtgactacaacccccagcatgcactgctccttctagggcgcagcgacgaacgaagacgcattacttctgcgatgggaacggggtagaggagcgcgactacacatcccaggatgcaaagcgccccaactctagtcacaacctggcttgctttctggctggcgttccccgccaaagggacactaggggaggggattgtttcggttgggaatccccgaagtctactggaccgtgacatttcgaaagaggaaggaaagtggaggaaagctgtttcactgtaattcaaagtagttcccgcgcagggtggcgaggagttatgggccccttccataatttattgttcctcaaaggcaatgccaagccccactggtcgcagccctccagggcaggtgggaagtacgtgaagccccaaatcgaagttatcagcctctccctattggccctcgcctcgagcgcaggcgcgagggctctgactccggtcccctgggcctggtgagcggcaattggccaaagtccgcgaagtaggaggccggattggtagttgctagcaggagcctgatttcttcctcgacttctgcaagtgatagagtgtgattggtttaaatccgcgggcacctgtcggtgattgggtagaagccacaggcggggcgcggccattggctggctctggggccatccctcctcgggcgggcagcgaatgatgaaatgggaacggggaggggaaaggccgcgacgtgagcgcgcgacctccggcgccattttgtagagaaacaagcggagttaaccgaagagggggtcgaggagagccggagtcggggacccaggagtttcctgtgtccagcgctgccggagccgcctgaggtgaggcgggttggcgtcaggggctagggtagggtggcggtgtcagcttgggaacgcgagagccggtgggaggaggaacag

SEQ ID NO: 16215 - DNA, 2300 bp, Homo sapien
ctctgctttccgcaatgtgaggacacagcaggaagatggccatctgaaaactatgaagatggtcctccccagaacttgactctgctggcattctgacctcagtcttgacagcttccaggacggtgaaaaataaatctctgtcgtttaaaccacccagtctatgatactctgttatagcggccttaactgattaagacagtatgattctatttttttttttttttttgagacagagtctcactctgtctcccaggctggagtgcagtggcacgatctctgctcaccgccacctccgccccccgggttcaagtgattctcctgcctcaggctcccgagtagctgggactactggcgtgcaccaccatgcccagctaatttttgtatttttaatagagacaggacttcgccatgttggccaggctggtctcgaactcctgacctcaagtgatcagcccgccttggcctcccaaagtgctgggattacaggtgtgagccaccgcactcaaccagtatgattcaatttatataaactttttggaggccaggcacggtggctcatgcctgtaatcccagcactttgggaggctgaggtgggtggatcacttgaggtcaggagtttgagaccaacctggccaacatggcgaaaccccatctctactaaaaatacaaaaattagctgggagtggtggtgcatgcctgtaatcccaggtactcgggaggctgaggcaggagaatcacatgaacccgggaggcagaggttgcagtgagcaaagatcgtgccactgcaccccagccggggagacagagtgagactctgtctcaaaaaaaaaaaaaaaaaaaaaaaaaaaaaaggtgtgatttgggtttctaaggattcccagtgtgtcctcatcggtgaggacctctgatgcatggagaggtaagtgcagtggagagcatatccacaaaacagagatgaggctattgggatgctggagattacgtgacaatttatgagtgacacacagccaagaacagaaccaggactggatgcccatttcgtcattcaacaaatatttactgagcacctacaatccctcaaaaactgttctagagtctaaaccgatggggtcgtaaccatgcccccagcccactcccttgcaggaaagaccgtggctccaggtcccccacattactgattaaaaaaaaactccagtgctctggccatgggcgtgaaggcaaggacagagaccgggaggataatgaggccaaacagctttggcccaccgccaccgggactggcaaagaggccagacctcctaatgctcttccttggaggaaggagcagtgtttgatttggtcaagaggccaagactaaaagtaagaggataaacacgagctggctggacgcgaggctggctcagggcagtgctgtcgggctgaggattcagggagctggtgttgtccaagcttcacatttgcggaaactacaactcccagcgtgtcccgcggccgcccgagcgggcgtcatgtgatgcatgctcacgtgtctccgcagccggctcgggaaagaatcccccaaggtaggtggccggagacaggctctggagggtggaagtgttagatccccgaggtctgtggagcccctcagtccccgccaccgcggaaaagctcagaccctttccctgcaggggtccagatcctggcgtcctcgccccacgcccgtccctctgttgcgccagctctgccgcgcctttacccagccagagggtctccacccagtcctaggccgggatcgggtcccggagctcctccccaggttaccccacagtagcccacccttctcgctccaggcctgggaatcgccccgccccggcctcctggcccgggtgcgccctggctcacctcacaaagcctcacctcacaaagcagcccaccctttctatctcagggctccaaccccaggctggactgggagcacactccagttgggatctgaggggcctacatcgctggcctgagcatgtgggcatcaggcttctattctggctctgccagctacccactgtgaccttagtctaacctctccctcctgggcctgttttcctatctgtcctgaagctccatttcatgagtaagcgtgagagccgctcagtttcctccagctctgctgaagccagcacagaagtagcccaaactcttccctctgctgacagcaaattttaggcaaagtcttgagaaagaagaaattgggtccagaaagggaagtgaggagaatcagatcccagacctttggggagaaggagcaaccgcctctggca

SEQ ID NO: 16216 - DNA, 2300 bp, Homo sapien
cactgaaacctctgcctcctgggttcaagcaattctcctgcctcagcctcctgagtagctggattacaggcgcatgccaccacacccagctaatttgttttgtatttttagtagagatggggtttcaccatgttggtcaggctggtcttgaactcctgacctcatgatctacctgcctcggcctcccaaagtgctggaattacaggcgtgagccaccacacccagccgcaggattagttcacttataagaagaaacaagaccaggcatggtggctcatgcctgtaatccaagcacttggggagactgagacaggaggttcacttgagcccaggagtttgaggccattctgggcaacataggaagaccttgtctctataaaaaatgaaaagttagctaggcatgatggcacgcatgcctgtagtctcaactatttgggaggctgaagcgggaggactagtggagcctgggagatggcgactgcagtgagctgtgattgcgccactgccctccagcctgggcaacagagaccgtgtctctaaaaataataataataataaaataaataaaaataagagagagtttactttccctctctgctttccgcaatgtgaggacacagcaggaagatggccatctgaaaactatgaagatggtcctccccagaacttgactctgctggcattctgacctcagtcttgacagcttccaggacggtgaaaaataaatctctgtcgtttaaaccacccagtctatgatactctgttatagcggccttaactgattaagacagtatgattctatttttttttttttttttgagacagagtctcactctgtctcccaggctggagtgcagtggcacgatctctgctcaccgccacctccgccccccgggttcaagtgattctcctgcctcaggctcccgagtagctgggactactggcgtgcaccaccatgcccagctaatttttgtatttttaatagagacaggacttcgccatgttggccaggctggtctcgaactcctgacctcaagtgatcagcccgccttggcctcccaaagtgctgggattacaggtgtgagccaccgcactcaaccagtatgattcaatttatataaactttttggaggccaggcacggtggctcatgcctgtaatcccagcactttgggaggctgaggtgggtggatcacttgaggtcaggagtttgagaccaacctggccaacatggcgaaaccccatctctactaaaaatacaaaaattagctgggagtggtggtgcatgcctgtaatcccaggtactcgggaggctgaggcaggagaatcacatgaacccgggaggcagaggttgcagtgagcaaagatcgtgccactgcaccccagccggggagacagagtgagactctgtctcaaaaaaaaaaaaaaaaaaaaaaaaaaaaaaggtgtgatttgggtttctaaggattcccagtgtgtcctcatcggtgaggacctctgatgcatggagaggtaagtgcagtggagagcatatccacaaaacagagatgaggctattgggatgctggagattacgtgacaatttatgagtgacacacagccaagaacagaaccaggactggatgcccatttcgtcattcaacaaatatttactgagcacctacaatccctcaaaaactgttctagagtctaaaccgatggggtcgtaaccatgcccccagcccactcccttgcaggaaagaccgtggctccaggtcccccacattactgattaaaaaaaaactccagtgctctggccatgggcgtgaaggcaaggacagagaccgggaggataatgaggccaaacagctttggcccaccgccaccgggactggcaaagaggccagacctcctaatgctcttccttggaggaaggagcagtgtttgatttggtcaagaggccaagactaaaagtaagaggataaacacgagctggctggacgcgaggctggctcagggcagtgctgtcgggctgaggattcagggagctggtgttgtccaagcttcacatttgcggaaactacaactcccagcgtgtcccgcggccgcccgagcgggcgtcatgtgatgcatgctcacgtgtctccgcagccggctcgggaaagaatcccccaaggtaggtggccggagacaggctctggagggtggaagtgttagatccccgaggtctgtggagcccctcagtccccgccaccgcggaaaagctcagaccctttccctgcaggggtccagatcctggcgtcctcgccccacgcccgtccc

SEQ ID NO: 16217 - DNA, 2300 bp, Homo sapien
taagcgaggaaatagagcgttggtaagttggctactgtgccatgtcaggccggggagaatcccctgtaccgggaagaggtacccaagttctttcctctctgcaggtggagcggctgatcaaggagttctccatctacatgacaaaagatggccgcatctctgtggcaggggtcacctccagcaacgtgggctaccttgcccatgccattcaccaggtcaccaagtaatgtccctggtgcgaggaaacagagacaacctttctgtcttcagcctctgctattgagagcttcacacagacaatgagagagggtggatggtggtgagtggatcatttctttcagccacagtgtgtaacactcagcatttgaatgtttctcagaaaagaacatgtagtgacacagggcagaggcatccatggctggcgtctggaatattaaaccaaactctccccggtccttttttctccaacttttctcaaagagtttacatgtgcaagaaagtcatcgcaccaaaaaacctgtcaattatgccattgcaatatttcagaagctttaactgaagtgtcaggttcctcgtgagaaacagcacacgttagaggctttgagagaaggcctagttctgtcatgagtagtcggcctcgtgtctgtcctcccatcttggaacaaccttatcaacaggccgcactgcagaaatgatgttttatgaaaaccaatgaggctgctgccactccagcaagggaaataatgcagtttcctgtcttatttaagaaaaagagaaggctctcttttctcccttgtcattgccgttcttttccttacacgcaaagattttttaactattgcagattttcatcccattctactgcttgattgaccatcaactccatcctatcgagatttatttaagaatgaagaacataattttctgctgatgctgtaccctcacccttttcagcaaagaatagtggagagtaggaaactgtactttatctcggcatcctcttgaatgatagtgcaagtttctccagttgggatgttgtctctgcccggttggacctcctccctttgttgaatgtggtgtgcagcctctcatctcacactgtgagtccagcggcgcagggtggtaccaggaaagaggatattctaggctttgcgtgctgctagctgggttcaggcttcacccactggaaagaaccaccatctgctctaaccatgtagacttattgcggcctggtttctctgttacaataaaattactgtagacccaactactgtctactaagttatcttttttctttaatgggaggaaggggtaggagtgggtaaataaataaaggggtaggagtttggaatcgtgtagctgatcataagccagtagatgtatccactattccaaatattggctgaagattcgtcgttttcttcatgttgccattcagtttgtccagtccgaagatgctgagaatgtgggtgtaatcccttggaccttgtggggaacaagtggagtcccatgaaggatcctgtggatataggcaaagggtagaaggggtggaggagaagtgacaacttcagtggtctataggagccaagaaggtaacgtaaataaaaaagtgttgtgaactggatttaagttgatcagtggtgatcaaccctcatcctcagcattgaggagcagtagtgaagtgacaggagctgtgaggatgaacgcccaaggtggtaggtcttacatttttcaagaaaaatggaaatcttgatttctatggttgatctgttggtgcttaaaagttggcaactggttcaatttttaaaaaattatttgggccaggcatggtggctcacgcctgtaatcccagcactctgggaggctgaggtgggcagatcacctgaggtcaggagtttgagaccagcctgaccaacatggagaaaccctgtctctactaaaaatataaaattagctgggcatggtggcgcatgcctgtaatcccagttactcaggaggctgaggcaggagaatcgcttgaacccaggaggcggaggttgcagtgagccgagatcgcgccattgcactccagcctgggcaacaagagcgaaactccgtctcaaaaaaaaaaaaaaaaaaggaaaaaaaatgatttggaagcagggtgcagatggtagactgcaagtctgtgtcctctgatgtaggtcacatgcccctgtcagcagacatccagcactggcacctgtgtggcatcagtcctgcttacggtattttgtccctttcattcagtgcaaggagcctttcattgtgggagagtgacc

SEQ ID NO: 16218 - DNA, 2300 bp, Homo sapien
aaggaaggaggaagtaacttgtggaatgctgagaaaggtaaaaacaccttcaaataaggaagaggaacaggctatgacctaatgcttgcttggaccagtataagcatgccagggcaaatatttaggctaaatggtggcagctaggaacataaagtacattgatttctttattatggctagcagatatttaagactgttagtacaggtctttgaatacattttgtttttaagagaagttactatttatttctaattagacagggaggaaagtctttaaagaagaatctctactttacttttcacaggtagaatcccaagtcatggcctataggcgcataggtcaaggtcatatgagagcataagggtctgagacagtaaattggagctgggccggaaggacctagaatgtggccctaagtaggggtttagactttaccattcaggcaacgtggagccacagaggagatattaaattgccaaggtacacagttctatctcggttttattttatttatgtatgtatttatttatttatttagagccagcgtctcactctgttacccaggctggagtgcagtagcgcaatcctggctcactgcactctttttttttttttttttttgagtcggagtctggctctgttgcccaggctggagtgcagtggcgcgatcttggctcactgcaagctccgcctcccgggttcatgccattctcctgcctcagcctcccgagtagctgggactacaggcgcccgccactatgcccggctactttttttttgtatttttttagtagagagagggttagccaggatggactcgatctcctgacctcgtgatccgcctgcctcggcctcccaaagtgctgggattacaggcgtgagccaccgcgcccggcctgcactcttgaattaatgggctcaagcaatcctccctcctcagccttctgagtagctggaacaggcacgcaacaccacatcctgctaatttttttttatttttttaagagatgggggtttcatcttgttacccaggctggtctcagactcttgttttcatgctatcctcctgcctcagtctaccaaagtgttgggtttacaggcataagccaacacaccgggcccctaccttggtttaagagacgagtatcagagaaatagactacacatgagaaagactcgtttgacttgtggatgtgtctgaaattcatttgctttttcctttaaaaccgattcatttccttcaaaaccgattcatttccttccacaaacagttatcaggatttgacatacacgagtttgtcattaatgaccatgggttattttgtgcttactaaatcaggccctgttttagacataatctgctaatcttattaatcctcacaactgccccacaaaatacacatgcgaccctctccataaaagggataaggaagccaggtgcggtggctcatgcctgtaatcctagcagtcttgggagactgagacgggcagatcacttgagatcaggagtttgagaccagactggtcaacatggtgaaacccccgtctctactaaaaatacaaaaattagccgggcgtggtggtggcacctgtaacccagctactcggggagctgaggcaggagaatcgcttgaacctgggaggcagaggttgtagtgagccgaaatcacgccactgcactccagcctgggtgacagagtgaaactccatctcaaaaaaaaaaaaaaaaaaaaaagggtgggggataaggaaacattcaggaacgacgtgacatgacttgtgcttagggaaactattagggttgaaagtaaggccaccttgggtcctaatggctgtaaggcatcagacaaaatacgtcaactatgtcagcctacattttctcatctttcaaactgccataacagcagccacctcttcggccggccaggcctggcccagctggattaaatgaatgaagcgcagcaagggctgggcgtaggtaaactgtgcagtcatcctcttccacgacctccgctgagcccacgccgctccgcccgccggccgccagggatcgctgtgacgtggctcgggcccagcacgcggccgctctggcccagggaagtccctgtccttaccttcagcaggagccggttccctgtgtgtgtgtccgctcgccctctgctccgtcctgcggctgcccactgccctcctacggtccaccatggccctgctgcactccggccgcgtcctccccgggatcgccgccgccttccacccgggcctcgccgccgcggcctctgccagagccaggtaagccaag

SEQ ID NO: 16219 - DNA, 2300 bp, Homo sapien
atatatatatatatatatgtgtgtgtgtgtgtatatatatatgtgtgtatatatatatacgtatatatatacgtatatatatatacgtatatatatatacgtatatatatatacgtatatatatacacacacatatatatatacatatatatacgtatatatatatatgtatatatatatgtatgtatattggattctcctgggagggtttgggaaggtctaacaatgaggggggtcctgagtcaaagaaaggtcctgtcttcacctactcgcttacatcatcatttgtattgttatttaatattaatttttattttagagacaggttcttgctctgtcacccaggctggaatgcagtggcacaatgatagctcactgcagtcttgaactcctgggctcaggtgatcctcccgcctcagtcttcctatagctgggactataggcatgtaccaccatacccggctaatattttattttaattttttgtagacacggggtcgcactgtattgcctaggctggtcttgaactcctggctttaagtgatcctcccatgtcagcctcccaaagtgctgggattacaggcatgaaccactatgaccagctgtattgttgttttaaaattactttgaccacagccggacattctgctgaaattatgaaagctgttctgtggtcaccagggatcaatacggacaaggctttcctgctaagtaagtaacacttttcaaccaaaagcctcatgctcccatctcaatctttttttttttttttttggagacggagtctcctctgttgcccaggctggagtgcagtagcgcgatctaggctcactccacctcccgggttccagtgactctcctgcctcagcctcccaagtagctggtgggactacaggcgcatgccaccacgcccggctagttttttgtatttttagtattgatggggtttcactgtgttagccaggatggtctcgatctcctgacctcattatccgcccgcctcggccgcccaaagtgctgggattacaggcgtgagccatggcacccggtctttttttttttgagacggagtctcactgtgttgtccaggctgtagtgcagtggcgccatcttggctcactgcaacctctgcctcctggtgagagatgacagcatgctggcagccctcgctcacccttggtgcctcctcggcctcgcgcccactctggccacgcttgaggagcccttcagcccgccgctgcactgtgggagccccttcctgggatggaccgacgccggagccggctccctcagcctgtgaggaggtgtggagggagaggcacaggtgggaaccggggctgcgcagggcgcttgccggccagctagagttccaggtgggcgtgggcttggcgggccccgcgctgcgctcggagtggccagccagcccgccggccccgggcagtgaggggtttagcacccgggccagcagctgcggagggtgcgcgggttccccagcagtgctggcccaccggtgctgcgctcgatttctcgcctggccttagctgcctccccgcggggcggggctcgggacctacagcgggccatgcctgagtctcctccccaccccgccgtgggctcctgcgcggcctgagcctccccgacgagcaccaccccctgctccagggcgcctggtcccatcaaccgcccaagggctgaggggtgccggcacacggtgggggactggcaggcagctccacctgcggccgtggtgcgggatccactggatgaagccagctgggctccggagtctagtgggcatttggagaacctttatgtctagctaagggatcgtaaatacaccaatcagcactctgtatctagctcaaggttcctaaacacaccaatcagcaccctgtgtctagctcagggtttgtaaatacaccaatcaacactcttatctagctaatctagtggggaggtggagcacttttgtgtctagctcagggattgtaaatgcaccaatcagcatcctgtcaaaacggaccaatcagctctcagtgaaacagaccaattggctctctgtaaaatggaccaatcagcaggatgtgggtggggccagataagaataaaagcaggctgcctgaggttgcggtggtaacatgtttcggcgtccttccacactgtcgcggcttatgttgttttgctgtttgggtttgcactgtctttttgagctgtaacacagcaaaggtttgcagtttcgctcctgaaatcatcgagaccacaaacccaccgggaagaacgaacaactccagacgcaccgc

SEQ ID NO: 16220 - DNA, 2300 bp, Homo sapien
acgatcagtgctattcaccaggtgactcttaaagtgtcacagaaagacgtgaagcttctgagggtgaaaaattgcatccaaaatatgcctttgatttgcttaaggcacgttagagggaagcattcagaataggaatgaagttttaaaaggacactaacgaaaataagaagcaactttaatatcttcactgttgaacatcaggaggtattttactaagtggcttaaacggaaaatatttttttaaaaaggaaaaggatgacaggcattatcgagctgaactgcagaaagagttttaggtaaatcctcagtggtattgtagaaagaagtattatcaactcctggaatcatagcacagtgtccatacatattcagggcaaatttttcctcaaatgtcagcatattacattgcaagtttatatctgattttctgtctgttctcatatcttggtctcttttggaattgttgatttcaaaccatactttcccctccccctgactgggtaacactgaatatttagggcgctaagaaatcaaaacccagaagttgtcagtactgaggcacctgctgtgtacctgccctgaatgtgtgagtggaagacagaagcctatgttggtggaattcatgtggcagtgagaaaagataaatgtgacacagtagcccctactctccataggggatgaaatgattataaacagggagtactactccaggggtgtttgtagatatgcaaggaagactcttcaggccgttttcattttgggggagtagaaaaataaagcaaagccataaaacgatggctatgtgaaaagatggactaaagagaggagatggcataactgaaaaaaaaagttgcctttttgaatacatctaaaacgcaatggctgaggggcatcttcctagtccgtctccttgtgccatttgtgtacctcccacaaaaaaggaaaaaaaaaaaaagaaagaaaaaccaggatggttttcagttgactgcaatcccttatgcccttccgcagatactgaaccacacacaagcctctcttggttagtgtgatatgttaagcatgtgaccaattatcacataacaatcctcacaaccacacactggaaaaaatgatcatcactagttttataaatgacttaagatttttttttgaatggatgctcactaatgtactaaatcccacacccaccagcaccataacagttctgggaacattcgtatttggtgtaaaaatgagtgacaccatggttctgagaaatcttcacttttttccagaaatctttttgaatattctaccctttggttaaagaaacctgtaaagataggaaccccaaacttgagtatgtccgaactcccttttcttgagtgtgtattttagctttgctgttaattcccatactttcagtattccctgatttgttcttgatttacctctggtaacaaacggtgtctaaaagcctggacactggcctgggtaaaggtcccgcttgcatttggggatctctcttatcccactggtgtcacttagacagatggcgttatttctctgaaaccctttcttatattaaaatgagaataatcatagtttcataaagtcattttaaggattggctatgatatgtcaagtatttagcataaatataggatgaatgaagggcagtggtggtgctggtggtgatgacgatggtgttgaagataatgatgcttaatatgcctatgcaagagggaagggagaagcaagtctgatttttccatcttcttttagaaatgctgccatcagcaaaattcatactagccaagagagattatgtgtggttcaggatctctggaagagcatcagggattgcaatgaactgagaaccatcctaggttggtgtggggggtccacaaaaggcacaggagacggactaggaagaatgttcctcagacaatgagattttggttacacatattcaaatctgtgtgaatctggcatcaggagaaacagctcattagtatttaatgctgacaccgtgaattctgaattattttgtgtcaattaaacctcataagataactgtgagctaagggtgcttaacaaggtatgaggtgttgaggacacagaagagtgcagtatgtttgatggtcctgcttgagccatttgctccaattggatctggtaaaagtagcgtgcttggagacatataaacattttaaagagacgggagacgtttgattggacctgaatagaactgccatctgtaagagattctgcacaagtcctgtgggcaaaaggtgagtgaaaactataggaggcaagtt

SEQ ID NO: 16221 - DNA, 2300 bp, Homo sapien
aaaatgagatttgaggatattgtctaacaatctggcttttttttttttttttgagacaagtttgttacttgtgacaatccccagctttcagtagcacatgagtttttttgagttttcatagatgtaagaagttaccccaaggaacggttcaaattatttgttcaagtgaaaatgaatatctgaaattaagcacaacccaaaatgtgatctatttctttgtccacttgggactgtctggtctagcagcagttataatttgattgagccttgactgctgctcctttttccaagacagaattagccaattccaataccctgtaagcagacacagtctgagaagagaacaaacagttacttagtgactgcctgggggaaaaaaaataccacttggttctcttcacctctccctctctgaaataatccactaagtttcttgcctatgacagctagaacatgaaacaatcagatattagagctacagccaatactctttttcacatttcacaatgggttgtcagatgcagcacacaaaaaaatgtcaaatttgcataaatatcataagcatgttgtgcctattttctcattctgttcactctttctcattaatttgagtgagacagtacaagctctacagactgtgcgtcttgtcccctgcacctttttcccccttctgttcttgctctgtccccagatggtaaaatccaccctcaggctcacgtctagtgcacacagggaagggactaaatcgggatctcctgtggaggggagggtttttttttttaaggtaagaatttatttgtcttatatttatctaattttattagaagatgatgactgtggcatcgtctacatgttagccccagtgttgaaaaagaaaagaaatctggacctcctgattcatggtcccttttaccccagggtggccatttctcaagatctgagcgcagcccatcagaagacttgaagtgaccacagacagggcaggtcttggtggaggcaggagaaccgcaaggatggtatctgagaggatatgacaagatcagggcacattgagaagacctagaaattcctcccctatttcccaagcaagttctgctttgcctgccctcctccccacaaccaactactgcgcgcccctcctggctgccactctgctgtccctcatcccattttcccaaaggagcacggggacatcaggaatgcgctccatcacagaaccgcgacacacagcctctacatagcgtctgagttgcaggcaggggtctcacaatcaccctattctgtacgcaagaggcccttggaataaagaggaggtaagctgcccacgctcaaccctttgccctgtcgcgtcctcttcctcctacggaaaatagctgcgggtcactgagacgcttttcaacataacgccagccccagagctcaggtgagacctctagagagaaagctcgcaggtacctcatccgcatgctgttattatctgccagcccacttatccaggagctcggtcctcagcgggctgcgcgcaccgcgcggaagggcgcatcttcacctcgtggctctggcggcagagacgcgcggggcttgctcgggagcgaggagcgaaaagttgtgcgcccacttgggtagggggaaagagagcgatcgagccagcgcgggagagcgaagggggaaggcggggagggggcggggaggggggactgcttacatgaatttccaagtggtagacctgcctctgcgctctgcccaatgagatccgtcaggggaggcacccggctcacttttccacatcacttcacagttacatttggcaggcaggcgggctcgcacgccggagcgctcagcccagaattagtggatttatttggaatctccctgcctcctccaagctccgccgccgccgccggcttgtgcatagacggtagcgtcaagacaccagctgcactttgggttgcggacacccagagcccagcgcgcccgccctgcgtctccgcaccaagccctgtagctccgagaggcatgaacggaatccggaggcgcctgcctagcgagcgaggaccggtcggcgcttgccgccctcgggagctaaccccgagcacctccagccatttgtgaacctggaggcttgacattcgccagcgcagggccccacaagagtaagtgttcccctaacccacccccgttttcctctatgttccgactatccagaagggaccgtttcttataggaattcccatgccccttcggacaccttgcgcgcctcctgcccctcagatggtggatgagggttcttagcataggct

SEQ ID NO: 16222 - DNA, 2300 bp, Homo sapien
tcaccgagacccaggctagagacatcctgcctcattctactttttgcattagtcagccaaggttattctgaatgcaatcttctctccctccccccaactccttctccaattatactcctgccctatcagataattcctcacccttcctcccccgcaatgctccacaacacatgcaatttcacttgccattctaaaaagcctatgtaccacagtcctcttcccgctggaaggctgtaaccctggagaggatgttgaaaagaaaacactttcttaagggggtaggctttcaccattgtgacattacactgcatcttattaagagtgggtggaattgttaaagagataaatgccttgtctttcagcatccctgattattttagaaatatccttatagggctttctaacattatcctaatcctctatcacactgcttaatcatccaaacctctcttaagaattagtcaggaaattcctattgtaacgctttgagcagatattagcaggtatagacaggttaccctgaattccagaggaccaaaattcagggaagacaatgtatataactgctgtaagagtaaatatggacaagatgagtcaaagcaaactcttcttaaccctagatacccaaagccattggattctggctctctttaaaagccattggattctgactatctttactatgtcagcatagtttgttaagaaaatgagatttgaggatattgtctaacaatctggcttttttttttttttttgagacaagtttgttacttgtgacaatccccagctttcagtagcacatgagtttttttgagttttcatagatgtaagaagttaccccaaggaacggttcaaattatttgttcaagtgaaaatgaatatctgaaattaagcacaacccaaaatgtgatctatttctttgtccacttgggactgtctggtctagcagcagttataatttgattgagccttgactgctgctcctttttccaagacagaattagccaattccaataccctgtaagcagacacagtctgagaagagaacaaacagttacttagtgactgcctgggggaaaaaaaataccacttggttctcttcacctctccctctctgaaataatccactaagtttcttgcctatgacagctagaacatgaaacaatcagatattagagctacagccaatactctttttcacatttcacaatgggttgtcagatgcagcacacaaaaaaatgtcaaatttgcataaatatcataagcatgttgtgcctattttctcattctgttcactctttctcattaatttgagtgagacagtacaagctctacagactgtgcgtcttgtcccctgcacctttttcccccttctgttcttgctctgtccccagatggtaaaatccaccctcaggctcacgtctagtgcacacagggaagggactaaatcgggatctcctgtggaggggagggtttttttttttaaggtaagaatttatttgtcttatatttatctaattttattagaagatgatgactgtggcatcgtctacatgttagccccagtgttgaaaaagaaaagaaatctggacctcctgattcatggtcccttttaccccagggtggccatttctcaagatctgagcgcagcccatcagaagacttgaagtgaccacagacagggcaggtcttggtggaggcaggagaaccgcaaggatggtatctgagaggatatgacaagatcagggcacattgagaagacctagaaattcctcccctatttcccaagcaagttctgctttgcctgccctcctccccacaaccaactactgcgcgcccctcctggctgccactctgctgtccctcatcccattttcccaaaggagcacggggacatcaggaatgcgctccatcacagaaccgcgacacacagcctctacatagcgtctgagttgcaggcaggggtctcacaatcaccctattctgtacgcaagaggcccttggaataaagaggaggtaagctgcccacgctcaaccctttgccctgtcgcgtcctcttcctcctacggaaaatagctgcgggtcactgagacgcttttcaacataacgccagccccagagctcaggtgagacctctagagagaaagctcgcaggtacctcatccgcatgctgttattatctgccagcccacttatccaggagctcggtcctcagcgggctgcgcgcaccgcgcggaagggcgcatcttcacctcgtggctctggcggcagagacgcgcggggcttgctcgggagcgagg

SEQ ID NO: 16223 - DNA, 2300 bp, Homo sapien
tcactcttttacattttagccatcctattaggagtgaaatagtatgacatcatatttttagtttgtattttcctaatgactaatgatgggcttttcatgggctcatttgtcattacacctcttatttggtcaagtgtctgttcaaataacttaccagtttttaattggattttgtggttctttattgttgaattttgagaatttcttatatattttagatacaagtcctttattgtatatatgttttaaaaataattcctcacattctatgacttgttttctcattctattaacagtgcttagaataatgctgaataatgctttgcaaacagaagtttttaattttgataaaacccaatttattaagttattcttttgtggatagtatttttcttgttgcatctaagaaatcttatttcatcaaaattctaaaatatttgctccaaaatgaagttttttgaaatatggtctcactctgttgaccaggctggagtgcggtggcatgatcatagctcactgaagccttgatttcctgggctgaagcaatccttctatctcagcctcccaagtagctggaaccacaggtgcacacccagtgatatggtttggctgtgtccccacccaacatctcagcctgaattgtaatcaccacatattggggtagggacctcatgagaggtgatacaatcaggggggtggttctcccatactgttaacatgatattgagttttcatgagatcgcatggtttttttgtttgtttgtttagacggagttttgctctgtagccaggctggagtgcagtggcacgatctcagctcactgcaatgcaacctccaactccctggttcaagagattctcctgctgtgtccagagttggtgggttcttggtctcacttacttcaagagtgaagccacagaccctcatggtgagtgttacagttcttaaagatggtgtgtccggagtttgttccttctgatgtttggacgtattcggagtttcttccttctggtgggttcatggtctccctggcttcaggagtgaagctgcagacctttgcggtgagtgttacagctcttaaggcagttcatctggagttgttcattcctcccgtctggagttgttcattcctcctggcaggttcatggtcttgctggcctcaggagtgaagctgcagaccttcgcagtgagtattacagctcataaaggcagtgtggacccaaagagtgagcagcagcaagatttgttgcaaagagtgaaagaacaaagcctccatgatgtggaaggtaacccaagggagttgctactgctggctcaggcagcctgtttttattcccttatctgaccccacccacatcctatagattggcccattttacagagagctgattggtctgtttaacagagagctgatcagtcagttttgacagggtgctgattggtgcatttataatccctgagctagacacaaaagttctgcaagtccccactagattaggtagacacagagcactgactggtgcatttacaaaccttgagccagacacagggtgctgattggtgcatttacaaaccttgaactagacacagagtgctgattggtgtatgtacaatcccttaactagacattaaggttctccaagtccccactagactcaggaacccagctggcttcacttactggatcccgcagggggactgcaggtggagctgcccgccagtcccatacagtatgtccgcactcctcagcccttgggcggtagatgggaccggcagctgcggagcagggggcggcgctcgtccgggaggctcgggcagtgcaggagcccaccatagtgtggaggcttaggcatggcgggctgcaggtcctgagccctgctgggcagggaggcagctgaggccctgcgagaattccagcgcagcgccagcgggccggcactgctgggggacccggtgcaccctccgcagctgctggcccaagtgctaagcccctcactgcctggggcccgcggtgctggctggcggctcccagtgtggggcccgccgagcccacgcccacccggaactcgcgctggcccacaagcgccacatgcagacccagttcccgaccacgcctttccctccacacctccctgcaagctgagggagccggctccggcctctgccagcccaggaacgggctcccacagtgcagcagcaggctgaagggctcttcaagcgtggccagagtgggcgccgaggccgaggaggcgccgagagcaagcgaggctgccagcacgctgtcacctctcgctgcctc

SEQ ID NO: 16224 - DNA, 2300 bp, Homo sapien
attataatttcaccaattcttttattttctaggttgctgaggtcagatggctatggtatcccaagtaacttatttgttctcaattcgcatcttggagaaagcacctcatcaccctcttgggggcatctccatgttcaaggcatgggtacccttagagttccacatggctggggaagcctcacaattatagttgaaggcgaggaggagcaagtcatatcttacgtggatggcagcaggaaaagagagagagcttgtgcagggaaactcccctttataaacctgtcagatctcctgagacttatttactatcatgagaacagcatggcaaagacctgcaaccatgattcaattgcctcccgctgggtccctcccacaacacatgttgaattcaagatgagatttgggtggggacacagctaaaccatatcagaccttgacccattatttttcctgtaaatatttcagtaaccatcagtggtttcttgagatcttcccctatgttgtgacactctgggaaaagaagaaggaacctattgcatgtccagttcccaactctgtgttcaggcctgtatgggtgcaacaattcttgtcatcctcattattcacatgaaaacatggaggttcagagtgattgattggcatgcccagagtaacccagattgtaaaatatggaagtggtattctgatccagatgcatctgatctccaagtctatgtaccttccactatgccaagattcatgctgtttccttcttgctcccttcttccctgaaccatttcacccaaagaagacaacaaaaaattaggtgatgacagtgattcctacaatgctcagtaagttttccagtttcatttagacccaggtgctgaaacagaatgttatcctcaatatcaatgtatcatcctcctgcacaagaactttctcagattccctcacattggtggtgaactcatctgattctctctctggagtctgggtggcactccagagagagaaggtgattctccagaaaacaaatgtatggttctaagagaggagaacaagcaaggggaattccttagagaagaataagttttcagcatgagaaagtccaatgaagaagtccagaacccaaggcagaagttaaggactggcaataagaaccagagtgctggagagaggacaagagtgactgtggctcagaaacctgtgaggagtgtagaaaggtgaaaggcattactggcttatcctcactggtgttgagtagctgagtcatggctgggtgctgggaacatgaccttgggctggttggttggatatactgttttgttttattttccttctcctagttagtgaaagcttgtaaaatatcctttctgagacttccaggctaagcaaggtaggatctttggcttcgtggatggatctttgccagacaaaagcaaatcttcctccttgaattgacactatacccttaactgatttaccaaagagaccttaatccattatttctcctgtaaatatttcagtaaccatcaatggtttcttgggatcttcccctacatcccttccctaacaggatccattgcctgcccgccttcttcgttactacctccaggcatgctgaacatcttggagcacactgtgcttttggatgtgatgttccttctgcatggaatcccacactctcctttcttattacagcaacctcactaaaggattgagtccagccatctgtcctctccctaaactgaaccccagtgtggattatatgttcctcatctggactcctttaattccccgttttcttattacaaaatcatatctaagcacaattttgatcaattataacagataaatatggagtgcttactatgtaccaggcattgtgctaagagacttatatgcattactcagtgaatcccagtgacagctttgtactgggtacactcttatccccacttcataaatgagcaagctgagctcaaagcagtcagtgagcttccccaaagcccgtagctcccacgtgataaactcatgcccagtcctgaaggcttactgaaaggaatggaaatgaagtggggatttggcctgcagttaatccaacctctctctgcttgcagaagctaactggggacgtgggcagccctgacgtgatgagctcaaccagcagagacattccatcccaagagaggtctgcgtgacgcgtccgggaggccaccctcagcaagaccaccgtacagttggtggaaggggtgacagctgcattctcctgtgcctaccacgtaaccaaaaatgaaggagaactactgtttacaagc

SEQ ID NO: 16225 - DNA, 2300 bp, Homo sapien
aaagttttaggggttacagcagaggccaaaaaggcagacagaggaagcagggtagagctctgaaaaggttcagggccagggacccacagggggaggcaggagtggcaggcaccacgatctgctctctggcgctctacaggaaagcaccgggagtcaatgtcctcgcgcgtcccttgcgcagagtgtggtgcgaggttggggggttactggagacccagggggctatcaccttggacacctatggtggggggaaggctgaggagtaagataaccgggcagctggaaacttacagctcttcccccgcagtggaggaatgaggagttcaaaggccacgtccacacagagggtgacagaggcatcctctccgcgcaggacgcggactgggggcaggcacgcagcgccacccggatcctggagtcgtcaagaaaaacgcgggcgcgcaggccgaagagggtaggtcccggggcagcctcgccggcacccgcccccgcgggcgtctccccaagccgtgtggaaacccgggcggctgcgggcgctcgggacccgcgggctggtgaccaggagctggagggcagggctcggccgctcttgccttagccccgcactggggttccttccccatgcgctcaggatcccaagctttctcttccgttttcggcctctttttccgttaactcctgggcccgtctcctcccctctagccctttcaaactgcttggctgtggcgcccagctttccctccgcagcctccttccccgtctttttcgcgggtccatctcttctcctttcccagcctcatccccgtccccctaggcggttcctttttagccttcacccactggcgtctccaccttcctccgcctcctctcttgcctccacctcccaccctgcaaacttgttcaagccaggggtccccacacaggcatggttgttccctgctgggtgtgcggatccccacgccgttcccggtaccgcgagcgccccgcccagtccttggcgtgattcctaagccccggccctgccagccctttctcccggcgactcggggagggagggcaggaagcaggcccggggaaccctcacggtagcgagtcgtcagtgaggggaacagcggaggaaggagctaggactccggcgctgcgccccattaggccctttctcccgtagaaacgcacactccaccgggccctggcgggtctgtagcgagggagtggcaacaagtgacactaccggcgggggccactgatacctggctggggtaggggccaaggcaccctcccaaaagctggagcgaggccgaccccggcgaagcgctccccgcgcacccctctccgaggcgttgcgtggggggcactagacgagaggagagctgagagagaacggagactgggctcttcccaagtcctaagtctccctccccgcccgacttcaccaccagagccaccagaagagtttgcaagggatgggagattgagaggggtgggggctgggcaggagccgccaacgttgagggatttttggaaggtggggtggtggagtgagaaagaatagaacgcgctcccgaattcccaattgcttccctcacttggacgataccttcccccaaccaccatcccggcccgccaggcgagagcccagcctggccagctggagcggatttgggggaaggaggaaaatgggggctcccaacccctctccagcttccctccgccgccctccctgattggctgtgcgtccctggagcccaacttcagtcgctccagactccatctgagccctgagggagtcggagcgccgcgccacggggcgggaggggcggccacgaatccaggggttagcatctctgggcccctggggggaggggcgcggacggggtcggcccccgcagcctctgcgaggcccatctcgctgcctctcgcagcctcggcttctctcagcccccgccctttccttccctcacagcggcagcctccctcctcccgccccccccgccccgcacccgcctgcccgcccgccacctccccccggtttctcattcctgccactagcgcgctcggcggctcattccgcggccgccgccagctgaggggagcgtcgcgggccgaggagcagatgccgcgggggccgctcgcagccgccgctgacttgtgaatgggaccgggactggggccgggactgacaccgcagcgcttgccctgcgccagggactggcggctcggaggttgcgtccaccctcaagggccccaggtgaggtgcgccgccagtcccttcctctcgcctggttggggcttcttggaat

SEQ ID NO: 16226 - DNA, 2300 bp, Homo sapien
cttgaggaacatacatcaaattgttaactctgtttatcttggaaggaagtagcaagtgttataaggcatatttctgtgtccctgtcagggaacatggtccttgattccctgatgacctgcactcattacctaatcgattccattaagcactaattagggagtagagacatgcaaggggacatttctatttatgatctgggtccaatatcaggttgctagtgttacactgagagccccaatgtcaggcgtaaagacctttcaaaagaactcatccctgcaggactgtattttcacagccacattcctgctgatctcattttgggtcactggctcccagtcatgattcctcatcatttcctgccttcttgaccttctcagttgagcagttcttgtaccgaactcacctcagttctgtttgatttttatgtcttctaagatttagagtctttcctaaggctgcctgtgtatcaaagctcaacttaccctttcttttgtggtacggggatttttatttccatgataatgctgagcctgaacaattgttcccaagttaggatgggtaagactgaaggtgattttatcctatggttttaatctttggatcacacctgtcttttcaaggtgaagcacagaaatatattctagggagctgttgatgaaatcactgaggctggagctggctaatttttaagtaaattgtaataactattggcaattattctgataatctctctttgaaaacaaaagctctgggcagcatgacaagtatcttggagtaccatcctactgacaacaacataattattattatagctgttattattccccagaagtttatttgcaaactttaaatggcaggtagttttaatctggtttgctgccagataccgggtgtccctccctctgtcttggttaacaatgcctataaacatcacctggaaataagtctgccttgcttggaccatttctgtgatacaaagtggtaaaagatgatgaaacatcaggggatttaactatatcaacatgattggcattgctgctggtgctattattaccatgaatatagggtcttatatgggaaagacactataagctcatcgcattaagacaagacttcttgtcttcccaaggaaacagcaaggcaaaccatttcagagattatgacattaaggacctgagaggtcatgtgatttgatgaaggtcatcagtaagtggtggaaccatgattttttttttttttttttttttttttttgagacaggatcttgctctgtcactcaggctggagtggagtggcatgatcacatctcactgcaacctctaacagctgatctcaagtcagccccctcctcagcctcctgagaagctaggactacaggcatgtaccagcacacttggctaagatttttattttgtgtagagatgggggtctcaatatgttgcccaggctggtggaaccatgattctgatgtgcactttcctgacccagaaccccaacacattatccaactcaggcttccatggagtaaccacaaacttgctcttggtgtcatcccacctttgaaaggaattcaatcgactctgaaatgctgagggcattcagcatctgacaaatccgagtgttaaggaaaggtacctctaattcctggtttggagccaccatgaagctgtggggacctatgaatcggcgtcttctcttcttcctaaccacaactatgcatattggaagctccaatacctccacactgtgctgcctcagcacacagctgtgggatgtcttccagagaagacgtttattttcactgacccatcctctcccacgctttagttttatttttttttaaatgggtcaaagtgtgaacaatcatcatccacatgaaatcttccagctgcttctggagctgtttggagaccaacgtctgaaagccaactcttcaatcatttctcagagggaagagccctggggacaaggccagggctaagagggacgagagagccaggaaagtccaggccaagggtgcctcttgaaccttgtggctgaggggagcaggctgttgggatgatcagcagacatggaaagtccttccagctctacccctgtgtatttcccagcgaatgctctcggattttaggacttacctcctaaaattttcacttggtctaaagcaaaaggccccaggctttctgtcaggagctgcaacttttcatctgatgaggaggtaatgagatttgctgaattctggctatggggttctgtgttaaatactttttttaatcttttttttttttgagacaaactt

SEQ ID NO: 16227 - DNA, 2300 bp, Homo sapien
agacaaagtaacacccaactcacggaagtgttacacttccaagaagccttctctgatcccctgtcatgtggagtgtggcatttcaggcttcatgtgctcttgataaaacacagatcctacttctatagctgtggcagggcctgggctactgcattttgaataagcatccgggtgatgctgatgcttcaggtccgtggaccatgctttgagtagcaaggatgtagaatttgttattccttttttttgtgtatctccattatcataatggtagtcataagcatgtttggagatgtgtttgcgtgtgtgtgtgtgtgtgtcggggggtgttttctcatgtctcccttgtgactgggcacacctataggacagggacaatgtctcctctctctctctccattcttcacaaatgagtcttccattgaccagagctcaagacaactttcacaggcaggagggtagcagctgcttcctctgtccaccttctgatgctttgaatcaagtcggccactgtgatctaggatggggaagcctagctacgtttactgagtaactctgttgttccatcttagggaccctccactgccatttattctcagaatccagtgtccctagggccactttgctcatgaacagagctttctcttcacctccaccccctgctatgttggcttctagaattcggtcctgggctttgagcccagggtccagtgtcccttcagtctgatgcctgctagtttctacttatggacctataggctgacgccctggatggagagtcattgaccactcacctgaagcctcaggcttggcactctttgtccccattcctggatctgtgacctcagtgctggaaatctgagttagctctcagtgccctggggaagctgggcctgacccctgaactgaaccaacagagggtgttcactgctttcccgctcaccaaaccccactccctctgctcagctcatatcacatttggtctggttggagccccctccaaaatgacctcatgcttctcagtgtgcagagtcatgaaccagggaatcaccaaattgttgacgaaatggttgaaatatgggaagaagtaatgcttttcaggtaagagagaaagaataaagaacacaatctcctcttcaggcttatcaaggtgctctgagtatctaggggtagacatgagtgtatgaatcaaaagtcagaggaagctttttttttgagacagagtcttgctctgtcacccagaccttagtgcagtggtgctatctcggctcactgcaaactcagcctcccaggttcaagcaattctcctgcctcagcctcctgagtagctgggattacaggcacctgacaccacgcccagctaatttttgtatttttggtagagacggggtttcaccatattggccaggctggtctggaactcctgacctcaggtgatccgcccgcctgggccccgcaaagtgctgggattacaggcgtgagccacggcgcccagccagaggaagcttttaaatcctgtgcattgtctaaggctccttctagcaccaacagcgccccctcatgcacaaacacatgcacatgcacacattcacactcacctccctccagacccctgccacaacgttgggctcagcctgttgtatagacgccactcatgtcagtttcatttagttctgtctcactctgggtttctctttctcttttcatccctcattgcccatctctctctcttcccttccattatcctctccctctgtacctctctccctctgtttctctgttccctaccattctgggcctctgtcttgttcctttatcccttcctcactctctcactcctggtgctgtatttgtttctcccctacacttgtctctcagctccatctgctttctctggttctttctcccttggaccttggtatggtttggctctgtgtctccacccaaaactcatctcaagttgtaatcctcacgtgtcgagggaggcacctggtgggaggtgattttaatatggaagtggtttccgccacgctgttctcgtgatagtgaatgagttctcacgagaactgatggtttaaaaatgtggcacttccccttcgatcccttgctcgctgctgctgccacgtaagaagtgtgttgcttccccttcgtcttccaccatgaatgtaagtttcctgaggctttcccagccatgcggaacagtgagtcagttaaacctcctttctttataaattacccagtctcaggtggtatctttatagcagtgtgaaaacagattaatacaggctgtttctcatctgatt

SEQ ID NO: 16228 - DNA, 2300 bp, Homo sapien
caggacaggccctgtccccatctgccacagccccgagtctgagacccagcaggaagcaatgcacaggccagtgtatccccatgggcacgtagaccatgaggacaggcgggggtgagggggatgtggactggaacacaggggacagagcactgtcctggctcctctgcggccaaccccccctctgggcaggagaaagcagagttaatcccattggagaaggaagcgctgagctgttgtttgttcattccacaatcggctgttgaatgtgttggatcccactcagaattccgccccaaggactgttctccttccagcaggtcgctcctcagtctccagcatcatctgtcttcccgtctgctggatgctccctggggacatgagcgtgctgccatagttaaaaaaaaaaaaaaaaaaaaaaaaaaaaaaccctcccacttctctgctcccattcactgtaagacttggggaagaagctacagtcacacgtgactccacatccccgtccccctttctcccctttctctagcccctccaatctgtcttgtctaccttttcctgtttaacctgttctggtcacagtcattgatgacctcatcttccaaatccaaagttaagtctcagccctcatgctccccaggctgacccactgactactcccctgccctcctcctctgccctctcctggcattcctccttcatcatgggaccctcttctaatggatccccaaatgtcagagggtccaagtcctccctccctccaagctcatccatgcccatggcctcagatgccagccataagctgttgggttccaaacctcgactccaggctggactcacccctgtctcccccaccagcctgacacctccacctgggtatctaacgagcatctcaaactcaacctgcctgagacagaggaatcactatcccctcctcctccaaaaatatccttccatcacactccccatcttgtgctctgatttactaaacggccctgggccctctctttctcagggtctctgcttgcccagctatataataaaacaagtttgggacttcccaaccattcacccatggaaaaacagaagcaactcttcaaaggacagattcccaggatctgccctgggagattccaaatcagttgatctggggtgagcccagtcctctgtagtttttagaagctcctcctatgtctctcctggtcagcagaatcttggcccctcccttccccccagcctcttggttcttctgggctctgatccagcctcagcgtcactgtcttccacgcccctctttgattctcgtttatgtcaaaagccttgtgaggatgaggctgtgattatccccattttacagatgaggaaactgtggctccaggatgacacaactggccagaggtcacatcagaagcagagctgggtcacttgactccacccaatatccctaaatgcaaacatcccctacagaccgaggctggcaccttagagctggagtccatgcccgctctgaccaggagaagccaacctggtcctccagagccaagagcttctgtccctttcccatctcctgaagcctccctgtcacctttaaagtccattcccacaaagacatcatgggatcaccacagaaaatcaagctctggggctaggctgaccccagctagatttttggctcttttataccccagctgggtggacaagcaccttaaacccgctgagcctcagcttcccgggctataaaatgggggtgatgacacctgcctgtagcattccaaggagggttaaatgtgatgctgcagccaagggtccccacagccaggctctttgcaggtgctgggttcagagtcccagagctgaggccgggagtaggggttcaagtggggtgccccaggcagggtccagtgccagccctctgtggagacagccatccggggccgaggcagccgcccaccgcagggcctgcctatctgcagccagcccagccctcacaaaggaacaataacaggaaaccatcccagggggaagtgggccagggccagctggaaaacctgaaggggaggcagccaggcctccctcgccagcggggtgtggctcccctccaaagacggtcggctgacaggctccacagagctccactcacgctcagccctggacggacaggcagtccaacggaacagaaacatccctcagcccacaggcacggtgagtgggggctcccacactcccctccaccccaaacccgccaccctgcgcccaagatgggagggtcctcagcttccccatctgtagaatgggcatcgtcc

SEQ ID NO: 16229 - DNA, 2300 bp, Homo sapien
acccagatggggatgagatgtggccagagccacacaggcaagttagggacagagttgggcctagacactctcccattcccctagaccaccctcaaccgttgcctcctgggtcccaggacaatgcgaatctacagacttcccagacctggggggctagaggctgaaccaaggagcatcgtccgcggctgttgggttggtaatgggaaatgaccactagggggcgcgctgtgtcaataaatgctcagccagggccggtgtctgcgagctccgcggccgggcatcctggcaatcaatggaccgcaggttctgggggttctggaccttgacagagaacctggtctggccctacaacctgcctgggctctcgctacgctcctccgtcgcaccaggctctgatggggtagagagagccagggacctagtcccccaccttcccgaaggaacggggtacccgctgtctccagcagcccagccagcaccaagaatctcggctctccgagagcggctgaccttggccgccggatctttggatttgtgagggtcacagtgcaccacaccatccctccctgcaccgggtggccctgccgcagtgtccacgcctcgtcctcctgctcggctccgccctattttcgccaagccaatcctggaaggttgactctgggccaggaacggagctgcagtccctgagcgccctggtttcaaggcgcctcccaggtcaagaatccttcgaataaatcctactgtcttcaaggtgactggtagagtctctgatgttcacaatcaaaacctcagaccacccagcaatcccccttctagggattgctaaggacctcctagggacctaagatgcactgggtgtatctgcctcagtaaattcagtgttacttacaagcaaaagattcgaaacaatgtaaatgtccaacaataagagattggttaggtaaattatggcaaatccacaaaacactaccgggcaaccattaaaagtcatgttgggacgtggtgatcttgagctaaattcaaggtcaaggctaaaaagcaaaacccaatgaattatttacagtcagatctcaattttttctagtagatatccatcttcaggttatgaaattatgaaaaatttttattttcttctctattctgtgttttccaaatttcctataagtagtatatattatttttataatcagaaaaaaaaagttatcttaatgttgatttctaagcacttttttgtcactggaaaacagtgaattgataagcaaaatttatccccaaatatcattttttaacactaaaactttctgtttttttaaaaagttgagttcactattaatgcaacagacttttaagaattaccagcctgaccaacatagcgaaaccctgtctctactaaaaatacaaaaattagccaggcatggtggcagctgcctataatcccagctactcaggaggctgaggcaggagaatcgcttgaacctcagaggcagaggttgcagtgagccaagatcgcaccactgctctccagcctgggcgacggagtgagactgtcaaaaaaaaaaaaagaattaactgaattgtttttgaagtcatcacccttgaatccagaaaatctgttgttaaagggttgattaattttgtctgtttgcttacttctgaaagcatttctttgaatttcatcggtgggagtctaatcctgttaacctttgaagttaacagcaaatttccagccactttctggatcagagcagttacagtctatgatatgagggaaacccggtttttcagccaagtgacttccataggattctgcagtgcatagaaatatccaccattcctcttcctcaaagataagagaaacagctggggcctatttctctcagcccatccagaggttatttgggatgtttaggaaatctgtgtatcccccaacacttaaggagacttcacaaaactttgcaatgtggtcttgtagcctagggcatagaaagcacagttatcttataatattcctgtataatggttgccaaggggatgtttaatgttgttacgcaggaagctgtgctgaacaagagtcttttgctttcagatcagactctgggcaggaagtgaatcttcacagggaaggaagcaacaaaactctgcctttggcttttgctggctgagcagggaaaggcctatagacacagggcattgggcaggagctagaacagccctccctagagcactacataaagcagccaatattttgcaaagcatagggaagagtgaaagtcatccggggcatttgcagacacagcact

SEQ ID NO: 16230 - DNA, 2300 bp, Homo sapien
attaactctttagggctaggaccttccgcaaggactcactcaaagtgtgccacacacacttatccctggtccccccacccccaccacaacacacacacacacaaacacacagagtcttgccaaagggggcagcttacaggcaaaaccactcaacaactagaatatccatcctggaagggtcagcaggtgtcctcagagagatcaaggttataccgtgggcacagccctagcttgggagttgtagagcctccaatcctacctctttgaccctagcctatcccctcctttctctgatccttcatttattcattcataaaataaatgcatgaggttggacaaagggtctctcaggtccccttcctcggttctctgagaattgtttccctttattctagcctcatcccttactcagagctgatgtccccgtgacagccccagcctgcaggagggcggggagtgggggcggggggggggcggtaaatagtgcagggagcagagcccagaatgaacagttaccagaggaggctgggagatgtcctcaagcacccaagccctagaccacgcagcttcccctgcctggccccagggaagcccaagacgtgatgactggcagggctggggtttgttttctccaccggagcctgctctgccccatcctccctgcaaggccagtccctggccaactttcccttccacaacatccccatggcttcactgcttccccaaggtttagcatcaacatgttcagccctttgtcaccatgctttatttttgagaaccactttcccgccagtgacaagcctttgggttttgaaacgaacccagcttttgactccccttgcctcctaagccccagtttcctcatcaacagtagtggttcagagagtgttagcaacaacacatttcatcaattcctgcagcaaattcactgagtgcccactctgtgcagacccctgcagccctacccagacgctgccctcctggcgctcccaggcaagtggcggaggttaaataaataactcctccacgctggcgagcaccccaacacagtaggggtgcaatcattgggagcaatatcctaatgaggacagggaggcctgagagatgggctgggattcgtccaaggccccaaagcagggtggggacagagcaggtcctggaagcctggaaccccggcctgagccaggcatcccctcggggccggcttccacctgccagggctgagccctatgccctgacgtttgggcagcggggaacgggggcacagggagggtgacggggtgaaggaaacaggcctgctggtggctccgaaggaaggtttgggccaggcctagctggaatcccaaaactcacctgccagcaaccgcgagcgggaagccctgccaggctcgcctgcccctgccagcggcccagccacgctgggtccccctctccatcccgcactttgctctttgcccgcgacaggggtcccctgctcaaatgcccagcctagcctcggtccaacctgtctggctgtccttccctgacacctcgtttgtctacccttctctgcacgtgtcagtggctccccgctcgcgtccgtgtgtcattccctacacacgcctgtgtgtcctcttcacacgtctgactggagcgtcggcctcccgcatttcccggcctcctcgccgccctgccccgcctgctgctgtgtgggtgtcgggctggctgtgcgcaaaggggcgcggctcggccctcccccgcacccgcgccccccgccccgcatctcggagtgacccgggccgcggcgccgcggtgctgaggcccgggagccgcgccgccgccgaggggggccggggccggtgacggtggcgtgggcggcggcgcggggacgacgggcggccgggcggggctgcggcagggcagggccagggccagggccggggcctgggaagccgccgccgccgctgcctcggcccgggatcgcgggcggctggtcggcccggctcgcctggccccgcctggcccgccccgccccgcccctgcgcgcccagcaggccgaagcgtagcggcgcgccccccgcgacgcccgagcccgagcgcagtggcctccgagcgggaaccggactgggagccggagccggggcgggaaccggagctggagccgaagctggagccggcactgcggcgcacggagcggagcgctgcagccaagccgagtaaggggcgtggggctgggcggcgcgggggaggggcgggcggggggtcccggccccattcccccgcgctctgcggtggtaccggcgaacgacacacccgggggc

SEQ ID NO: 16231 - DNA, 2300 bp, Homo sapien
ctgagtctcagagtgagttggccagacccgagggaaggcagtctgtgccagtgccatcacacctggcagttgtcactgatccagcatcttcagcgaagactctagacccgggtctcagttttcaccatttgggatagtagttcctctgatgtgaccttcctccttccgtggatgacacagagcctcatttcacctttgtttggtgactcaggtcatcagaaggaatgtcattgtctggtctgggctgtcacacagtgatgcccttaggaatgctgaggtgtgtggaactgtctgccctgcccactaatgtctctgcgttcctgtgtttactttttacagtaatcctcctttctcttgctgccatgtgtcatttctgactgatattgatgtgtctgtcccgtcagcatttccttacttccccatctccttgttttccagtttgctgtttccagatttctttactcagacaaataagcagtggcccagatgctcccaagaaatgcggagtctggggtccctccgagtcttgattggagggaacctaagatggttacatatacaacatgggattggctgtgaggcagggttgtgcgcaagctttggtgcatggctataggagcattgtttgatgggatgtgaggcagggctgtgcatgagcttttgtgcgtggccataggaatatctgtttgggctcaaacacttctgcttatggctcttgcaggcagtgaggttgccggaaagtgagatattactgtagtaattttttgtttgtttgtttttgagacagagcctcactctgttgcccagactggaatgcagtgacgcaatctcggctcgctgcaacctctgcctcctgggttcaaatgattctcttgcctcagcctcctgaatagctgggactacaggcgcatgccaccatgcctggataattttttatatttttcgtagagatgggattttgccacgttggccaagctggtctcaaactcctggcctcaagtgatctgcctgcctcggcctcccaaaattctgggatcacaggcgtgagccactgcacccggcctactgtagtagatttttaaataagtacagcttatttttctccctcattatggaaaaaaaggagggtagaaagtgatgagggaaaaaaacaaatcattcatgagcttacagggtctcactgtgttgcccaggctggtctcaaactcctgggctcgtgtaatcttcaggtctcagcctcccaaagtgcttggataatagacatgagccaccatacctagctcttgtagtacattcttaagtgaaaacctcattggaaatgtagattgccctagagctgaaagcgatttggctctaaccttcctttttatctgcctgcaaccttctgtgcccttccctgccccctgctgcctgcttccatctgtctgtctccagctgtgaaaggaggatgctgctgaggtcagtgcagccttgtgacccatgtgtctaatttccaggtgattgaggctgaccaccacatggagaggatgttagaactctttgaacaaaatcgggatcgaatattaactccagagaatcggaagcattgcccataggaggcaaaaggtctatggctcatgtctgaaaaatgcctgctgctgccaagttagctattgggagcaatctggaaaaacttgctcccaggagggctttgtgtctggccagcttgattttcctaatggtctcatctcctttgctagtgtctttgtcatgcgtctctggccctcgtgggtaaatgacaaacgggaccaatgggtttgccaagccctttgctgttcgcagcctcacattcccccggtgcctctcccatggctttgtgctgctgagtcgctctcatgaagcccttagggagagcacctgttgtgtgcctgacaccacgctggagctgtgtaccaatcgtctcagccttcattaggaggccgaggtaggagtcttatatcccaggtgaggaatttgaagctcagaaaggttgaggggctccccagaggtcacacagcctgtgtgcagtggagctggcaccattcagactttcagccgactcagcaactttcccttgccctgggctgcctcctcctgagagctgttccccaccgccctgcctcttccggttggaggctctcatgtctctttggggagagctggcagtgtgcggagctgataacattttcccaatattgagcagttcccaaggacagtcagcatttctagacttccacaaaattatgctgcatttggctggagcccggtgttcagtggtttcc

SEQ ID NO: 16232 - DNA, 2300 bp, Homo sapien
gtgcctgcctcactcttccagcctcttacttccttccatgctcatcccctcgtgggactggagtcagcccctccctgccccctccccactgagagcctcccattgcacatggctcaggtacggccactcccccatggccagtcttgccgaacccagctctgagcgggacccacatggagccactagtggaatggaggatgttaaagggagaattcctctgctaggcctgtgagggttgtctgcctgctgatgggcttgtgccctccagctgtgtccattcctgctctctctttcctgttcatttcctcccagggcacaggaaacccacaggaataccaggaatagatgccagatttctccttcaccctggctcgttcttccttcccactttcttgcctttttttctttcttttaaagttaacatttaaaatgtgtagtaggccgggcgcagtggctcatgcctgtaatcccagcactttgggaggccgaggcgggtggatcatttgaggtcaggagttcgagaccagcctggccaacatagtgaaaccccgtgtctactaaaaatacaaaaattagccaggcatggtggcgcacacctgtagtcccagctactcaggaggctgaggcaggagaatcgcttgaacctaggaggcggagattgctgtgagctgagatcacgccactgcactccagcctgggcgacagagtgaaactctgtcttaaaaaaataaaaaatagaccatcctggctaacacggtgaaaccctgtctctactaaaaatacaaaaaattagcccggcgtggtggcgggtgcctgtagtcccagctactcgggaggctgaggcaggagaatggcgtgaacctggggggcggagcttgcagtgagccaagatcacactactgcactccagcctgggcgacagagcgacactacgtctcaaaaaataaaaaaaaaaaataaataaaaactaaaatatgtagtaatgctccccaactcccactgctgatttgagaagtaatgtgttgttaaaatttggaaaatacaaaaaggtataaagaaaaaaagaaaagtctcatgtagtcctgcagcttgagaaaagcactttttacattttgatatttttctttcccacctttccaagatgcattggtgaatacttttggaaatgtggttgggatatacacagttttagatcctgttgctttcactgaacattagatttgaaatttttccatgccattaaatattattttacaatatcatccttcagttactgcgtgaattttctgttatatagatttaccaagatttagttttttattggtttaaacagtgccgcggtgagcatcatgattattttcacaaaataaatttttttgttttgtttgagtcaggggtctcactctgttgcccaggctggagtgcagtggcatgatcatgacccactacagccttaaacccctgggctcaagtgatccacctgcctcagtttcccgagtagctaggaccataggcatgcgccaccacccctagttaatttttttgtagtttttgtagagatgggggtctttccatgttgcccaggcagatcttgaacttctggcctcaagtgatcctcccacctcaccctcccaaagtgctgggattacaggcataagccaccaccctggtccacaaaataaatttctagaagtgaaattggtttgctgattcattgcctaacctgagcactgtctctgttctcagggtacaagctttaaagtccctttctctgcttagagttccaatcccaagtgaattctcccatcactccgtgccatggcccttgcagcattgtgccataagccgctcccaggcagcaggaggtcgggaatgcttagggtccttgtcactgcatgtccagtattgcacggatcacactgtgccctggtacccttggtgactcctttcattgagagccgtctcaagatccttttgggggaattgcatagcccagaagttttctcttaggtgaataagcccttacaactctcattgcagtgggaagatgccagaagtggactatgtagttctgtcggaatggtttgactggatcttgaggaacatggacgtgtctgttgatttgataggtgagatgcacccctcccacctccctctcttgtctctctcctgggtcccttgaggatgtgcttggctgggccccaacccttgggggcagtgggtgaggcacttgcccttggcagttccttccccatgggagttcagctttctccctgagggcagacagaattcgggacttc

SEQ ID NO: 16233 - DNA, 2300 bp, Homo sapien
ggccgtccgctctggcttgtgctgtctttcagttatcgcgtagcacattagcggacctagagctgggcacatattagcggacctagaggtgggcacgcaggccagcgccctgttagcccgccgtgttctggcctggcgttaatgacggcagcactccagctctcctgaggagtcttcctgtcgggaaatcctcccagggttgggagcagaggagagggagggggctgtagaaatggcggccccatctcccaacaacttgggcattgtgaatatcacctccttaaaggggatctcctttggtcatcccgtctagagcagccaccataacttctgagcgtttattgctagctgatatatatcagaaaaatacaaattccacaaaagcagggactggtctgcttctctccctgcagggcccaggttctggcacatagttggtgcagaaagtgtgcagcctcaggtcctatccaagcccccagggcatcacactcgggacttgttctgcatatttttacttttgcctcccactggtactagttcttccgtggaacagcctgagtcccttcagatacttaatgttttttctcaagtgctgccatgaagccagatctccaccgtcttggggcattcctttttagggatgggaagtatatgtcgctccttttatgtgatttacattctatcttggataatttggccatcaccgtagttcattcagatctgtttggatcctgcccatctcagcttcagtccatttcattcttttaaatctgatcgacagttacctccaacagcttcatcacaaatcactcacaaaaatggccttaatcctgaagtttatttacggagagcacacttgctaggtgtgtggcagatatacaggaagcacaagatgaggcagcagatctagaggcaaatgacttccttctccctgcctagtggtgactgccagcatcacgccctcccgggagaggtgagaaacccctccacgcaagcactggaaccttcacagtcaagagtggcaacagctccggttactggacttgggcctgttgaattctaatactctgtgactccacatctgggctgaatttttgctgagtatgatggaatttacatgcttcctccctagcccctacttgtctgtatagttggaatatttggttgcctcctctggagggatctagtacgtttagagtctagacgctggaactgtcaaagttcagaggaaagagctccagctgcaaagcaagagaaatgggctggaattctagcttcaccccttaatgaatgcttctgatttttttttttttttttttttttgagacgtagtctcactctatcgcccaggctggattgcagtggccacgatctcagctcactgcaacctccgcctcccagactcaagcgattctcgtgcctgagcctcctgagtagctgggattacaggcgtgcgctaccacgcccggctaatttttgtatttttagtagagacagtttttggccatgttggtcaggctggtcttgaactcatgacctcaagtgatctaccttcctcggcctccgaaagtgctgggattacaggcccgagccaccgcgcccagccgcttctgatcattaaaaaaaaattttttttttggcggggggaacgaagtgtccctctgttgctcaggctggagtgcagtgcagtgatctcggctcactgcaatctctgcctcccaggttcaagcgattttcctgcctcagcctcctgagtagctgggaatacgggtgccccccaccacacccagctaatttttgcatttttagtagcgatggggtttcgccatgttggccaaggctggtctcgaacttctggcctcaggtgatctgccttccttggcctcccaaagtgctgggattacaggcgtgagccaccgtgcctggccaaaaaatttatgttttaaaaagactagtcaagtgcagtagtgagaaggggggaaagagtagagcaaggagttatatctgttgcttctgaccattttgaacaagttacctaattctctgaggacaagctcggagaatgggagagacagttatctatttgcagggttgttgggaggaataagtgacatcatgagtgtgtgccaggtgtctgattacagaaggtgttcaattaatctgcaatcattaattaacccttcagtcgctggtattatttgccatccatcctccgagtgttgccaagttatgggtgcgttctgccagcgtcctagcagtggtaaggcttctggctgccagcggcgaacctctcccttcga

SEQ ID NO: 16234 - DNA, 2300 bp, Homo sapien
cagagaattaggtaacttgttcaaaatggtcagaagcaacagatataactccttgctctactctttccccccttctcactactgcacttgactagtctttttaaaacataaattttttggccaggcacggtggctcacgcctgtaatcccagcactttgggaggccaaggaaggcagatcacctgaggccagaagttcgagaccagccttggccaacatggcgaaaccccatcgctactaaaaatgcaaaaattagctgggtgtggtggggggcacccgtattcccagctactcaggaggctgaggcaggaaaatcgcttgaacctgggaggcagagattgcagtgagccgagatcactgcactgcactccagcctgagcaacagagggacacttcgttccccccgccaaaaaaaaaatttttttttaatgatcagaagcggctgggcgcggtggctcgggcctgtaatcccagcactttcggaggccgaggaaggtagatcacttgaggtcatgagttcaagaccagcctgaccaacatggccaaaaactgtctctactaaaaatacaaaaattagccgggcgtggtagcgcacgcctgtaatcccagctactcaggaggctcaggcacgagaatcgcttgagtctgggaggcggaggttgcagtgagctgagatcgtggccactgcaatccagcctgggcgatagagtgagactacgtctcaaaaaaaaaaaaaaaaaaaaaaatcagaagcattcattaaggggtgaagctagaattccagcccatttctcttgctttgcagctggagctctttcctctgaactttgacagttccagcgtctagactctaaacgtactagatccctccagaggaggcaaccaaatattccaactatacagacaagtaggggctagggaggaagcatgtaaattccatcatactcagcaaaaattcagcccagatgtggagtcacagagtattagaattcaacaggcccaagtccagtaaccggagctgttgccactcttgactgtgaaggttccagtgcttgcgtggaggggtttctcacctctcccgggagggcgtgatgctggcagtcaccactaggcagggagaaggaagtcatttgcctctagatctgctgcctcatcttgtgcttcctgtatatctgccacacacctagcaagtgtgctctccgtaaataaacttcaggattaaggccatttttgtgagtgatttgtgatgaagctgttggaggtaactgtcgatcagatttaaaagaatgaaatggactgaagctgagatgggcaggatccaaacagatctgaatgaactacggtgatggccaaattatccaagatagaatgtaaatcacataaaaggagcgacatatacttcccatccctaaaaaggaatgccccaagacggtggagatctggcttcatggcagcacttgagaaaaaacattaagtatctgaagggactcaggctgttccacggaagaactagtaccagtgggaggcaaaagtaaaaatatgcagaacaagtcccgagtgtgatgccctgggggcttggataggacctgaggctgcacactttctgcaccaactatgtgccagaacctgggccctgcagggagagaagcagaccagtccctgcttttgtggaatttgtatttttctgatatatatcagctagcaataaacgctcagaagttatggtggctgctctagacgggatgaccaaaggagatcccctttaaggaggtgatattcacaatgcccaagttgttgggagatggggccgccatttctacagccccctccctctcctctgctcccaaccctgggaggatttcccgacaggaagactcctcaggagagctggagtgctgccgtcattaacgccaggccagaacacggcgggctaacagggcgctggcctgcgtgcccacctctaggtccgctaatatgtgcccagctctaggtccgctaatgtgctacgcgataactgaaagacagcacaagccagagcggacggccgcgggatcccgttggggcgcatgcgcgagagcgaacgcggcgccgtgcgcatgcgcgcaagagagcgggaagccgagctgggcgagaagtaggggagggcggtgctccgccgcggtggcggttgctatcgcttcgcagaacctactcaggcagccagctgagaagagttgagggaaagtgctgctgctgggtctgcagacgcgatggataacgtgcagccgaaaataaaacatcgccccttctgcttcagtgtg

SEQ ID NO: 16235 - DNA, 2300 bp, Homo sapien
gctagtctgaatcaagatcagctgtaagtataaaaatacacatttaatttcaaagatttattacccccaacaaggaatgtagaatattttgttaataactttgttgattacatgttaaatgataatattttagacatactgagctaaatatattaaaatctatgacttatttttttcttttttttttttttctgagacagagtctgtctctgtcgcccaggctggtggagtgcagtggtgctatctcagctcactgcaagctctgcctcccgggttcacgccattctcctgcctcagcctcccaagtagctgggactacaggcatccgccaccatgcctggctaattttttgtatttttagtagagacggagtttcaccgtgttaacaaggatggtctcgatcttccgacgtcgtgatccgcctgcctcggtctcccaaagtgctgggattacaggcgtgagccaccgcgcccggccgacttttttctttacatttataatgtggctgttaaaaaatctttaattatgtggctgtgttacactggtgactcatattatgctgctttcagacagcactgactagagtgtgagccccgtcctcaagttgcttagagcttaacacaggagacacaagtggaaaccgctgtatataagctgttgacagggagctgcatggtgcagaaaagaggaaactacctctctggcagtggaattgctgtttgctgagaataaaggaaaaaaaatggaaaaggttccaggtagaggagccaatagtgtacagagtgccagtcatgaaaagattggtaggaggtattcagtgtggtcagaacctaggaggcagtggcttgagactctgggtggaaaaggagactgtgagagccatgtctggagccaggaagccaaacttcctgatgactggaagaagctgaccaaacagcatgcaaggaatgacatccccctctcccaccccaggcaccagctctcagatagccatcagagtgtctgaaggcccccacgtgttcttagttattgtttttatctaattttactttcttaaggtctatttagaatctcaccctttaagcagatgtagcctagcctttgagagttcactttggatcatcttattaactccagttttctggagctacagtccccatgatttaatattgagctggtgttaactttgaccttttcttctgtagagtttgtcagtagagaagtcagagttgaacactggggttagaaatattaataactaaatatcctcagtagggcttaaaagaatacatgcaagagcaggtcaagagataaaagcaaacaagtatggatttcagagcccacactgctttattatttttctgctcacttaaattatcttttctctttctataggcaagtatttagaaaacttagcaatgaggagaataagatgatctctgaagtctctccatgttagtattagatgaagcacagggagcaatccgagtaccctagcaagagaggaatctggtgggcagaccacttaaaacttgtgtgaatgacaggagtggggaccatggttagggcagtgacacttgtctttctttccaggtgtttgcacttgtgacagcagtatgctgtcttgccgacggggcccttatttaccggaagcttctgttcaatcccagcggtccttaccagaaaaagcctgtgcatgaaaaaaaagaagttttgtaattttatattactttttagtttgatactaagtattaaacatatttctgtattcttccacatattttctgcagttattttaactcagtataggagctagaggaagagatttccgaagtctgcaccccgcgcagagcactactgtaacttccaagggagcgctgggagcagcgggatcgggttttccggcacccgggcctgggtggcagggaagaatgtgccgggatccgcctcagggatctttgaatctctttactgcctggctggccggcagctccgaggtgtggggttgcagagattttgagttctcgggctaggcggtggcattgcaccccctgtggcaatgagggtggctgaagggctcggcttgtcggtggggcagcgagagccgggtgcacgcgccggggaggtagccaacagccgttgggacgcgacgctggttcccaggggagagccagccgctgccgcggcactggttcagacggccaggccctagggacccaccatggatcctgaacacgccaaacctgagtcatccgaggcaccttcagggaacttgaaacaaccggagactgccgcagccc

SEQ ID NO: 16236 - DNA, 2300 bp, Homo sapien
tgaagttgcacaaactctgagctcatgaaaatcttaattctaacatgcattctccaaataggtacaaaaacaagagtctgctaaaccccttttgagaattgtggacactatttttgaaatgttaagcaagatctttttgtctataaataggactttgattttctggactagagaattgtattttaaagacagatgataagagagattgtaaggggggaaaagtgcactgtctaaagtgaggaatccagcctattcaggaaggaaggaaggaaagaaggaagaaaggaaggaaggaaactgccacatgttgaagtgcccagtatatgccctgcaccaagcagggcacactctgacttaatctttacaactctcatttgtacagatataggaactgaggttaaataccttgctctgggccacaagactgggacaaattgggactcaaaagaaatggcagatcaaatgcttggaagattcagggggttgggaggggaggtagggctttggttcaagaagttaaacaatgagaacagaaattaatgcagaaaaagagttcatttgaattcattctataatcaataaatatctgtcaatcccattgattgtgccagacatgagctcagtgctggggatagagccctttcccctttggggaagctcacagattcactggggcaagacatacctaggaaaagctcattaagcagccaggaattaagtgaccataaagagaaacatccaaggttgtcaagagtcccggagtgcacaggggaatatctgtgccatcagcccctggtccccatcggctgactccgctatcactccttctactgccaggggttcccacccccaggtatccatttcttacctggatggcagcatcccaccccaccacgcactggtcttcctgcctccagcctggttcaccttccattcacctcatgaacactgcaagcaggttttctgaatctcacacctgacctcctgatagagtcccagatcctgcacctctccagcctcaactctgcccccttctcagcggctctggaggtcctggccacaccagattccttagagaccctagtccagtgcctgggtcctcctcctccccttaggaactccttcctgccctttgcaaacatagcccaaaagtctttccacggagagggcttctcaggacctaacccctacctgcagccacctagggccactgcccttccctagtcctttccgggtgcctcagacatcaagcgaggctactactggcaacaaaatcccccacttccaaaatccctttttctgggaaaggcagaatccgcctgcagcagccaattgggcaggcgccaagaaagtagtgaagggtcagaggggacaggaggccacccgcagcgcccaccctggatagggataggttcgagaggttgctactgagctgcaaaataaccccgtctttccttcccgcatatggtcttgtatctgacagtccctgtgtctcacagcggtaatcgtgtgttgcatcgatgcgtttgtggtcaccacgaagatgaggaccaacttgaaaagattcctgggagtcgaagttgaaaggaagctttcccccgccaaggacgcctaccccgaaaccggccccgacgccccgcagaggcccgcctgaagccagcccggcgccctagcagatgcacgtgtctgtcgaatcgctgcctccgagcccacccccgagctcgcatgctgtcacccattccagcctaaatgtgaccataaaattagggctgctgcttttatcgagaacacctgcttcctctcgttgccttgtgtgaaagtcgcgttgtattttcctgcgcttggcgctgcgcccgcggagctcagggccgtgacccggtgctcgcagccccccgaccccgcagcggagcggcggcttacagacctggggccacctggagacgccgggatgggaccgcgagggcagctccgcgcggaggtgggaccggcgggttgggaacggagttggggcccgtcgggggccggcgcgtggagggtgggaggatccggccgctgccgggcggatgggagctgcgcgaggagacgggcgcgcgtggagagggcgcgggagttggcattcggtggtcctggcagttagctgagcacgccctctgagccgctcggtggacaccaggcactctagtaggcctggcctacccagaaacagcaggagagagaagaaacaggccagctgtgagaagccaaggacaccgagtcagtcatggcacctaaggcggcaaagggggccaagccagagccag

SEQ ID NO: 16237 - DNA, 2300 bp, Homo sapien
tgcagctgcacctgggagagcaggactcctgcctgctccatggagtgtgcagcccaggccatgcctccctgctgcagctgggtgatgatagcagcaggttgtctggagccacggctgccatcaaaagtgatcaatgactggtgattgtcatgagtggtacaaggtcaagagataatcaggtctggccaggtgcggtggctcacgcctgtaatcccaaacctttgggaggccgaggcgggaagattgttggaggccaggagttcaagaccagcctggccaacatggcaaaaccctgtctctactaaaaatacaaaaattagctgggtgtggtggcacaggcctgtaatcccagctacttgggagactgaggcatgagaatcccttgaatctgggaggtggaggttgcagtgagccaagatcatgccactgcactccagcctgggtgacagagcaagcctctgtctcaagaaagaaaaaagagataactaggtccacacgtgtttgtgtctttccacagtgtcagatttttattcaccctatacccaagggtaaaaaaaaacaaaagccacaagctatcccaaggagccaatttgcttcttcttcttcttcttcttttttctttcatacagagtctcactctgccgcccaggctggagtgcagctggagtgcagtggtgcgatctcagctcactgcaacctctgccttctgggttcaagtgattctcatgcctcaccctcccaagtagctggggttacaggcctgtgccaccacgcccagctaatttttgtatttttagtggagatgggttttcgccatgttggccaagctggtctcgaactcctgacctcaggtgatctgcctgcctcagcctcccaaaatgctggaattataggcatgggccactgcacccagacccaaggagccaattttccttagtacttcccgttcactcagtagtgagcacatgggctcaagccactccacaagtcagtcaatattgcaaaccatatataatagtatacttaatccacatgtaaatgttataaacattccacaacaaacaaagtagcatttaacatcaagagaaaaagagataggagaaagggttaaggaaccagttccagggtaaggaagaagacaaaaggaatcctggtctgggcttgagggtcttgcagagtctttgaggggcagagccttgggaggcagatgcagagttcttatgaacggcagtgggatggttgtcagttaaggctgctgggctgctgttttgtagtcacagagtgctctggtgagaaatggtagaggaacagtgtgcttctttgtgtccttatgtggttggacgcagtctttatttatttttttttttattttttgagacagagtcttgctctgtcgcccaggctggggtgcagtggtgtgattttggctcactgcaacctatgcctcccgggttcaagcgattcttgtgcctcagcctcctgagtagctgagattataggcacggtgccaccacgcccagctaatttttgtatttttagtagacacggggtttcactatattggccaggctggtctcgaactcctgacctcgtgatccacccacctcagcctcccaacgtgctgggattacaggcatgagccacagcgcctgaccttctattttttattaaacaaaacatcttgcccttgttggcaaagcaccctatgaaatataaaatgaagtctttttctaagatggagttagttatgtcaagggtgcgcagtactgtgccataagctctcccccggctgcccagagagaaaacctaagggcctcttaaagacaccatcacagcagttcagcggggagcaggcaggaatggtttcggatctagtggtggtgagaagtagacagagatcagagaaagttataggaggtgaaagtgggaggaccttggttacagactgccggtgaagagggacaaggacaacccgcaggtctccgctagtcaggtggaaggaaaggagggggcagtgcccttcgcagaggcacaggaagctgggtcttgatcacgctgaactccagacgctctctagatgtgcacgcatgtgcgtgtggagtgtgtgtgtgtgtgtgtgtgagagagagagatgtgttggggtggggggactgcaggtcaggaagtcctgcagatgtgcgtgcctgtgtgtgtttgcgcgcgcgcgcgcgtgtgtgtgtgtctgtgtgtgtgcctggagctgcgcttgcaggtctgagagtcctctgagaatgggttgggggaggcgggtgcaggaccga

SEQ ID NO: 16238 - DNA, 2300 bp, Homo sapien
ctcactctgccgcccaggctggagtgcagctggagtgcagtggtgcgatctcagctcactgcaacctctgccttctgggttcaagtgattctcatgcctcaccctcccaagtagctggggttacaggcctgtgccaccacgcccagctaatttttgtatttttagtggagatgggttttcgccatgttggccaagctggtctcgaactcctgacctcaggtgatctgcctgcctcagcctcccaaaatgctggaattataggcatgggccactgcacccagacccaaggagccaattttccttagtacttcccgttcactcagtagtgagcacatgggctcaagccactccacaagtcagtcaatattgcaaaccatatataatagtatacttaatccacatgtaaatgttataaacattccacaacaaacaaagtagcatttaacatcaagagaaaaagagataggagaaagggttaaggaaccagttccagggtaaggaagaagacaaaaggaatcctggtctgggcttgagggtcttgcagagtctttgaggggcagagccttgggaggcagatgcagagttcttatgaacggcagtgggatggttgtcagttaaggctgctgggctgctgttttgtagtcacagagtgctctggtgagaaatggtagaggaacagtgtgcttctttgtgtccttatgtggttggacgcagtctttatttatttttttttttattttttgagacagagtcttgctctgtcgcccaggctggggtgcagtggtgtgattttggctcactgcaacctatgcctcccgggttcaagcgattcttgtgcctcagcctcctgagtagctgagattataggcacggtgccaccacgcccagctaatttttgtatttttagtagacacggggtttcactatattggccaggctggtctcgaactcctgacctcgtgatccacccacctcagcctcccaacgtgctgggattacaggcatgagccacagcgcctgaccttctattttttattaaacaaaacatcttgcccttgttggcaaagcaccctatgaaatataaaatgaagtctttttctaagatggagttagttatgtcaagggtgcgcagtactgtgccataagctctcccccggctgcccagagagaaaacctaagggcctcttaaagacaccatcacagcagttcagcggggagcaggcaggaatggtttcggatctagtggtggtgagaagtagacagagatcagagaaagttataggaggtgaaagtgggaggaccttggttacagactgccggtgaagagggacaaggacaacccgcaggtctccgctagtcaggtggaaggaaaggagggggcagtgcccttcgcagaggcacaggaagctgggtcttgatcacgctgaactccagacgctctctagatgtgcacgcatgtgcgtgtggagtgtgtgtgtgtgtgtgtgtgagagagagagatgtgttggggtggggggactgcaggtcaggaagtcctgcagatgtgcgtgcctgtgtgtgtttgcgcgcgcgcgcgcgtgtgtgtgtgtctgtgtgtgtgcctggagctgcgcttgcaggtctgagagtcctctgagaatgggttgggggaggcgggtgcaggaccgaggcctggaacagccaacaaagaggccctggaggagggtggggctggccggggacaggaggggtggccaagaaagtcgcaagaaaactccggcccccaagaaaaagagagggcatgggttgcggagccgacatcacggccggggtctttgctgtttagacgcctgggttcccggatcccagacacgcgcacgggcaggaagttagaccggagacagcgagtatagacagcccttctggataggggcagacgggtgggagctccgaaggggtgccggggcggtgatcgggaggtctccagcggcccgaaccagggtgaagaagaaggtggagtctgcggaggccccaggccggggagggggcgggtcgggcccagcatcccccgcagccggggtccgagggggaggggcgggctggaggagcgggtgggggcggggcggggcgtggcggcgggggatgcgcccctgcgcgagccagtgtcgcctgccctccttccgcacagcccgggtttccgcttccctccgggcgcgagaagaggggagccaggccgagccccggccctaccgccgccgccgccatgtggcccccagaccccgaccccgacccggaccccgagcctgccggcggctcccgtc

SEQ ID NO: 16239 - DNA, 2300 bp, Homo sapien
caagcaagtgcagaggctgagatggacagaaacagagagaggaagtggccccagaaatcgcgggatgaaaaaacaggaattgagaggggaatccccagaattaggctttggggtgcaggcataggagacaggaaggggagggccagagctgggtcagtcccatggaaggccttcctgggaggccccagcagcctcccagcccgtctctatgccttagtctatctttccaaagggggctcagctgcacccaaggccatgtgcagagcaaatgggggtgctctggggaccccctgggatccctgcagttcatttgtctgaagcagccacagtgcttcctgtggggcatctgggtgtccccatggggactcctgcacccactagaaactactcagccatagacatgttcaaacgcagccacagtgacagaaaccagggacagatggcctccccaacacccacagggccaagttgcttaagaactctacctgggccgggcgtggtggctcatgcctgtaatcccaacactttaggaggccgaggtgggtggatcacctgaggtcaggaattcgagaccagcctggccagcatggtgaaaccctgtctctactaaaaataaaaaaattagctgggtttggtggcgggcgcctgtaatcccagctactcgggaaggctgaggcaggagaatcacttgaaccccggaggtggaggttgcagtgaactgagatcgtgccactgcactccagcctgggagacggagcaagactccatctctggggcggaggtaagataactctatctggggggtcagccagccctgggttcaaattctagtagcctctgattagccatgtgacagagtcttctcatctgtcaagtggggctgtgctcatgggtggatgtgagggtcagaggagatgcccgtgagcctcagggtaccaggcactgtggagccccaggctggccaacaggtcaccttggcctgctctgcagcgtacctgggctgcaggactgcccagggctcaacatcctcctgcatcagctcttcccacctacagagttgtgggcaagaccacagtgaacattttgattcttgtagttcaagtacagctggccccacctttcacagctggccctgtatgaataaggcagcagggcctgaggtgtcagtgccaacgcaccctctgttagatgttcctttcttatcattatgaaaatttgcaaatacattaaaactccaaaagatttttttgctttatctatctgtccatcaaggcattttatcttttaacacaaaataaattgcagacatcaggacatttcaactctgaacacttcaggacgcatatcattaaggttcaaggttttttcttttcaaggtgaaatctacattcagtgacgagcacacgtctttggtgttgggtgttactttttggaaactggttcctgcctcgctttgatttccctccgcagggcactgagtggagtgcatgtgcttggaaggctggggctttctgactaggtcctgtcagggagctggggtggggtaaggtgaggactcagggccatgcccaggactgggaggcagcataggtgtgagcctgggccatgctgggttttttttttttgtaggggcgggtgcggacagggtctctctctctctcacccaggatggagtgcagtggcctgatcacagctcactgcagcctcgacctccccgggctcaggtgatcctcccacctcagcctcccaagtagctgggatttcaggcacacaccaccatgcccggctaatttttgtatattttgccgagatgaggttttgccatgttgcccaagctggggtcaaatttctgggctcaagcaatccacctgcctgggcctctcaaagtgctaggattacaggtgtgagccactgtgcttggcctgggattctaatctggctctgccacttcccagctgcgggactgtgagcagttggcttcccctgctggaacctcctctatcctgaccacagggcctggctcagaggagcactggacaaggaacatgaaaaggctctgacttcacctcaaactccttccccgcagggtctctcattcatcacttttatctgctatgtggcgtcctcagcatctgccttcctcacagcgcctctgctggagttcctgctggccttgtacttcctctttgctgatgccatgcagctgaatgacaagtggcagggcttgtgctggcccatgatggtgaggacaggggccccaggagggaggggtgccctgcacaaagtggccagatgaggag

SEQ ID NO: 16240 - DNA, 2300 bp, Homo sapien
ctgggtgacagaatgagactccgtctcaaaaaaaaaaattatttggaaaaaacaataaaaaataagctggatgtggtggctcatgcctgtaatcccagcactttgggaggctgaagtgggaggactgctgagaccagaagtttgagaccagcctgggcaacataatgagaccccatctccaaaaaaaaagaaagaaaaaacaatttagccaggcatggtggtggcatgcctgtagtcccagttacttagaaggctgagacaggaggattgcttaagtctagggggtcgaggttacagtgagctatgattgtaccactgtactccagcctggatgacagagtgaaaagtctattttaaaaacaaacaaaacaaaacaaaacagaaaaacaggtggggcacggtggctcacatctgtaatcccagccctttgggaggctgaggtgggtagatcacttgaggccagtagtttgagatctgcctggccaacatggtgaaaccctgtctctactaaaaatgccaaaattagctgggcgtggtggtcccagctgctcgggaggctgaggtgggagaatcgcttgaggtggaggttgctgtaagcagagatctcaccacagcgctccagcctgggtgatgagcaagactctgtctcagaaaacacacacacaaaaaacccccaaacaacacacacacgcacacacaaaaatatagataaaaagtaatacagtagaacaattatttaaagtatacgagaagatgtgtgtaggttatatgtaaatactacaccattttatataaaggatttgagagcatcttcagattttggtatttgagggggtcctgaaaacaagctccctctcttgcccccatacagaaggacaacagtattagagtcactgtccttcctatctttgaaaaagttgagggctgggcatggtcagtcacacctgtaatcccagcaatttgggaggctgaggcaggaggatcccctgagcccgggagttcgagatcagcctgggcaacacagtgaggccctatctctacaaaaataatgatgatgaaaataataaataacttttttttaaaaaaagaaaaagtaggaacctgggctctgcccaccaatgaactgtgtgaccttggacaagctacttccagtctgcagccttagtctcttcttctgtaaaatagaaataacaacgatacgttcttcaagcgccttgctcagtgcctagaacatggcaagctctcggtatttgtggttgtggaagggttcaatatcaaagcgacacttcttagtcagtgttttacttagcttaaaattagccttcacacttgaattgtaaattggtccctaattaatgcccttcggggcaaaatctgtgtttaaccttactttatgcgtagacagagctagcaaagcttttcagctgagaggagaggaacatgtcagtcgcctgggtcaggccggcggggacaacctgcagtggggcggctcctcaccctgccccgcccgcccctggcctcggaaccggtttgttccaggcgcccagcgtgagaacacaggcacttacccacctctcgtcggcccaatagtctgagtcaagcccaccctggccacgcaccgttcccggcacccgggtggcgcagcccgtctctgtctttaccgagaagctccccaccctatgcgtcgaggaccccactttcttcaaaggagaacctgaggcagcgtctgggaaagcaactccatggcctccaggtccacctcgaccctttcctcagccccaagaccccgctgcctgaaccccatcgccccgcgtgccgggatcgccagcgcccaccagcggctcccgccccggctctaggcgcaggtgggggcggggccagggcggggcctgaggagccggcgccccgcctcgccccgcccctccccgaggcccgcggcgccgccgcctccacctcgctcgagccgcggagcgcctccgagcggccggctgcggcctggctccgcctctcccggcccggcgcgcccgctcccgcctccttccctctcctggctcccacctccctccctttccgctgccgaggcggcgggagccgagcccgagcggaccgagccgcagccgcagccgggcggcgggcgagaggcggcggcggcgggcgggccgcgggcagtcagtcgggcggcggcggcggcggcggcggcggcgatgcggcggccccgctgagtccgcccgctcctggcgccgggagccagccgcgcgaggcggcccgggccgggcggcagcatgcggagcggcgaggag

SEQ ID NO: 16241 - DNA, 2300 bp, Homo sapien
tcggcgtattttttaattttttttctgagacagagtctgctctgtcacccaggctggagtacagtggtgcagtcttagctcttgtgctcctgggttcaagcaatcctcctccctcagcctcctgagtacctgggacaacaggtgtgcgccaccacttccagatttttgtttgtttgttttgagacagagcttcactcttgtcgtccaggctggagtacagtggcatgatctcggctcactgcaacctccacctcctatgttcaagcgaccctcctgcctcagcctcccaagtagctgggattacaggcatgagccaccacacccggctagtttttgtatttttagtagagaacagggtttcaccatgttggccaggctagtctcgaactcctgacctcatgtgatccacccacctcggccccctcaaagttctgggattacaggcgcgagccaccatgcctggccatctggataatttttgtatttttagtagagacggtttcagcatgttggccaggctattctcgaattcctgacctcaagtaatctgccctccttggcctcccaaagtggtgggattacaggcgtgagccactgtgtctgcccacttttaattaatgctatacatttgataagctttcctattaagaatttaatgtgatcattttatcatcaaattacttttatcatactgtcttagaaatatttttaaactttgcttttatgtagaaaaggtcaattaccaaacagggtattgttttataggctactggtgtttcccatatgtttatgttttgtgctgtccatgatagagaggtggtgtctgtagtcttttgagtcctgttaactataaaaagccaatagcagttggtgccgtggttccacaccctggggtggaggtgagagatgagttcctgccatcttttttgggatggcccattagcctgttggcacccatccctcaaaagatgggtttaatgataaatttggtcgcatgtaggcatctgtctgggaaggaatctgtgtaccttgatactctgagagtgttttcctgggctaacctcagagccaatactttacttctcaggaagtaatctgtgggatcaagacaacaatttacacgttaaaaaataaactctacagcccactagcatcaacatagctttatgcttttgacttcattcatctgctactatgacctttttacttttttatttatttatttatttttaccagtgtgcagtatgcctatgtaatactataagcgttttagtttttaaaattgtaatgctttctgttgctcatatattgatcaaaaactgatcaacctatgagtagtactttgaggttgtatgtgttcgattttgtctcctcctgcagtgaattgatttttcttgagcagattgattagatggagctgccttgatttacacatcagtgaaagaagagaaaaacctcgacttgttgtataagtatattgttcataaaacatacggtttccacttcaccacacctgccttagttgtggaaaaggatgccgtttttatgtgagttattttgagctgatgctttgaaactcttctttttaaagtacatttgctttttacattttaccccttcaaggaaggtgccttctgtctgtgtcttctacagccagctctctcactgcaccttctctctgttcctttccggattatgaggcatctgcctgagggaagtgggtggtgtggtcaggggtgctgcctttcttcctcgagagcaagttgccaaaacctaagccagccatttttggcactcactgtcaactctggtaaaatactggctggggagggaatatagggaattgtgcttgggggatcctgaatgtcttctattaaagcgcctgctttatctgtgtgttggcagggatgactgcaaacatcctctcggcatctctgtcagcatgggctttcgctatattaagtgcttactgtgcttctggcatttcacattttgggagccaccgggattgattgtcctcgatagagacttggatacctgttttcctaagctggtgtctttctctcactggagaatcatagtgttgctggatgcataaatatgaagctgtggtctctgacaagacttgtgttagcagattgatgttcaggcttcagtatcctcctgacttaacaaacaattacattattcattcaggaaaccttattcagcacccactaggtgctcaggttctctgcaaaggacacagaaatgaatgatacgtgttccttgcatatggcactgtctagaggggacataca

SEQ ID NO: 16242 - DNA, 2300 bp, Homo sapien
tagtcccagctacttgggaggctgaggtaggagaatggcattaacccaggaggtggagcttgcagtgagccgagatcatgccattgcactccagcctgagcgatagagcgagactccgtctcaaaaaataaaaataaaaaaaaaagaactcacagcagtttccttaaggctatttaaatcagctgatgtggtccaaactgatggtggaaaattagaatgatgaggtaggaatagaaattaagttcagtcatgccagacatggtggctcatgtaatcccagcactttgggaggctcaggtgggtggatcatttgaggtcaggagttcaagaccagcctggccgacatggtgaaaccctgtctctactaaaatagaaaaattagccaggcgtggtggcaggtgcctgtcatcccagctactcgggggctgaggcaggagaattgcttgagctgggaggctgaggttgcagtgagctgagatggcgccactgcactccatccgggatgacacagtgagactatgtctcaaaaaaaaaagaaaaaaaaaacaaacaaagttcagtcatagagaaatagagaaataaagttgtatctcttatataaggaaaaacaataggttttaaaactttttttttttttttttttttttttgagacggagtttcactcttgttgcccaggctggagtacaatggtgtgatctcggctcactgcaacctctgccttcccagttcaagcgattctcctacctcagcctcctgagtagctgggactacaggtgtccgccaccatgcctggctaattttgtatttttattagagatgtgggtttctccatgttggtcaggctggtctcaaactcccaacctcaggtgatctgcccaccttgacctcccagagtgttgggattacaagtgtaagccaccacgcctggccacattttgggttttaaaagtactttatttccagtcagagccatcatgttacccaattatagtgtgccattctcatcctgttcttgagaatggagccctgtggagtggagtgtacaactgtgtacaccgggcctgcctcctgatgggagcttgtttgatgtttagaacaaactgttaggtgatcaggcctattacatcttcactctacagataaaaaaaaaaacgaggcccaagatgaatgagaaaaatctccggttcttttttactcttctctaattaatgcttggaccctgagctgtggctttcttctttggagccacaatactttatttctgaagaatgaggtgttcccatcgtcagcaggcaatgaagcaaaaaggtgactctgtctgtcttccctgcagtgtgatgcggtgagtgtcctggagaaggagcacgattacagggatgagcatttggactttatccagtcacacctgcggaggttctgccttcagtgtatcctttgggcgctgtgtggggcctgggtcacaggctttcttccaaatggggcatcttcaaagagataaagcacctcccaaacccagaatagtgttctgccaaagagaatttgtatatatctttttactaggtttatgttttactgtatcggagttttaggtttattaacttgtgtctacctttgatcactcatttatttgtttgtttgtttgtttgttttaagatggtgtttcaccactttggccaggctagtctcaaattcctgacctcaagtgatcacctacctcagcctccgaaagtgctgggattatagctgttagctactgcgctcggcgtattttttaattttttttctgagacagagtctgctctgtcacccaggctggagtacagtggtgcagtcttagctcttgtgctcctgggttcaagcaatcctcctccctcagcctcctgagtacctgggacaacaggtgtgcgccaccacttccagatttttgtttgtttgttttgagacagagcttcactcttgtcgtccaggctggagtacagtggcatgatctcggctcactgcaacctccacctcctatgttcaagcgaccctcctgcctcagcctcccaagtagctgggattacaggcatgagccaccacacccggctagtttttgtatttttagtagagaacagggtttcaccatgttggccaggctagtctcgaactcctgacctcatgtgatccacccacctcggccccctcaaagttctgggattacaggcgcgagccaccatgcctggccatctggataatttttgtatttttagtagagacggtttcagcatgttggccaggctattctcgaattcctgacct

SEQ ID NO: 16243 - DNA, 2300 bp, Homo sapien
ctattcctatgcatttttaaattaaattttactttatttgacagtcttactctgtcgcccaggctagagtgcagtggtgtgatctcaactccctgcagcctctgtctcctgggttcaagcaattatcgtgcttcagcctcccaggcagctgggattacaggcggatgccaccattcctggctaattttttttttttttttttgtatttttagtagagacggggtttggccatgttggacaggctggtctggaactcctgacctcaagtgatccgccagcctcggcctcccaaagtgccgggattacaggtgtgagccaccgtacctggccttcctatgcttttttgttaaactcttccacaggactttaatagttcctgctaaatttcaacttgttagatttagtctctgctcagtttgtcatgcagtagataaggcaacccttcctgcttcaggtcatccacaacttccatgactgctgctgtattcttatccaagtcactgatggcaccctgaattggctggccagggcaggaggtttgggcaggcccctagcagcctcatctgctggtccctcctcttcatcagccacctctgggctagtctttaataagcctcagtgctatcatccagcattgatttcactttcgcatctaagatgtgaattgtcaaatgccctgttgaaatctgcatttgctgtatctgcagcatccgcctacctggtactcctgcaaaaaagaaagatactgtgtaaatctggtattctcttttcctttagtgtttaatcacaaaatttcacttagtgctgattaagctcactggcctgtaattttcatctccatcttctgtcctgtgaaaattcagcactgcttgcccttttaggacttctggcactttgcctgattttcccagatttccaagggaggaactcagtgggttttcactctcgtcttgtttaaaccttacatccagtttggcagatgatatgcccatttgttttatcccgtaattcatgccgccagattttttggcatcaggatcacaatcctactcatctgaaacctacttaggtggtgcttttctgccacattccacttccttgtgatatttagaaatgtcttgttagcctgtttccatagagaatggcaagagccctcaagtagaggccacacctaaaattaagcttgataatggaatgtatgtttttccttcggttactctccgctctttcccttttccatcccctttccttttatttttctccccgctctgcacctgccagctggcccccaaggaaattaagggctcctcttctggtgtgaaatgctggctccctgaaaacatcattttaaaaagcatgttaataaagcaaagccaagtgtattatgcactgcggtcaagagcactacttcacagtctttagtcttcggaggaggagggggaaatgcaggatatttatgaggattctggggtcttccttaaggctagtctttcaatgcagggcttgagtagggttaggccaagttcatgatataatggtccaaggttggggaataaattagaagtaccgaatgttatcttctagccttgggtccttgggtgggtttcttaaattttttgagcttcaggttcctcatctgtgaaagggttagataagattcagtgagataatgtgtgactctggcacatggtgagctctagataaatggcgcttttgtgtccatcagtctcattcccaaagcctaggctttcgggtcggtcatccggctgcccgacccgcgacggcgcaggggaatcggcgagcgtggcggggtgctgcgctgcgcccctcagccggcagaggccgccagcgcgccctcggtccggacggtgcccgcccctgccaccgcctccccgcgcatggctgccccggcggctgcctgaccgccgcccgccacctcggcggcctcgcaacccgtgggagcccgtggccatcgcagacctagaggacacgttgggcggcgcagtcgccgcggcaaggtcggcgggcggcgcggcgcgagggacggcgagcggggggcggcccggcccgggtcctcgcgggtcctcggcgggcccgggggagggccctctttgtggctgcagttggcaagatggcgccggtgggggtggagaagaagctgctgctaggtcccaacgggcccgcggtggcggccgccggcgacctgaccagtgaggaggaggaaggccagagcctatggtgaggccgcgggcggtcgggccgggccgtggggggcgcggcctctgggccggaccgtcgga

SEQ ID NO: 16244 - DNA, 2300 bp, Homo sapien
tacttgggaggctgaggcaagagaatcacttgaacttgggaggaggaggttgcagtgagccgagatcacgccactgcactccagcctgggtgacagagtgagactctagtctaaaaaaaaaaaaaaattctatccagtccatgaatatttgggaaagaggaatcttcaggttatagaagatgcacaagtttttttcttagtagtttttttgttttgagtaaatatagcggtctggcgatatttaatatagatccttcctaaattacaaatgcattcagaacaaatatacctttctccttttttattataaaacagatacaaggtaaaattcaaatgcagcagtagggtgtcctttgagaatcttttatgcctgtgtgtatcctttaaagtttggtcaaccacactactgtttagatttcctttaataacaaaaagaattataggcttttatgttgatatgactcagtaagctaactgcatctgttttgggtcactttaaaacacctttgcttttgaaaaggaaaagtttctttacagaattgagtatgtaactcttgaagtttactctttcaaagatttgcttttctcctttttcctttcaggagctgctgctcaagaggtcatcaaaataatcaccaaacaatttgtaatttttaataatacttacatttacagtggcatgtcacaaacttcagcaactttccagttgtagagtaagcaagcaccttaagtagtgtgttaatgattgaaactgtaattgccttcgggttgtgctttagtctgtaaaattctaaaggagagctgctaaattgttttcttaataaacatttttctcatttgtaataatgtagtcttgttctttgtggggaggggaaaggagacagtcattttcctagaaaatgaatcctatccatttctcactgagcatcaatattggcttgctatttcaaagttacttgtcatagattatccttgtgttttattagagataattaaaaattttttttcttaccatcttcaataatgaatttaagccatgtgcagatgttagctatggacattttaggaccatcatcatttgttaaaatgaatagaatttaaaaagatatttctggatatgtagttttcccagaaaacaagaccatccccttgtatgtagtattatcttaattaacttgagttttggctgcctaacctacttcttgaaattttatggggtcattctactcatattatatatactcttaaatttaatcacatgggactaatagcattcaccagcatattagagggcaaaaaaaaaaaggaagtagtagatgcaaacagagtggaaatccagaatccagaagtgggggcagttcccggttttgggcttgatgtattaatacttagggctgaggaacgtggtccgtggtgcatgactcttagtagctaaggcccctaatctgctgcaactgtctctgaggccagcgtctcttaagtgagaacctgttagatttgctagggtacctcacagggacttggttttccagacgctaatgtgtcagccattctttggctgttcttcactgtatcggggaccttcccctcgccttcatcgcctagcagtcccatgggctgcattttacggcagaggcggcaagggacaggccttggccccactctgatcctttggtccaggcgcggagaagtcctcctggactgaactccggaagccccctggtgaggtggaggcctggctgcccctgtggggctgtggtgacgattagcgaggtgcccaacaaaagggagaacacacagcacagatgccaggtggaggggaggttggggcttcgccgtcctgtgcttcgcggccaccgtcccatagccaggcctcgtcaaccgcgtgcacagtcccctaattttggggctaatgctcgtctgaggtaaaaaccctaaaaaccgggggcggtgagatttctctttcaaattgtagctttttaaaaaatcttgcggccgggacaccgaccaccccattgcccttggcaacctagggcacccgcggaagcgtaagacaccttgcaggggcggcggggctgccggccggaagtcccgcccacggacgtgagcctggtcggctgggcgggaaaccctgtcgtgcgtcgtggcaggtgagcggtgatgaagaaagggcggaagctcccgcttgagggtagacgccacggcctccgctcccgcgcgttgttgtcctgccttaccgcgcttggaaactctgtatgttggcgcctgtgtaaggcgggttgggccggccaggatgtctt

SEQ ID NO: 16245 - DNA, 2300 bp, Homo sapien
tttggataagagagatatacaatctgtagatactttaatatctgctttttatagatgatgctgaggcaatgagagattaaattatttgcctaaggtcacatagttagcaagtgacagaactgggcctacctctaagcactcactgaaattatacactctcctgtcctctctcatgtggagagcagtgtacagagtgagattaggaagtggggagttactgatgttggggccaaggaagcaagaagtgaaggatgcccatcaggtttctggagaagaagtctaggtagatggtgatgctgtctattgaagaccacaagaggaggaaggataggttgttagttgctatctgtacctagggtttgtcaatgttgagcttttccagttagaacaaattgtgttctaaaggaatcttggttttacttttactaaaactttatagttgacttaagatttctgcattttactatatgtaaatcgtaccttaataaaacagtgaaaaaacctgtgggccctgtgtccatttaaaaattaaagatttcctaagtttctataattcaatgtattgtcatcagtattgccaaagaattaagtttatcttttgagctgggcacggtggctcacacctgtaatgcaaggactttgggaggccgaggcaggaggagcccttgaatccaggagtttgagactagcctgggtgacatagtgagaccctatccctacaaaaaaattagctgggcacagtgacacgagactgtagtcccaccttctcaggaggctgaggtgggaggatcccttcagcccaggagtttcagcagtgagctgtgattgtgccactgtacttcagcctgggtaatacagcaagaccccatctctctcttttttttttttaagtgttaaatttatccttttgaattctttgtttcacagtaatagaatctcatccagataatgcattagaggatctacgactagataagccatttcctgaactgagagaacattttcagtcctatgatttggatcatatggaaaaaaaggttggtagtgtgtgtgaccttacatttacagatagacttaaaacatttttttaacctaaggtttttgaattacactaaagtgagaaaatcctataaacttccatattcctgtcatcccgattacccaataacagtattttaccttgttttcaacatattaatttttctccaaaattaaaaaacttttttactgaagaaaagtacatatactgaacatctgtgtaatcactacccaggtcaagaaattggacattaacctattccaggtggggagatggggatggttaatgggtaccaaaaaaaaattagaaagaataaataagatttactccttgaaagcacaacaaggtgactatagttagtaataacaactcagttatacattttaaaataattaaaagagtttaattggattatttgtaacataaaggataaacgcttgaggggataaatgctatacagataccccattctccatgatgtgcttatttcacattgcatgcctgtatcaaagcatgtaccccataaatatatacacctaagtacccacaaaaattgaaagtaaaaaattttaaaacaaaaaacagaaataaaaaaattccaagaagttctctttatggactttttctaaacaaatagaaataatgacataacactataaggcgtatatgtattttttcccacttccatattaattaacatgcagttgcttatttggttcatcagaaaacagaaaagatcctcctttcttacttaggattggtgtctgaaattgagatttgagctgtgtttttgggtggcagtctctgagactgttttgctggtataatggggacaatcatagtatatatgtgacatactaggtatctgcctctagaaaaatttgtaaagcagtttttattaactcagttcattttcgtctattcactactctgcatatattaggagatcataaatattgttgaatttgttgaaaacgagatggtacagtgaagaattcataatactgatattttcttttatttgtctctcatttttaggaccacagtcatactccatggattgtgatcatagctaaatatttagcacagtggtatagtgaagtatgtccttttttaaaaaaaatttcatatgcaactgtattttcagtttcttacaaaggatttccttgatggggaatgggagattaattttttttccttatggagttgtatggtagggcaaatggatgcttttaaatttaaatctagcagttcctctttt

SEQ ID NO: 16246 - DNA, 2300 bp, Homo sapien
tgatggaggcagagactgaagtgctgtggctgctagccaaagattgccagcaaacccccagaagccaagaagaagcggacggattctcccctacaggtttcagaaggagcatagtcccacccgtgctttgattgtagacttccagcctccagaactgtgagacaataaatttctcttgttttaagtcacccagtttgtggttctttgttacgacattcctaggaaactgataccctgaggtatcattttacagacaacaccaacacaaaccttttcaaaatcatttacttcttcacgggcaatatgactagccttctaccaaatttgtgggtgtttcctttcatgaagtccataggtatgagaaactaagcagtgaactctcatctgctgccttttgaccttcctactttcccggagtgtattttattatcccttatattttacctgtccacttggagaaggaaatgtgacagcacaaacacatgatgagctgggaaagcctcacacctctgtttcccatcagtgtgttccatgggagctgggtaagggcaagggaaggtatgggaaggtgtactctcaccctagtccaggagaccatgcccagggcaaagtgcaattcatcatcactgcatcattaccatcaaactgtgccatctctctggtccccatcctaggggattgggggtggggatctgtgttcattttcaccttatttcaggcagttattaacctgaaggtgcctgtagggtctgcgagatagcagggaaggagtcttcgtctccctcacagatggtcaccttgtcttcagcaccaccacccccctcccaattgttctcatggggtaacctccttccttggcctcccatccccacaggacagccgttctcttcctgaaaggagggtcttttcaggaagtggaggactttaaattcctccttggatctatgttcacagtcttcagaacccagcctgtcccaactgtctctcaaaccttctcaaccactccctatccttcacctgaccaaacttactctagcacctacagcttgctatgccttctttgcttcctagagatggcacctgctgttccttatgcttaaaacacccttccagctgggcacagtggatcatgcctataatctcagcacattgggaggccaaggcgggcagatcgcttgagcccaggagtttgagaccagcctgggccatgacgaaaccccatctctacaaaaaatgtacaaaaattagccaggtgtggtggtgcatgcctgtagtcccagctacttgggaggctgaggtgagaggattgctgcctgggaggttgaagctgcagtgaattgagatcacaccaccgaactccagtctgagcaatagagagagaccctgtctcaaacaaaacaaaacaaaacaaaacaaaacactcctccatctccaaaccacatgaaacattcttggagagggggactggggaggttcttctgtgcacccctgagcaccctgcttccctctatctagaggaaggccacattgtctggtaagtgcttgtttgctgtccctcttccttcatgagactaaactctccaagaacagagccctggacttgtctgcatctgcagcagggagcccctagctttgtgattcaaaataggcttgtgggcttttcatgagaggaagaaatgggtgaaaaataatgatcatcaaaatgaaagttattattcatgcaagatttggggggagtctggcctcctgtattcaaaatctcatttaaggtcaaaagacacttgggacccatttatccccactgcacaggtgagcacactgaggatttgagaggtaaagagtagatctcacagccagttaagtggtcgaaatacaagtatgcctgattccaatgccccagtcgcccccaattactgcatggacagagggcaaattggcaggctagcgggtctgcctttctggccgatggggaccaagagccccagacccgctcgggtaccagggccgcttaggccccggcgtaccggcgacgcgtgcgcagtgcagtgcggcgccccctgcaggcagcgcgcaggagacggtagcggcgaaggggcgctcagtgcgcctgcgcgcttgtggagctggtggcggcgctccgcaggggctcggctgttttccgcgcggcaggcgcggccatggcgcagctgggaaagctgctcaaggagcagaagtacgaccggcagctgaggtgagccgaggctcaccgagccgagggcgggccggcgggctttccagcattcgggccgggcctaagggcg

SEQ ID NO: 16247 - DNA, 2300 bp, Homo sapien
ttgggctatccccagagctctctcccaggtaaaggatgttggcagctctcccaggtaaagggtggctggcttctctgggagacagaaggtccaggcctcacccagaagcatgcctttgtcttcttgatctgtagatgccatttccagcttggagacctggggccttgacagtgttggattctctgtcacatctggtcttgggggctacttatctctgtcataagtcccctgccccaccctagggtcatatttatattaaggatcccttcctgctcctggatcagagagggccatcttcgcaggcctgggcagtcactgacattggcccacccaaccagttatcaattaatctccatagctctatctgaggatctggggttcagggcctgggagagggaaactgagacagacacagagatgaaggggagccaggcagacaagatggcagattcctgtacaaggtcagccaagagcagggcctgaaagagtgtctctattcaagatctggacagcagacattgtactagtggctgttcgactcctgctgagtacaggaccccgggtgggatcatttatctgtccttccatccacccctctgtttgtctttccaaaactgcctgctgaggactagccagagacaagccctctccctggcacaaggccacgtgctaagatgaatcagattgggccggctggagccagtgggtggaagacagaggacgcaccaggtggagggcacaacaacgaccagggctcgtgggtgggaaaatactgggccaaggcaggcactggggttgagtgcagggtggagggtctgagctcccagggggtgtactgaaggttatggggaggtcaggagaggagggacaaacagcaggctatggagggacaaagcagagtccctgaagaaaggaggaagcagtagacaaaataacagggagggtggaagtcagagcctcagacttagctccatggggaagccacctggtgtctgcctgtcttcaggcccattggttgatgccactccttctcactcccccttgggggatctggttccacctgggccaagggttcacattgccattcctgtccctgcatctaccccagggttcccggacccccacactcacagcacacccttgtacccagcaccaaggagaaatggtaaagaccccagtgtcaggccaggagtggtggctcactcctctaatcccaacactttgggaggccaaggcgggtggattacttgaggccagaagttcaagaccagcccaggcaacatggtgaaacccccatctctacaaaaaacacaaaaattagctggatgtggtggcacacacctgtaatcccagctacttggaaggctgaagcagaagaatcacttgaatcaaggaggtggaggttgcagtgagctgatatagcaccagcctgggtgacagagcaagactctgtctaaaaacaaacaagcaaacaaacaaacaaacaaacaaatcccacaaaacccccagtgtctggagtaagaaccccagctaatgaaccctttaccccctggctagatgaccttgggcaagtcacttcacttctctgggcctcactcccctcctctgtcagatagggctgatggaagcacccaaccttgtagggtaacagagagggttataccataggaaggacccaaagcttggtccagcgcctgcaacagcctctggcaaacagtggaagctccagttttggacacttgatggtcagtgtagtttgcagtttaaaggggactttccaaccccaaaagattcaggacccagagctcaggtctctggtggtggcatttgcaggtctggggcaagcctagggaagggacgccatgtgcggcacgggcatctagtgtcccagagtccgcacgggttgctgggggaaaaagagggatagtcgcccagccagggcaggggtgggagttggggggagagggttacttcctcctgccctgaatctccgctcggggttcaactggctcgccggcgggcgagggcggggcaggccggcctctctggccctgctggggggtggggggcgggtcccccgggaactgctcctcccgccagccgctgctttaagaggctgctccgcggtagcgagcggggccggagccgcagcccgaacgagcggaccgagccgaccgggcaggtgcacggctgcggggacggcagcggcatgaccggccaccacggctggggctacggccaggacgacggtaggcacagacctcccccaccgcctctggctcggacccccgacccaactg

SEQ ID NO: 16248 - DNA, 2300 bp, Homo sapien
cgggtgggatcatttatctgtccttccatccacccctctgtttgtctttccaaaactgcctgctgaggactagccagagacaagccctctccctggcacaaggccacgtgctaagatgaatcagattgggccggctggagccagtgggtggaagacagaggacgcaccaggtggagggcacaacaacgaccagggctcgtgggtgggaaaatactgggccaaggcaggcactggggttgagtgcagggtggagggtctgagctcccagggggtgtactgaaggttatggggaggtcaggagaggagggacaaacagcaggctatggagggacaaagcagagtccctgaagaaaggaggaagcagtagacaaaataacagggagggtggaagtcagagcctcagacttagctccatggggaagccacctggtgtctgcctgtcttcaggcccattggttgatgccactccttctcactcccccttgggggatctggttccacctgggccaagggttcacattgccattcctgtccctgcatctaccccagggttcccggacccccacactcacagcacacccttgtacccagcaccaaggagaaatggtaaagaccccagtgtcaggccaggagtggtggctcactcctctaatcccaacactttgggaggccaaggcgggtggattacttgaggccagaagttcaagaccagcccaggcaacatggtgaaacccccatctctacaaaaaacacaaaaattagctggatgtggtggcacacacctgtaatcccagctacttggaaggctgaagcagaagaatcacttgaatcaaggaggtggaggttgcagtgagctgatatagcaccagcctgggtgacagagcaagactctgtctaaaaacaaacaagcaaacaaacaaacaaacaaacaaatcccacaaaacccccagtgtctggagtaagaaccccagctaatgaaccctttaccccctggctagatgaccttgggcaagtcacttcacttctctgggcctcactcccctcctctgtcagatagggctgatggaagcacccaaccttgtagggtaacagagagggttataccataggaaggacccaaagcttggtccagcgcctgcaacagcctctggcaaacagtggaagctccagttttggacacttgatggtcagtgtagtttgcagtttaaaggggactttccaaccccaaaagattcaggacccagagctcaggtctctggtggtggcatttgcaggtctggggcaagcctagggaagggacgccatgtgcggcacgggcatctagtgtcccagagtccgcacgggttgctgggggaaaaagagggatagtcgcccagccagggcaggggtgggagttggggggagagggttacttcctcctgccctgaatctccgctcggggttcaactggctcgccggcgggcgagggcggggcaggccggcctctctggccctgctggggggtggggggcgggtcccccgggaactgctcctcccgccagccgctgctttaagaggctgctccgcggtagcgagcggggccggagccgcagcccgaacgagcggaccgagccgaccgggcaggtgcacggctgcggggacggcagcggcatgaccggccaccacggctggggctacggccaggacgacggtaggcacagacctcccccaccgcctctggctcggacccccgacccaactgcactcgccccaaccctcttgcccagctggtttcccagaccggaaagctcccacactccaggctgggcgggacccctcttcccatcccggcccccgaacttggcccaagccttggtcccccgcgccagacgcaaagtccgcgctgcgccccgggtggccccgccgccagcaagcgacctggcggctgtgtcctgccgcctcctccgcgaagcccctgattgcccagcccgctcagacccaggcccagactctcactcactcgccccgggcgtgcgcagcgcgtgggggtggcccagggcagcggggggcgggcgccgcggagcgctgtgcgcgggtgtctgcggggagcgcgcacggcaagtgagcggggacctcgggggagcggggctccgcgtggcaagggcgcagtgtcccccggagagaatttccccgcagaagtggccgagctgccttctcggccggtacgtgagggaagggggcacttgggggcgcaagcatgtgtctgggtgtctacaccgagcagggtgtttgcgcacgtccgggtgtgagtcgtgggagcc

SEQ ID NO: 16249 - DNA, 2300 bp, Homo sapien
cctgtaatcccagcactttaggaggcccaggtgggtggattacttggggtcaggaattcgagaccagcttgaccaacatggtgaaaccccatctctactaaaaatacaaaaattggccgggcatggtggtgcgcacctgtaatcccagctactcgggaggctgaggcaggagaattgcttgaacctgggaggcggaggttgcagtgagctgagatcatgccactcacttcagcctgggctacagagcaagactccgtctcaaaaataaataaataaataaataaataaataaataaataaataaataagtaaaattaaataaaaataaaaataaaaccccctcttggggttgtgcgtgtgcagggcctgggcctgaaggcacatgcccccttagattttccttccaggaccccacaatgctgcgtgtccaatgtggccagctccctgtagggttcccagagcaagtgaaggctccactttctgctcagggatatgccctggtctcctctctatcctgaacagccaaacactgtcttttgggcaccacctcctaaatctctctcatccagccctctgtctcccacctccctccaccctgtcccctcccgcctggacacaggccaccccttgctccctgccaccattcctgcctgcccatccgcattcctcagggatgttccccatttgcaggcctggccctgcccctcctctactataagcccttggtagctccccgtcagcctggggagggggtcccaggtttcccccagggctctagcccctttgagccttttgagccccacaaccacactgggctctctctcacctctgagcctgcacacttgcccttcccttggcctcaaacatgctgttcccttctatctgatttggaatactggttggaatttcatttcttcctttctttctgtttgagagggcctcgctctgtcgcccagcctggggtacagtggtgcgacctcagctcactgcaacctctgcctcctgggttcaagcgattctcctgcctcaggctcctgagcagctgggattacaggtgcacaccactatcacccagctaatttttgtaattttagtagagacggggtttcagcagttggccaggctgctctcgaactcctgagctcaagtgatccacctgctttggcctcccaaagtgctgggactgtaagcgtgagccaccacgcctgaccagaattgcatttctttgctgagtgacatggtcttcccctctcatctgctcccatagccccttccctgccctttgtgtaaccctcacctgctcaccactcatatccctcccaacacatagtgcttaactcaccaccattgctccccaaagcctaggacggtactagagacagcacaagcactcaattggtatttgttgcatggatacattaatttattaattcaacagggatggactgtcatgtaggtggctttggtgactgggtggggacaaggggagatactgtataagctatagccagggcctgcccgtggcagcaggtggctggagggagaaggccacgtcacctccagcatgctgggtgctgattttaatggcctggcagtgaggtgcgtgcatggcagagcctgcagaagaggtaatgccgagagggcagctctgcccacctctaattattgcttgagtctctctggtagtgtcagctgcccgccccagggagctcagtctcctccatcacagtgtgcgctcggggtggggctgctgccactgccagtggggaagaccagaggaggttcccagggtctttgggtcttggagagcagaggcagccccaggcttggaccctgcttagctcctgtccttcctgtccccagggcagctgaagggtgccccagactcaagggtcccatccagaagcctccagggtgaccaaggagcaaactggctgaaggagggtccccagcaccccccagggaggaagcctcagatggtttggtgtctgctgacatggaagcccttgagaagatggtgccctagtggccggctaggcagatgggcagctcaggcccggaaggaggcctttaccacgcggcccttcagtggctgtggtggccggaagttgttcaccatgtggatcctctcatcgtcctccgaggtaaaaagcaggctccggaacttccccatcttgaggaagcagaaggaatgctcagggcagattgggggtgctgtggtcctctatgaccccagatgcatcatctggcatacctgcccagccagctctacccctccctcctccttcccttagggtctg

SEQ ID NO: 16250 - DNA, 2300 bp, Homo sapien
tttattagaaacccttagacttttttttagtttgggtctgaaacagtcctcttaatatgcaggaagagagatattgccagtcctgactttgaacttctggaaagggctaagggtgagtggaactataaatatacaagggcaagtctgacatgagcagttttattgtgaccacgtccttgggtccaggaggctggccaggctgcccaggtaagccagggtgtcttccttctggaaaaccacactctcagggctccaagtggctttttctggttgtctcccatttttctctgtctccagggaaggactccatctgacttaccatagttacaagagttctgtgaaaataatttataaggaagcaggtcatcactggaatgccacaatgttaggaccagaagggacggagggattatctggtgtcggggttcgctgtctctctcaacctaccagccgccagccgtgctgagttaattgtcagtagcaggccaatataatggtcagttcaaagcttaatggtttgtgggaaaccactaaagactttagggcaggaggccgggcgcggtggctcacgcctgtaatcccagcactttgggaggcggaggcgggcggatcacgaggtcaggagatcgagaccatcccggctaaaacggtgaaaccccgtctctactaaaaatacaaaaaattagccgggcgtagtggcgggcgcctgtagtcccagctacttgggaggctgaggcaggggaatggcgtgaacccgggaggcggagcttgcagtgagccgagatcccgccactgcactccagcctgggcgacagagcgagactccgtctcaaaaaaaaaaaaaaaaaaaaaaaaaaaagactttagggcaggaatttgagggtttttttggtttgtttttgtttctgtttttgttttttttgagacagactctcactctgtctcccaggctggcgtgcagtggcatgatctcacctcagtgcaacttccacctccctggttcaaatgattctcatgcctcagcctcccaggtagctgggactacaggcgcgcaccaccactcccagctaatttttgtatttttagtagagacggtttcgtgatgttggccaggctggtctcaaactcctgacctcaggagatccccccgcctcggcctcccaaagtgctgggattacaggcaggagccaccgcactcggccttggaatttgagttttagaagtgtcattctgccaggcgtgatggctcacgtctgtaatcccagcactttggggaggctgaggtgggaggattgcttgagcccggcagtttgagaccagcctgggcaacatagaaagaccttgtctctacccaccaaccacgagaaaaggtgggaggggcgtcattctggctgctctgctctgtggttaggaccaagtcaaaggtggaggagggaaaaccgtaaaatcaagtgagaggcttggaatagggtggctgcgtcgccggatggatgagtggagagagatttaggagataggatttacagcattagataactggaaagagagggtgagggagaggaaggagtcaagatgcctcccagggttttggcttgggtctctgggcagatggtggggccattactgggttaggagagaagagaaaaagcaagtttggcagaaagctgagtttggggtaagttatgtttgaggcgcctgggggcctccagaggcaggtgtccaggtggctggacatcagggtgtggcgctcaagagagggttctggagtggtcgacaccgaagtggagaggaagcagtgaggtgttctaacaacggtgaggaattggggaggccgctgggttcggggtatgcagagtgtagcggccacgtagctggcgatctcaggcacgtgactgcctggtcctgtggccccgcgctcgaacactttcagcacccaggcagggggtaaggggcggtgttgccccctcccgggtcccgcctttctgcccgcctctcatcctctttagccattgggcaatacctctgtccatcaagggcccgcctccgcaattgagccaaccagggctggcgggagggcgcttccttctggagctgggtcctgactagggaccgcctgggtgaggtgaggacctggtggccgcagttgtggcactgtgcgcaggcgctgaactgaccggacggagcgggcggctgtggcctcgccagctggtgagaagcgggcgagggtccgaggtagggaaggtaacgagcgggggatgtggacacctctttccccgccaggcctcgccggcgcctgaccc

SEQ ID NO: 16251 - DNA, 2300 bp, Homo sapien
tgccccagcatgtgcccaatgccccttcagaacgcagtatgtggcataatgaaggtatgtgctcagagcagtgctgggcacagagcaggagcttaacacgtgtgaaacccccttcaacctccccacactacactgctccaggctgggtgccagagtgaccctgaagcaggcactcagcttgtgacaaggctgggggcagctgggggtagcttctggcctgagagagactaatcagatgtacagtgggaaggacttcgtggggaccatgggaagctccaaggctggagagggactggagaccttcttcccaccctctcccctcattccagactcccaggccccagaagcatctcctggctctgcttggctgccctcattgcggggagagcccctgttcagccctgcaactccctcaaggtcacctgagccagtttaatcttcttaggggcatgagactgcccactgtctcagccctgtcactgttgagtggccagtgtaaggacttcgggagctcataggctgctgcactcccccaccacaggtccccctggggggggtggtctggagccccaatacccacttccactcatgtactgctcacccatcctttgcaacctccagctccttgtcttagttccacaagccatgcggagctgccagggcagaatgagagccaggtcattcctgagtccctgagttctgctctcaaagggctcccaatctaatggaagaggcagacaatgacaagctggtgtcctctgtgtattaatagagatagcacatggcatggtgtgagggggaggggcattcccagaggaggctcctgaacaagcctgggaacataggggaagtttcctggaaaaaggaatatttgagctgagcactgaagcatgcatgagcaggtgcttaccacacagatgaatgagtgggaagggtgttccatgcaaaaggaacagagtgtgaaaaggtgtggctgcagacactggagcctgggagataagtcagaccaagtctggagccacagaaaaagtaacgtccagaaccagagggccaaggaatacctcctgggctgtgctggggtcgagggagtgccaggccaaccatctccccacctcctggagctggcagtcacggatgctgagcagctcctggctttccaaagtcaatgagtaacttggggggctgggcggggccaggcctgctgctgtgggcccagtggccttttccactcctgagcaagcgtggctgaaccctcctacctgctcaagtgccctgccttgccccacccagcccagcctggccagagccccctggagaaggagctctcttcttgcttggcagctggaccaagggagccagtcttgggcgctggagggtgaggggctgggagtggaggggagggcatggctgaggctgaggttggtggtggggaaaggagaaacactgccctgtcctcgccatctgggaaagaattcccagggcctcatcttagaggggttgtcgatttgtcgctgctctgcctgcccagctccatgacaagggctggaaaatgatgagacaagggccgggctcctgctccgggggttctccttgtctagaaggtggcagtgggaggcaggacagtcccagaggccctgagctaggaggactcctcctgtggtcaagtcctctgtgaccttggccagaccccagcattcaggccttgcctgcaacaagaggtgacttcaggaagtgaccctccaagtcttcaggaactttccagcttcaaacttttgtgatttgggggattgctagaaaattaccactttgggatctgcggcctggggaggctatggtgagaaggagctggaggtctggaggtgaaattctgatagagtgcttgatggaccaagagcctagaagcagggtggctgggcctgggggccttggtgggcctggccgaggagcagggcactaccctgcaggagatggagagcctcagctcctttggaggggaggaagagaagactagtctgcagtacgatcccactagttgtgtgtgtgggatggaaagcccctccctacccacctgggctggatcctcactgccgtgtccctcaggcctgtcctgaccatggtccctgcctggctgtggctgctttgtgtctccgtcccccaggtgagctaggccctgccccctctccttcaggtcttggctttgggggttgacacccttgcccccaactccacctggaccaattgcactgaccgtgagaacggtgcaaggcatgggaggggtcagagctgggactatagagcca

SEQ ID NO: 16252 - DNA, 2300 bp, Homo sapien
ggtcttgcatttgtataggaaggtgtactcgtgcttatgtttagggatgcacctgtctccctgcccacccatgcccatggctccctcaccctcggcacaagtgctgctaagagtttttatctacatggtctcaggaaaaaccatccccatctggtgctgggtgggaagtggctgagtggggactggtatacaggtctgcccatctccaaagcctggaggcagcctggggcgaggtggggggcagtttctaagaaggttctgggccaaggtccatacattccttccttagttcaatttattcaatttattcattccctcaccctcggcacaagtgctgctaagagtttttatctacatggtctcaggaaaaaccatccccatctggtgctgggtgggaagtggctgagtggggactggtatacaggtctgcccatctccaaagcctggaggcagcctggggcaaggtggggggcagtttctaagaaggttctgggccaaggtccatacattccttccttagttcaatttattcaatttattcattccacagactccagggagccctggcaacctggttagaatcctgattgcagcttattgaatggcaggaggaggcttgagggctgcccctccatgtacaggggagcgctgagattcacccacgtgctccccagggcagaggtaactgctcagagctgttgctgctctgcccctcctccccacatacttcaaggaatgcagaaggcatggtattttcagatcaagtgagggtccccaggccttcctggctctgtcacttattgactgtgtgaccctaggcaaaccactcagcttctctgtgccccagcatgtgcccaatgccccttcagaacgcagtatgtggcataatgaaggtatgtgctcagagcagtgctgggcacagagcaggagcttaacacgtgtgaaacccccttcaacctccccacactacactgctccaggctgggtgccagagtgaccctgaagcaggcactcagcttgtgacaaggctgggggcagctgggggtagcttctggcctgagagagactaatcagatgtacagtgggaaggacttcgtggggaccatgggaagctccaaggctggagagggactggagaccttcttcccaccctctcccctcattccagactcccaggccccagaagcatctcctggctctgcttggctgccctcattgcggggagagcccctgttcagccctgcaactccctcaaggtcacctgagccagtttaatcttcttaggggcatgagactgcccactgtctcagccctgtcactgttgagtggccagtgtaaggacttcgggagctcataggctgctgcactcccccaccacaggtccccctggggggggtggtctggagccccaatacccacttccactcatgtactgctcacccatcctttgcaacctccagctccttgtcttagttccacaagccatgcggagctgccagggcagaatgagagccaggtcattcctgagtccctgagttctgctctcaaagggctcccaatctaatggaagaggcagacaatgacaagctggtgtcctctgtgtattaatagagatagcacatggcatggtgtgagggggaggggcattcccagaggaggctcctgaacaagcctgggaacataggggaagtttcctggaaaaaggaatatttgagctgagcactgaagcatgcatgagcaggtgcttaccacacagatgaatgagtgggaagggtgttccatgcaaaaggaacagagtgtgaaaaggtgtggctgcagacactggagcctgggagataagtcagaccaagtctggagccacagaaaaagtaacgtccagaaccagagggccaaggaatacctcctgggctgtgctggggtcgagggagtgccaggccaaccatctccccacctcctggagctggcagtcacggatgctgagcagctcctggctttccaaagtcaatgagtaacttggggggctgggcggggccaggcctgctgctgtgggcccagtggccttttccactcctgagcaagcgtggctgaaccctcctacctgctcaagtgccctgccttgccccacccagcccagcctggccagagccccctggagaaggagctctcttcttgcttggcagctggaccaagggagccagtcttgggcgctggagggtgaggggctgggagtggaggggagggcatggctgaggctgaggttggtggtggggaaaggagaaacactgccctgtcctcgccat

SEQ ID NO: 16253 - DNA, 2300 bp, Homo sapien
tttcatgtttgttttgtcttataataaccatcaggaagaggtgatccctgttctacactggagaaactgaggctcagcctagataaatggacacaggtgaaacagctagcaaggagcacagctgggatctgaagcccgggcggacctaggagtggttctagcctcagtttattcctcctgggcagccatgctcagcccagagagctgggagaaccaggtggtgggagtgggggtgtctcaaggttgtgtcctggtgttaatccctggggcccctggccatatctagcttgtggtgagtgtctctggcctgttggagcagccactggaatgcctggggcttgagtggccctttgtggttgcagttcccttggcaatgaagaaacactgctgaggtcaagagctcagattgccagaggggaaacccagccctccttctttgcatggccccctgctgggaagggccacagctaccccccaccctcgccctctgccagacacccagaggaggctctttccagtggcacagtcatggggttggagggggcacaggcagcccagccaggattcctcatgggaagtgtgtggtggctctttagacttgcctgctaacgggaggctctgcccataacttcctcttcccactggagttcgttcaggaagccagaaccagcatggggatgctcaggcctccaagatcccctaggaccatgggcaggccacccctcagcccagcttttgcctactttgaagacctcaaggacaagagggccctaatcttaccgagccaggccctcctcaatccaaggccttcttaggcgttgccaaggaaactgatgcagcagccaaagagcctggcccaggtctccatgacaacctaccacagcccaccagggtccatccatctgtgatgtcacctgagccccaaatggatgccctcccacccccaccacacttgtcacaatcagatgtcacagtctgatagcaggtccctgtcacaaaatacctcacagcctgacctgcaaccctcagacccctgagagatgagcagggagctaagacactcctcatgccttgaccacaccctgtgtttatgccccttttgggtgggggcctgaacctccaggccctggatgtgccctgggtggctggctcagcctacagctagagggaagaagggagaccttgacgactcgaagtggctggctcctgctggcattcaacacccattggcctggatttccccaactctgggcaacttccagtccaggagcagaataaccagagccacggccagggccagggctggggcagattatttatttttagcagagttgctggcagctgcctggtgggtgctgggaggtgggatggggactgagtttaatcccttccctcttctgggctggggtatcctccccagggttcaagcaggcatctccacctgcaactctgtcagagctgcccccacccccaacagccctctcagggcccccaggggctcatggggtgacaccaaccctcacactgaaggttaggctcattagggagaatcttcaactccaggatggggagtggaaaggattttgtgtgaatttaggacaccccctaaattctagctcagacctgagcctatggggagtgggtgtcatgggcagagaagggggatctctgtccagcctgtaactagcttacttgctaaaaggacgagccgggacttggggagaggaaagggagaattcagtctcacggggccagaccgaattcttctccagagggcagttgctgcttttggctgattgggtttaccccgctgcctgcctccccatcacgtactccccccgcaacctcgctctctctctccttctcacacacaccctcagctccggacctcgcctaccggtcagcccctctattcccagacagctaccgctactcccctggcgggtagggcggggtgtcggggatgtaaggtccgaggaagagggtgggggattcccctggtgggggtggacagacacgtcagcccccgcagcagcgtggaccgggggcgggagcgggggcgggtggaggcttaaataggcggctctggagccagagcccagtgcgggctgagaaggcggtggctgcagcagcagcggcggcggaaaccctaaagtccgagtccggactacgagtgcgtggcctcctaatccggatcctagtcctgagcgtgtctgtgtgcgagtgggtgagtgtcctggcggagcggggtcggggcggctgcagatggatgcgccaggtccggaggggtcccgggtgag

SEQ ID NO: 16254 - DNA, 2300 bp, Homo sapien
gctctggccagagtgctagccagccctacctctgaacctctatataggatatgtcccccgcagcaacagagccctcctgtcacctccttcccaggaccccacatattgatcaggctacttcaaccacctgagcccacctaatctgccttcttaggatccctccccctggctgcctcctgcgctgctgaagcctgacacactctggtcctgtatatttggtgagaggggatttgggagaagaggacatggtaagcaaaggagagtcttctcaggccagcttcggtctaggctataacccatactgaggagtctctggcaatttcactcacacagttacccatctccagtcttgcccatagactcctgtgcaagggggaagcctcagactgcttagggggtgcccgggccaacaccctcaccaccagtccacacttacctgcatgctctgaggcatgggtccccggagtaatgtgcacgtccatctgggagggagataaccagggcctgaacacccacccaccgacccacacttttccctgcagcccccagaccctcaggcaccatctccagctgatccttcctcctaatcatgcctttggactctggcccttccgttacaccccaaacccatccacaggtattccaattctttttttttttccaagactgagtcttgctctgttgcccaggctggagtgcagcagcgcaatctcggctcactgcaacctctgtctcccaggttcaatttgattctccttcctcagccacccgtgtagctgggaccacaggcacacaccaccacgccccactaatttttgtatttttagtagagatgagatttcaccatgttggccaggctggtctccaactcctaacctcagatgatccacccgcctcagcctcccaaagtgctgggattacaggcgtgagccaccgcgcccggccctagctattccaattctatccaaagaactggcccactactgttgatttaaaggcctgcctgtgccccacccctggtccaaacccatctgccgctccctactgcccttcctgccacactcttcaatacttttctccactttccagctcagatctttattcttgtcacatcgacttggaaagcttcctcccagtttcctctctgctaatggggatccttccaggccccactctgatgtcctatccatgttcatgctctcccagtccccatcctcagcagtagaccctcaatgcctggtctcactcccggggctcagctccaactgaccttgaaacgctgaggaagggagcgcagaagcttgaccttgatggacagaccaataagggtggccatgctgcagtgcggaatggttggtgtgaaagccacagccactgtactctcggggtcgctaacctggttgtggaggagagatgtcaagagtcaaccaccctcagcccaaggtccctcttcttagtttgttgttttgggcaaatcatccaacttctatgggcctcagtttcaacacccataaaataggcacaacaatctccctccccaaagatacccttcggtgttcgtgagcatagagcacgccagctcctgctgcacagaaacctttctgactctctggaacaactcgctcccctcggaagtgactcacctgaacccgcacctgctctactacgttcaactcctctagcgtcagtggatgctccgggtcattgatggagcgaatcagatgtgggaagtgaaggaaaagggactctgcgcccttgcccacttagaaccctctgccaggaacgccctgctgggatgcggctccaccagctgctcgatatcactgctccccccaccgcaagcccccggaacccgcccgcgcccagcagcggcggatatcgaagatctcgcgtgcgtcgatgctgtcgggaacctgctcgtcctcctcgcctgccgtcacaggccgctccccagagcgctggtagatgagggggttggcattctccaggaggccgccgccgaccccgccgccgcctaccatcgcggaaccaccaccgctgatcctagcaggcgtgcgcttccgctccaacccgcgcacttccggagaacgggaagggggcgtggcgtggcgacggagtcgcgcgagggacacgccgcgttgtgggttctcggcctgaggtgcgagagaagcggtgaccgcggccctggctgctcggacccgggaacatgatggtcgctggagcagaaggcgctgagaagggaccacggcggcgctgggtcgtgcgagccagtagcgggctgaaacgtagaggccagaacc

SEQ ID NO: 16255 - DNA, 2300 bp, Homo sapien
ctcttcaatacttttctccactttccagctcagatctttattcttgtcacatcgacttggaaagcttcctcccagtttcctctctgctaatggggatccttccaggccccactctgatgtcctatccatgttcatgctctcccagtccccatcctcagcagtagaccctcaatgcctggtctcactcccggggctcagctccaactgaccttgaaacgctgaggaagggagcgcagaagcttgaccttgatggacagaccaataagggtggccatgctgcagtgcggaatggttggtgtgaaagccacagccactgtactctcggggtcgctaacctggttgtggaggagagatgtcaagagtcaaccaccctcagcccaaggtccctcttcttagtttgttgttttgggcaaatcatccaacttctatgggcctcagtttcaacacccataaaataggcacaacaatctccctccccaaagatacccttcggtgttcgtgagcatagagcacgccagctcctgctgcacagaaacctttctgactctctggaacaactcgctcccctcggaagtgactcacctgaacccgcacctgctctactacgttcaactcctctagcgtcagtggatgctccgggtcattgatggagcgaatcagatgtgggaagtgaaggaaaagggactctgcgcccttgcccacttagaaccctctgccaggaacgccctgctgggatgcggctccaccagctgctcgatatcactgctccccccaccgcaagcccccggaacccgcccgcgcccagcagcggcggatatcgaagatctcgcgtgcgtcgatgctgtcgggaacctgctcgtcctcctcgcctgccgtcacaggccgctccccagagcgctggtagatgagggggttggcattctccaggaggccgccgccgaccccgccgccgcctaccatcgcggaaccaccaccgctgatcctagcaggcgtgcgcttccgctccaacccgcgcacttccggagaacgggaagggggcgtggcgtggcgacggagtcgcgcgagggacacgccgcgttgtgggttctcggcctgaggtgcgagagaagcggtgaccgcggccctggctgctcggacccgggaacatgatggtcgctggagcagaaggcgctgagaagggaccacggcggcgctgggtcgtgcgagccagtagcgggctgaaacgtagaggccagaaccaggtctcagggggcactaaaggcggtcggaggtaatccccacaccgcttcctcctggaagtcaggctggccgggagctcccgtatccaggacggttggtcgcctctggcctggcagggatcctagtgtctcgggacctcccggtgacgcgcctgcctcccctgctgcaccataggcccgggagtacggcgtccccacagcttggaccggcaggggctcgtgaaatgtttgtcaagtggataaatgaccatggccgtggtctccgcgggaggtgaggaaactgaaagccaccgaggaaaaggggggcgctccttaagaagtgccgcggtcacgtgtacgtttcaaaagaatggcgtgactgagtagggaggggaccgcggagaccctcagaccctggactgtaaggagatgaggggccgtgaaggggaacccaggaaactgagtcctgaaagcaaggaggaacttccagaatgaagggcgccgacactccttcctgcctttgctcaagcggttccttcaccccgatcaagttccttcccatttctccatctgggggatcctgaacgtgcacatcctcagagaagccctcctggggtctccaattctagtttattgccccctcctatcgatcccccagcgcgctcatcgggcctgtggacaaggacaggtttgaagagaggattccctggatcgcggaagggctgcaggaatggcacagccccttccgaggatgccaaaggagcccgggcaaaggaaagtggccgtgcccgggcctgcctaccactagatccccacccacctatgactgctcagtcccgctctcctaccacacccacctttcccggcccaagccagcgcaccccgctgactccctgcccagtccaaactccaaggctgggcaaggcactgatccactgctggacagacccggggcagcctctgggtgaacagcagcgtgtccgccggcagcgaaccgagaccagcgagccgaccatgcggctgcacagacttcgtgcgcggctgagcgcggtggcctgtgggcttctgctgcttcttgtccgg

SEQ ID NO: 16256 - DNA, 2300 bp, Homo sapien
caggctggagtgcagtagtgggatgaaggctcactgcagcctcaacctcccctactaaagtgatctcccacctcagcctcccaagtagctgggactacaggtcacagaccaccacagcccactaatttctttcaattttttgtacactccgagtctcactatgttgtccaggctggcctccaactcctgggcacaagcgatactctcccttggccttctaaagtggtgggattaaaggagtgagccaatcgcacccagccactgtggcctcttagatctgctttaggatttggcgcctgggggcttctgttccccaaggaccactatccttgtctgaggcccctttggagggctcagggcatcccccctggccaaggacgccacacactgagagccagatgctgccagaagctattactgttattaccggccggcagcacccgctacagccacaatcataagagggaaatggactgaatccccacaccccaatccctcacccactccgaccccaggctgcctacccggcctggcatgtcccggcgctcctggggcccctgtactccgctggttccttgccgtggtgtcccccagcccgaccctttctgtgcttctaggagcccaccttgggcggcggggaggcgttgcgtggggctcacgagttccacgctgtcatctccaccagctcctacctcccaggcgcctgccctcccgcactgtcaggttctgcctccgcagcatttggcagatctgagcccggtccctgtcgcccctccgagggagcctcaccctggccccggacaagaagcagcagaagcccacaggccaccgcgctcagccgcgcacgaagtctgtgcagccgcatggtcggctcgctggtctcggttcgctgccggcggacacgctgctgttcacccagaggctgccccgggtctgtccagcagtggatcagtgccttgcccagccttggagtttggactgggcagggagtcagcggggtgcgctggcttgggccgggaaaggtgggtgtggtaggagagcgggactgagcagtcataggtgggtggggatctagtggtaggcaggcccgggcacggccactttcctttgcccgggctcctttggcatcctcggaaggggctgtgccattcctgcagcccttccgcgatccagggaatcctctcttcaaacctgtccttgtccacaggcccgatgagcgcgctgggggatcgataggagggggcaataaactagaattggagaccccaggagggcttctctgaggatgtgcacgttcaggatcccccagatggagaaatgggaaggaacttgatcggggtgaaggaaccgcttgagcaaaggcaggaaggagtgtcggcgcccttcattctggaagttcctccttgctttcaggactcagtttcctgggttccccttcacggcccctcatctccttacagtccagggtctgagggtctccgcggtcccctccctactcagtcacgccattcttttgaaacgtacacgtgaccgcggcacttcttaaggagcgccccccttttcctcggtggctttcagtttcctcacctcccgcggagaccacggccatggtcatttatccacttgacaaacatttcacgagcccctgccggtccaagctgtggggacgccgtactcccgggcctatggtgcagcaggggaggcaggcgcgtcaccgggaggtcccgagacactaggatccctgccaggccagaggcgaccaaccgtcctggatacgggagctcccggccagcctgacttccaggaggaagcggtgtggggattacctccgaccgcctttagtgccccctgagacctggttctggcctctacgtttcagcccgctactggctcgcacgacccagcgccgccgtggtcccttctcagcgccttctgctccagcgaccatcatgttcccgggtccgagcagccagggccgcggtcaccgcttctctcgcacctcaggccgagaacccacaacgcggcgtgtccctcgcgcgactccgtcgccacgccacgcccccttcccgttctccggaagtgcgcgggttggagcggaagcgcacgcctgctaggatcagcggtggtggttccgcgatggtaggcggcggcggggtcggcggcggcctcctggagaatgccaaccccctcatctaccagcgctctggggagcggcctgtgacggcaggcgaggaggacgagcaggttcccgacagcatcgacgcacgcgagatcttcgatatccgccgctgctgggcgcg

SEQ ID NO: 16257 - DNA, 2300 bp, Homo sapien
aaagaggaaggaaggaaggaaggggaaaaacagaagaatggagcaatagctagagggcaaagtgggtcaaggcaggctttgatggtggcatttacacagaagctgtgtttgcagctgatgggagggatgctgctaccaaagagacagccctggggacgtgggaggggaccagggtctagtgtccatgggtaggtcccagagctgggactagagcaagacaagcaagtgtaaaatttagaaggcattcattctcaggtgccgaccctctactggtatgaccccgggggtgagtgactctttaacttttatgccctgggcgccttgctggcctgtctcaccctagtcctggccctggtaggcccatccacaatgctaggagggaaggcagacctagctgcagggagttgggaaacgtggccttgggagcagatggagagctctcctggcagcatctatacccgaagatggaaggtaagattgtgggcggagaagagatccaggtgccttgatgtgagtgttgaaggtggaaagcatgccagagccaggtgctaaaatcttcagcaaatgatcaagggggtgtggctggggggtggcagggctgtgatggcaacaagaagaggaaggtggaatagggaaggacaaagtctggaggcagctctgaaaaggagaccccaccccaggctgccggggaagattcaggaagctgcaatggttttttatgaatttttttttagagagagagtcttgctatgttgcccaagctggcctcaagctcctgggctgaagcaatcctcctgcctcagccgcctgagtagctgggactacagacttgtgccacaatgcccagctggcactagttatttttggcagaagggaagtttcatcctaaagcctgtctcttcagctctgggtgccagctggagccccggaagaggatctggcatcgtgtttaggcacaaccctcactctgtctttcactgggccagcaaatatctatccatcctcccaccgcctactcccagccagccatgttcctgacactgaggcccagaagtgagtcctgccctccctgggggtgggagcctcctaagccagcagagagacagatgccctgcagatccccgccccggtcaagagcaggcttccatcagttctggttcccagactctcctctcctcaggcttccatgagttctggttccaagcccctcccctcctctcccctcccctccctccctccctccctctctctctttctttctctctctatttttcttttttctctttttgtttctttctctttttctgtctctttttctttctctctctcctttctctctctccttctttctctctctcctttctttcttctctctctctctttctctctttctttgtcttgctctatagcctagcctagagtgcagtggcattatcacagctcactgcagtctcgacaacctgggctcaagtgatcctctcacctcagcctcccaagtagctgggaccacaggcatgcaccatcacacctggctaattttttttattttttctagagacgtgtctccctgtgttgcccaggctggtctcaaactcctgggctcaagcgatcttcctgccccatcctcctaaagcactgggattacaggtatgagccaccacacccagtcccaagcctcatgttttcacacacacactcacacacacatgcaaacatgtaccctcacttcaatgctatgaggtgggtcctattatcatcactgttttattttctttcacattttaacatgagatttggaggggacaaaacatccaaaccatatcaagccctcacctcaggctgggttgcccactcggagtggcaccccagggtcactggccaccacttcctagggtcagtgatgtggtcaccttgggatgaacgcacaggatttcatggagatcaccaagtcaggagagctggaatttgaaaacagtgggacggggagggctgtcatatcaaccaggcctctgcagggcactcatctagccctgcctctggctcagcctgagcatggggctggccaccagctaggtggcgctgtccttggaggttctatatcacagccctttagagatcggtggtgctgaagggcagggatcttattccaccttctgaagcttctgtcgaaccagttgtaaggagaatggagagagcagtgagagtggagtccggggtcctggtcggggtggtctgtctgctcctggcatgccctgccacagccactggtaagacacacctgctgggcctgcagaggtact

SEQ ID NO: 16258 - DNA, 2300 bp, Homo sapien
cagagtccaggagaaagagacaggatggaatagggatagagccatcggggagagagggggcaaatgtgagcaggatttggaagactgggtcaattccctcacctggccccagatggtggccaaggcagtgtgggctgggcattttaaccactgtgtacaagatgattctggaacctctgcgtgggcatgttgactcttgtatggacaacagcatcctcctctcaacctccccatcccatcctctccccatggccaggagagattttctcaaccacagacttgaggtcattccctgtctctcctgtgtccaaagaaaaacacagctcaaggctgaggttggcggatcacaaagtcaggagatcaaggtgatcctggctaacatggtgaaaccccatctctactaaaaatacaaaaaattagccgggcatggtggcaggtgcctgtagtcccagctactcaggaggctgaggcagaagaatggtgtgaacccgggacgcagagcttgcggtgagccaagatcatgccactgcactccagcctgggcgacagagcgagagtctgtctcaaaaaaataataataaaagataatgacactattcttagagggcaatgaggactcagtgcccccattcccccagataataaaattatggtataataggggacgcaagggggcccttgggaccacccaagctgacgggcagggcaggcttctcaggagtggtgacaagtctgtgaccagtctcgaggccgatctgtgacatcacatccagctgtcctacagatgcaccctctctgtgggaggcagaaggctgcaaggtggggctgagtggctgagagggaggcatgactctttcatttgtccccagaaaatcgcaaacaccttggcctgcagctccagctccccggctgagatggtgcagtgccttcagcagaaagaaggagaagagctggtccttagcaagaagctggtatggccacccttttggggatggtgccgggcaatggcacagagggggttctatccatcccctgcaggagcagaggggcagtctacccccaggtggggctggggacagcagctcatgaggggaaggggctgagggcttggagacagaaatggagggccatctccatccccacagcaggcctgtcttctaggaaagaaactggacgcatctgttgccctgatctcctggttcccccgacccccttaaccctggtgatcttcatcccttcactttccctccaggctcagacactcaggcctgcagctcagtggctgctggggtcctagcctttgaggcttggccctaacttgggagcctcctgcattgctttctcctgcagaaaaatactatctatcctctcaccgttgatggcactgtcttccccaaaagccccaaggaactcctgaaggagaagcccttccactctgtgcccttcctcatgggtgtcaacaaccatgagttcagctggctcatccccagggtgagttgctcccacccctgtgcccttcaaggccctgccccagccagtacctgccaccccagcatcaacactacagccttgtgaacggagcactcccgttactcccatttgataagtgagaaagcagaggcccagaaaggtttgagggacttgcccaaggtcacccagctttgttttgttgtgttgttgttttgcttttttttttctgtttttgtttgtttgtttgtttgtttttgagacagagtctcgctctgtcacccaggctggagtgcagtggtgcgatctcagctcacttcaacctccacctcctgggttcaagagtttctcctgcctcagcctcccaagcagctgggattacaggcacatgccaccacacccagctttcaccacgttggccaggctggtctcaagctcctgacctcaagtaatccatctgctttggccttccgaagtgttgggattacaggcgtgggccacttcaataaagcaaatgttttcttttggggaacaaggtttttgcacaaactggccttctgggcactgctgatctgggcagcatattcctgccttggcgtctggtttatacatcaggctctatgagactggttagtgtgactctgtgccagagcaattgactaaaactctcaggttttagatatcaagccaccggggacttcatgagccaagtcccttccattcctttccaggtgcatagaacttcccacaagagtgtcagcactgtgctttcatcccgagcatcttgtttctgtcattcttattcttctacccatcttcacagcaatcatttt

SEQ ID NO: 16259 - DNA, 2300 bp, Homo sapien
caccatgttggccaggctggtctcaaactcctgacctcaggtgattcacccgcctcggcctcccaaagtgctgggattgcgagcgtggagccaccgcgcccggcgctgcaactctttacagaggaattctcgctagccccattttacacatgaggaaactgaggcttgaggtgtcatgctggggaaggggcagaggcagagtttaagccagttttgtctgaccctagagcctcagctgtcagatgtggagctagatagacctggggccaaatcccagccctgggcacttgcccagttatcctatcccctctaagcccatctcttcatctacacatggggatgacactgcccactcgcctgggctgttgtaaggagactagacgttgcatttgaagagtctacctgggatctcaataccaggggctgttcaatctttgtccatttcccttctttggaagccccagaacccttcccattcacgcaatctcatcactgccctctggagctgaggggagcccctatcatttctgctctcacttacttcccagttaacttcaaccgagcacctgcttccaggccagaccctttgctggggacttcacataggctgccaggcagagactgactttcagagaggtttagccacctgtctgcgatcacacagccaagcagtggttgcagagctaagatctgactccaaacctgagcttatgccaaactcccagggaggcagagaggcagctggctgtcccctggaccatcagccctgggatttgagggaagctatgctggagagtttggggcttcctgggatggtctgccacatctgtgcaccctgagcagggctgagcctggcctcttgccccaggatgtgccccctgagatgatgcccaccgtcatagatgaatacctaggaagcaactcggacgcacaagccaaatgccaggcgttccaggaattcatgggtgacgtattcatcaatgttcccaccgtcagtttttcaagataccttcgaggtaagcctgtccctggccacctgcccaacccctcccacttgggcccaggagctgggtcatcacaggtgacatggcatgatagggtgctggttccctcaatgccttgcaccccacaccccactgccccccaccaaacctatctttctctgggatgcagtgtcatagtaatgagaggtatctccagcaggaaactatgcagaggagaaaacctcagactcagagaggtacaatgactcaccaaaggtcacccagcagggcctatcactaattctcagggattcactcaaatgggtgatttcatcctctttcagcacttctggggggaaagtcttgcttccttcaagcctagtagctaatccctgatgcagacccagaacagttccagacccagaactttgtgaccttgggcaagatacctaccccctctgagcctcagtttcctcctttgtaaaatggaaataataatagaatctaatctattaattctattaatacagaatctattgtgatggggattcaataaatgatgacactggccaggcgcggtgggtggctcaatcttgtgatcccagtactttgggagaagcgggaggatcgcttgagcccaggagttcaagaccagcctgggcaacatattgaccccaatctctacacaaattttttgaaaattagccgggcatggtggtacacacctgtagtcccagatacttgggaagctgaagtgggaagatcacttgagcgcgggagtctcaggctgcagtgagctgtgatcatgccactgcactccagcctggtcgacagcaagaccatttcagagattaaaataaaaatattaaattaaattaaaatgatgacacaaagcacacagaatggtgcctgtcacctagcaagcgctcagtaaatgtttgcagctagtcattttatcatcatcatcatcatcatcatggaaattggtgttattatgagcatgtgctgccaaaggcagcatcgaatcaggccatgagtgcctaactcccatcccatcctttctctgtagattctggaagccctgtctttttctatgagttccagcatcgacccagttcttttgcgaagatcaaacctgcctgggtgaaggctgatcatggggccgagggtgcttttgtgttcggaggtcccttcctcatggacgagagctcccgcctgggtgaggacagacagacagacatgtgatccctaggctgccagactccaaggggcctgggcagggcttgcaggaacacgggtctccagtcagcactgagg

SEQ ID NO: 16260 - DNA, 2300 bp, Homo sapien
tagagacaggggtttcaccatgttggccaggctggtctcgaactcctgacctcaagtgatctgcccacctcggcctcccaaagtgctgggattataggcgtgagccactgcgcctggcctttttctgcatgttcctttgtagatgagctgtgctcacatgtacctatatcataaattagcatgtacatgtgagtattagatgcgagtatgcatatgagtaagaatgcatatatgcgtgtatgatttcttcctagaaacatgctgggctaatgttaacaacaagaacagaggcgtaggccgggcgcggtggctcatgcctgtaatcccagcagtttgggaggctgaggcgggcagatcacaagttcaggagatcaagaccattctggctaacatggtgaaaccgtgtctctactaaaaatacaaaaaattagccgggcatggtggcgggtgcctgtagtcccagctactcgggaggctgaggcaggagaatggcatgaacctgggaggtggggcttgcagtgagccgagatcgtgccactgcactccagcctgggcgacagagcaagactccatctcaaaaaaaggacagaggtgtagctatattaatatcagacaaacagaaatcaaaatgaataatgcatttattgccattaaatgacgcagagaaatagcccatataatagacataaatttttatttatttatttatttatttatttatttattttttgagatggagtctcactctgttgcccaggctggagtgcagtggcgcgatctcggctcactgcaacctccgctcctgggttcaagcaattctcctgcctcagcctcctgagtagcagtattacaggtgtgtgtcaccacgcccagctaatttttgtatttttagtagagacggggtttcaccattcctgacctcgtgatccacccaccttggcctcctgaagtgctgggattacaggcgtgagccaccgcgcgcagccgacatgaacttttatatgcttactgatagggatttgaaatgttaaatgaggtcgggcacggtggctcatgcctataatcccagcactttgggaggccaaggcgggcggatcacgaggtcaggagatagagaccatcctggctagtacggtgaaaccccatctctactaaaaatacaaaattagccaggcatggtggtgcatgcctataattccagctactcgggaggccgaggcaggagaatggcttgaacccgggaggcagaggttgcggtgagccgagatcacgccattgtactccagcctgggcaaaaacagcgaaactccatctcaaaaaaaaaaaaaaattagccaggcgcggtgctgtgtgtctgtagtcccagctactcaggaggctggagcaggagaatcacttgaacctggaaggtggaggttgcagtgagccaagattgggctattgcactccagcctgggcgatagagaaagaccccatctaaataaataaataaataaataaatgagggccgggcgtggtggctcacacctgtaatcccagcactttgggaggccaaggcgggcagatcacgaggtcaggagatcgagaccatcctggctagcatggtgaaacaccgcctctactaaaaatacaaaaattagccgggtgtggtggcgggcgcctgtggtcccagctgctctggaggttgaggcaggagaatggcgtgaatctgggaggcggagcttgcagtgagccgagattgcgccactgcactccagcctgggcgacagagcaagactccatctcaaaaaataaataaataaataaataaataaatataaataaataaacgaaacgttaaaggagagaaaaaattctgagagaagcacaagaagaagtggacagacacacaatggttatgatcaattgttatgaaaagcagccactgcttcccatgacagatgggccagggtcccatttgtggctgagtggctgcgcaggggtgacccttttcccctctctttccaggtgccttggtcccatttgtggctgagtggctgagccagggtcccatttgtggctgggtgactgagcagaggtgacccttttcccttctcttcccaggtgccttgcacaccaagaggcctcaagtggtcaccaaatatggaaccctgcaaggaaaacagatgcatgtggggaagacacccatccaagtctttttaggagtccccttctccagacctcctctaggtatcctcaggtttgcacctccagaacccccggagccctggaaaggaatcagagatgctaccacctacccg

SEQ ID NO: 16261 - DNA, 2300 bp, Homo sapien
gatggtgcgtgcttgtagtcctagctacttgggaggttaaggatcacttgagcccaggaggtcaaggctgcagtgaactatgatcatgtcactgcattgctgcctgggtgaccctgtctctaaagaaagagaggaggctgggcaccgtggctcatgcctgtaatcccagcactttgggaggaagaggcgggtggatcacgaggtcaggagttcgagaccagcctgaccaacatggcgaaaccccgtctcttctaaaaatacaaaaattagctaggtgtcgtggcatgtgcctcaggaggctgaggcagtgagctgatatctcccacctgaacccaggaggcagaggttgcagtcagccaagatggtgccactgcactccagcctggccgacagagcgagactccatctcaaacaaaaaaaaaaaagagaggagatagagcaaaggggaatataatatggtcaaccatgttgagggctgtcagggcaagtaagataatgacagagatttagcaagatggatgtcactggtgaccatggcaggatggctctgatggtgggatgggcacagaagccttggctgttcataatcccagttcccagctatcagagccctggctttcctggtgaggtgctaggtgtggtttactagacagcattctaataccacattagctgctgccaaaggagtgttggaatgctgtagggaaggactggtgaaagggagcaggtgatgctctgggaacaggctaggctaggacaagagcagaagggagcagaggaacaggcgaggcaaacagggtgtcctgcgcccaatcaaatggtccaggcccagctgttatgagaatagccacctaggggttgggccagcaaggagaaaaggtgaggtggccggagagcccatgctacaaaaataccccaaatatccacacagtataaggcactgggctgggtgccagtactcagatgaatctacctctattcctgcctttgggaagtgcatggtcacttggggagaaaaacagccaactgaaataactccaaccaggacatggtcaacagcggacaggaggccaggcatggtggctcatgcctataatcccagcactttgggaggccgaggtgggcagatcacttaaggccaggagttcgagaccagcctggccaacatggtgaaaccccgactctactaaaaatacaaaaattagctgggtgtgatggcgcgtgcctgtagtcccagctacttgcaagattgaggtaggagaattgcttgaacctagaggcagaggtagcagtgagccaagatcgtgccactacactccagcctgggcaacagagcaagactctgtctcaaaaaaataagtggacaggatgtcgggaggcacagaagaggaagtgaccaggagaggagacaccacttaagctgggccttaaacacgaataggagtttgctgggcagggcagaaggcatttgcttgagaggactgaggcccacgggcttggaggtgggaggcaaggggccacatgtatctacagcaaagggtggctgggacagagatgactggatggaaaggagggcctgggtactccgcgtatcttaactttatcctgagggcagtggagagccagggaagatttttgttgatttgtttgtttttattgatatatcatagttgtacatattagggaagatatgaagaagaggagtgacatagtccgccagagtgtggccgaggagtaggaggagtgtgaagaggctggggtactgtccagaccagagacggtggtggccttgacatctccccagagatggggatggaggggagggaccatattccagagctgtttgggaggcagaagggagactgaggggagggtggggcatgaaagacagggaggtgcccagggcaggcaggttcctgccttgacagcaccaacaggagcaggaatctctccacggactgaggcgccgggcagggaggggatggttcctgagaggccaacctgcctcccagtcctgggccccggggctggcggaggcctcctgtacacgcacacgcacgcacatgcgcacgcacacgcacgcgcacagacgctgcctggattttgctttgggttccgtcttctcactgcggaccctggattgaaacgatctccccgcggccgccgccgctacctggtgcccgcaggtgcctgcaggagtcctggggccagctggcctcgatgtacgtcagcacgcgggaacggtacaagtggctgcgcttcagcgaggactgtctgtacctgaacgtgtacgcgccggc

SEQ ID NO: 16262 - DNA, 2300 bp, Homo sapien
ggaacccactggggcccactgtacagaccagaggcaggaataccactggctttaggtctaggacatcaccccaggactcctgactccctcccagctacttgcccttcctggcttcactcaggctgcctgcccatggccagacagatgcccagaacagcccaggtgtctctacttgggcatctcacgggtgtattcctccctgttcttgcagatgatgtcacccctagcctcgggtctcttccatcgggccatttcccagagtggcaccgcgttattcagacttttcatcactagtaacccactgaaagtggccaaggtgagtgcctctccttccccagggctcagcatggaagggcaggatggaagcaccactgagcatcctttcttctctctatagaaggttgcccacctggctggatgcaaccacaacagcacacagatcctggtaaactgcctgagggcactatcagggaccaaggtgatgcgtgtgtccaacaagatggtaggtagaacattccagctgcctgacctggctgcctgagggccatcctcctatcctggtacccagccacccccaactacttccccagggaccctgtctcaagagcacacgagggagacttcctttaactctgatcccttcctctcccccatagagattcctccaactgaacttccagagagacccggaagaggtaaacaggccacattctgcaatttgagtatttatttaacacctactttgtgccaggcacttgggatacttagggaattgttcaggccaagatcccttccctagtggagctgatgttccagtggggaaggagaataaaccctataaataaatatattatccacctccttagaaggtgataggtgaatagcaaggaatggagagggtaaaggggttggacattttgggaggtatggacttttaaatagaatggctagaacaggactcagtgaagtgaaatttagcaaagattttcaagaggtgaaggagtgagctatacagatacccgcggccatcccaagtccacgtaatttggtcctgcctatcctgctcccctcccacacccatcctcctggggctcaccatgccagccccagccttttcccaatcaaagaacctaggctagagcagcctctgaaggggcacccaaggttgcagggaccctgggaggatacttgaggagactggctggaaatgccctttgccttgtagattatctggtccatgagccctgtggtggatggtgtggtgatcccagatgaccctttggtgctcctgacccaggggaaggtttcatctgtgccctaccttctaggtgtcaacaacctggaattcaattggctcttgccttatgtaagtgagtaggagttcaattggctcttgccttacgtaagtgagtaccatagtggaggcagggaaggatgcctcttggacggtgctgggcaccaggtcagatgccagtagcccctctgtggatgccctatgtttgggagcctcctgtagtccctgtacagtgaaaactggccatgaatgatggaggggaagaagggagaagtatggcctgctggagatttgaggaccacaaattctcagatcatagtttagatgggttatgatgttcattcccaagcctctaggcaactgcaaatcctgaagccctcccttgctcctgggtcagggtagatgccccaactcaggatggacccccactcagtaccacttcagctctggcccaggtggtagtgatgagcaggatgggagcagggggacaagagagagtcatgggcccttcctgggctgtgtgctgtgtctgataactcatcattagatgggcaagacctttggggcctttgtagctctggccagaatccctcctaatgctcaggcctgacccacactggggtccttgtcttgtgaacagatcatgaagttcccgctaaaccggcaggcgatgagaaaggaaaccatcactaagatgctctggagtacccgcaccctgttggtgagggacccagctggcaggggtgctcagttcggacagggttgacccccctgttttttttaacctagtagctgctctttgcaaaggggctcccagccagggtaaggatctttcttggagggtctggggtttgctgtgggatcagatgactgcttacaggtaaggtgctcagggtcacaggggcagttatgcagcaaaatcaggggttacaatcagcagagacagaaactttcccaggaagctccctttctccccctcccaggccaaaaactcctggggggctga

SEQ ID NO: 16263 - DNA, 2300 bp, Homo sapien
aattaacaaccaaaaaggcatatagaggtcagccgaggagatggcctccttcagcctgtggcttatttcccggtcatcctggctgttggatgccagactacgacgagtgtgggttaccctgtggcctggagttgcccaaggctgtctgtggggctgctgttctgggtctgcttggcaggctttgctgtccctttcccttaggacatcgttcctcccctccttgaggctgacaatgagagcgccctgccctgctctgcactcccacccctccaggtctagctcccttgaccctgaccttttccttgcctaagctcatggccatcaaggccattctagagatctttcaatttttatttattccacatttcccatggcagaaacaattattgctagagtctttggccaagatcaacttggaggtctgtgagccctccttggacccattgtggagcaagagtgcttcctcatggattttttttccccccgagacggagttatgctcttgttccccaggctggggtgcaatggcacgatcttggctcaccgcaacctctgcctcccaggttcaaccaattctcctgcctcagcttccgagtagctgtttgagacggagtcttgctctgtggcccaggctgcagtgcagtggcaccgtcttggctcactacaacctccgcctcccaggttcaagcgattctcctgcctcagcctcccgagtagctgagactacaggcgtgtgccaccacaccccgctaatttttgtactttagtagagatggggttttgccatgttgaccagaccggcctcgagctcctgatctcaggtgatcagcctgcctcggcctcccaaagtgctgggattaggccaggcgcagtggctcatgcctgtaatcccagtactttgggaggccgaggcgggcagatcacctgaggtcaggagttcgagaccagcctgaccaacatggcgaaaccccgtctctactaaaaatacaaaaaaattagctgggcgtggtggtgggtgcctgtaattccaaatactcgggagacagaggcagaagaatcacttgaacccaggaggcggaggttgcagtgagccgagatcgcgccattgcactccagcctgggcgacagagcgaggctctgtttaaaaaaaaaaaaaaaaaaaaaaaaaaaagagggctgggattacgggtatgagctacagtgcccggccacaggactaactttgaatcaaactctgccataaatcccatgtcagactttctccagtttgggctaaacaacttccctagaatttatggatcttattttttgcagctgattgcacattgagtaagtatatggactggcaatcggttacattcttaactcagcttgttcttctttagaaacttaaatttattgggctcccactgtgtgctagacccacataaaggttctcacgctaacactgcaaacctaggagtgtctgcattttggaaataaggaaactgaggtttagtggtccaattcttatctaaggccccagccagcaggtagtgtagctgagtgggatcccatctaagacccatctgactccaaaagccacgacctttccaccatgactcggttggattctttggtccgtttccacctcagtcttcaacgtgcagagcctacacccctgccggtcggtttagggacgaaaagtccccaaggacttaggtttcctcgcgttcaagtgacaatctggggttactccgcgcacctggggaacccagaagttccagatgaccgaggaagggcggtagaaaaggcctgcgctggctactcccgtctgctaaaggccaggcggatcccccaacgacagctccacgccgagtggccgcgggcgagcagggggaaaagggccctgatgcggaaggagccccggggcgccacagccaggccgctccgccagcgggcgggtggcgcatgcgcggcgtgggccgcggagttgtgaatggtgcgtcttgtttgccggagttggaggcgggcgggcgcgcgaggaggaggggtggggccggcgggggcggggtgggcggtgagaggaagtggcggcggcggcggcggcggcggccgggggcggtgagcgctggggctgcgcgggcggcaggcaacggctgaggcggcggcggcggcggcggcggcgtgggttgggctcgagcgggcggcggcgcctcagactccccggaacgggagcccacgcgggcgggcgcctgaaacaaagggaagcgggcgtccgggcgccgcgggtgggcggtcagtcggtcagcgcggagcca

SEQ ID NO: 16264 - DNA, 2300 bp, Homo sapien
gttttcaccatgttggccagggtggtttcaaactcctgacctcaggtgatctgtctgcctcggcctcccaaagtgctgggattacaggcgtgagccaccgcgcccagccagacacttttaattgactaagattgctcctcaccaatcttaagatttttccccagatttccttcccaagctatctagcccagctgcccaactaggcttttctaaacatatctttaatgcttgtcatgataaggaataatgaccccctgattcctgtcctctgccactctattaggtatgattgacaatgttttatttttccagaaatgttctttctttttggtacagccactgtttcttttatttttgtttttacagaaaaaaaggccgggggaggggggtggtgggtggtcatggtatgcatacttctgcacctggcttttttctcttggagttccttccacatcaacatagagacctacttcactttttattatttatttatttatttagagacaggatcttgctctgtcatccaggctggagccccggggctcaataatcacagctcactgcagctatcctcaagctatcctcccacctctcagcctcttgagtagctaggactcctggcccaacctactgccatgacaccagctaatttttttttttaatagagactgggtcttgctatgttgcccaggctggtctcaactcccgggctcaaccgatcctcccacctcatcctcccaaagtgctggtattaccgctgtgagcactgctctcagcattcacctttaaaaacatatctctatctatctatctatctatctatctatctatctatctatctatcatctatctatctatctatctatatcacggtttatttagccacttccctactggacatctcagtgacccagttctgttgttttggcatacaatgctgcagtggacaaccttctccatgtagttcattttaatcaaacagcgacttcaaattttgatagagcctccaaagaaacgctagtatcaagccagtttgagaatttagtatgccactctctcccctactgaaaaccttcttccaggggcaatgtaatggaaaggacttgggttctgcgcctagaaccaaggagccttgggtctttaacatctctgggcctcatgtattcgcctatgtaaagtcggtataatctcgcatctcaggttggttgtgagaacccagagactgcctccgtgaaggcttggcatcagcataggcctcggctgtcctttagtttcagggtgtcccggggcacgggccaaaacctcaggctgaacctgctagaggaaccttcctgtcccttgcagattaggaaaactgtggcacagaaagcgccaaggggttgatcaagacccccacagctttggtccacgctgctgccggcggcttcggatcctggtcccgggggactgcgcacatttggatgtggtcagcagggaggcctggcctggccccttcctcttctacccagtcctctccccgaaccaattccgacccctaacgcccacagtcctcactcgcttacggttcgacccttgccccaggggcgactgggtggggccgtcattcctgaacaactaaaagctgctgcggccagcgtcacctccggccccaacggagacggtgggggccgtgaggcttagggactccgcgtcctccctcctgctgggcctcagcgtgccctctgtacttgccttctgctaccagtgaacgtgagtgggacgtgtgtgtagacagcagacgggtcttgtgcagctgtgtgacgtgtgtgttgtgtggtgaacccttctttatgtagatatgtgaagtgtgtgtgctgtggtgcacagatgtaggggctcacgaagtactgggctccttgctcctagagcccgaacagttcccaacgttacagccctgcccgactcagcctccgcagagacggcggcgggacccgcagtttgcgcgtgcgcggctccgccccaggctcctccctcgcgctggcactcccgccttcgcccggccctccccgcgctttacggcccggcacgccacttttactgcagtcgcgcccgccgccgtcgttgcccccgctgccgcggctgctgcaggtgaggtgaagtgaggtgaggtgtggtgttgggccggtgctgctgccgctgccgccggggaggaggtggaaagcggggctgtggcgggccggcgggggcggcctgtcagccgctgctttgtctccttagctcgggtcccttctgcgctgccgcagggaggccgcccgggccag

SEQ ID NO: 16265 - DNA, 2300 bp, Homo sapien
cccgggctggagtgcagtggcgcaatcttggctccctgcaagctccacctcccaggttcatgccattctcctgtctcagcctcccaagtaactatgggactacaggcgcccgccaccacgcccggctaattttttttttttttttttttttttcttttttagtagagatgggctttcaccatgttagccaggatggtctcgatctcctgacctcgtgatctgccctcctcggcctcccaaagtgctgggattacggacgtgagccactgcacctggctgcctagctaatttttttgtattttaataggcatgagccaccgtaccctgcccctgttgctttttttttttttttttttttttgagacagagtcttgctctgtctcccaggctggagtgcagtggcgctatctcggttcactacaacctctgcctcctgagttcaagcagttctcctgcctcagcctccagagtagctgggactacaggtgtgtgccaccatgcctggctaatttttgcatttttaatggagacagggtttcaccacgttggctaggttggtcttgaacttctaacctgatgatctgcccatctcggcctcccaaagtgctgggattacaggtgtgagccaccgggcctggccccttgtcgctatttttaaattaaataaaaaataaaaagaactagatatttgtgggattttaagtaaaaatccagtgaaatccttggtaaaataagttgattcattgattctggtggatgagtgatcttaaacttttttttttttttttttttttttttgagatagggtcttgtctgtcacccaggcgggagcacagtagcacttatcatggctcactgcaggatcaacctcctgggccgaagcaatcctctcaccttagccaccccaggacctagagtagtcccggcatatcccaccatgcccagctaatttttttactttttgtagagacaggatcttactatattcccaggctggtcttaaattcctggcctcaggcgatcctcctgccctgccctcccaaagtgttgggattacaggcatgagccaccacacccagtcctgattttaaacttttaaaattgttccttataagtcatgtactctaataggccttcatttcagagatgcagagacaggtgccagaaaggaagagaaaggacctatctcaggtcatatctaagccatggcagagtgaggaccaaaacctgggtctgcagaattatgcagtcagtgcttttcttgcttggttctttgattcatacttactttgctttctctgagcgcttgtctgtgtcagatcagtgtggaggtccctgtttccaggaagactttttgtatattcactgcctcccatccccttccatgcatgtccaaccttttggcttccctgggccacattggaagaagaattgtcttgagccacacataaaatagactaacactaatgatagttaatgagcttaaaaaaaataaaaatgtaaaaagggtccatgcatcatacgcatcttttttttttttttttatagacagagttttgctctgttgcccaggccgagtgcagtggcgtgatcttggctcactgcaacctccgcctcctgggttcaagcatttctcctgcctcagcctcccgggtagctgggactacaagggcagccacctcgcctggctaatttttttttttttttttttttagtagagtcagagttttaccatgttagctaggctggtttcaaatgcctgacctcaagtgatcctcccaccttggcctccgaaagtgctgggattgcaggcataagccaccacgcccggcccatgcatgatttttgtgatatccaccaccacagataagcaaaagagtccttgcattcaaagagttggacacctgtgcaccgtccaagtattctcttagtgcttgctgcttaacattattgtagctcttactgcttattgaactcttatttactcatgtatctgtagaccttagtagcccccaaacatccccaggctttactgcagggaccagtgcctagtgaagtggtagatgtcaatagatggatagccaaaataaccacataggtgtcttgctttatttcaggaatgcctctggctcaggcagtagccattcttcagaagcactgtcgcatcatcaaaaacgtccaggttctctacagtgaacaggtgagtggtggctgatttgtttattgaaatagcatccctcggtagtgagtcacttccagagctgatgctttgggataggctgactggcaaggatagctgt

SEQ ID NO: 16266 - DNA, 2300 bp, Homo sapien
gggtctgtagttctgagttcaggatgagggttcaatctaaagattgatgaatagacaggtggggagtgggtggggtggccccaggggatgtcctgaaggacaccaaccagaatgggaacagccaaagaggaaggaggaaaaccaggagatttggaaaccaggggattacccacccactataatggagcgggtagtcaagaccgaggagtgtctgttggactcagttaaaaggagcttaccagtcaggggtctttctgagtcatggtggaggcagcccgaagctttatcacaggagggaatggaaggtgaggccgcggagaaagctggagcagaggactcctgattactttgtgaccaaaaagagtaaggctcagggtggagatttggcttttttttttttttttttttttggagagagtctcactctgttgccaggttggagtgcagtggcacgatctcggctcattgcagccttcgtctcccgggttcaagtgattttcctgcctcagcctcccaagtacctgggattacaggcacgtgccaccatacctggctaatttttgtatttttaatagagacagggtttctccatgttggccaggctggtctcaaactcctggcctcaagtgatccacctgccttggcctcccaaagtgttgggattacaggagtaagccaccacgactggcctttttttttttttgagacagtctcgctctgttgcccaggatggagtgcagtggtgtgttcttggctcactgcaacctccaccttccaggttcaagcaattctcctgcctcagccctctaagtagctgggattacaggtgcccaccaccatgtctagctaatttttgtatttttagtagagatgggggtttcaccacgttggccaggctggtcttgacttcctgacctcaagtgatccactcacctcagcctcccaaagtgttgaggttacaggcataagccaccacacccagccagagaggtggctttttaagattgaacattggtgggaagaagccgtcaggagcagatatagcccttggacagaggatggggctgggttcttaagagaccagtagaggctgtctattccaggctccaccacatgggctgggaccaagaaagagagagctggcagctgagctgcgcaaggacttagctctccattgcagagcacctctgtccacctgcatcccagagcaatcctttagccaaggcctccgccaggagtcttcccaagctgtccccatccttgccagccctgtctgacctgcagctgcacaggcctgatcatttctacctgcagtaggctatgctggggaccaggggactcagaactgcacctggcttgggctcaggtccattagcccccggggagacaggctgaagtgcttgcctgtgaaattaaagcagactgggttggccccctgttctgtatcccagtggatgaatgagcggggcaaggacagataaaataatcctggcctgaatttcagaagacctgggggcagagctttctggcctttggatcctgggcaagtcacttaactccccgaagagccccccagtgtccccatctgggcatgaatgagagctgctggcagagttgccctgaggattgggtgggctgccttgtttgtcccgtgcgtgtgtttactgggggtggggagcatggcagaaccaggagtaagaagacagccatgtgtctcgggggcagcgtatgcaccctgcctgatggaatcagggctgctgaggagaggcccgcccgggatggtggccaggttcatgcgcatttggaaccggcctgctcaggggctcctagcagcccaggctccgccccactccagagacgcgggagtggggagtggatagttgggggagctaaccaggggagttgatgcttcttcccaatccccagaaaggcgaatttggggtgtgagcacccagaccagcccttcccagagggactgagagtgaggaggctccctctcagggattagtccccactctgaggccggagtgctcctggcgccggggcggagctgagctccagaagtctgggcgcgcacagctggagggtcacgtggcacggcaccggtcccccttcctgccaacgctgcatttggctcgggcccggtccatggcggcccctcggaccctgcgctgagccccggaggccagggcgtccggggctgcgccacttccgagggccgagcgtgagtgtcgggaccccagggcccgacattgaggggatggcagggtggaagggattcggcctcagcgcgagggagg

SEQ ID NO: 16267 - DNA, 2300 bp, Homo sapien
tggtgcctcacacctgtaacccagcactttgggaagctgaggtgggcagatcgcttgagcccaggagtttgagaccagcctgggcaacatggtgaaactccatctctactaaaaatacaaaaactagccaggcatggcggcgtgtgcctaaagtcccagctacttgaaaggttgaggtgagagggttgcttgagctgggaaggtcaaggctgcagtgagctgcgatagtgccactgcactccagcctgggtgacagagcaagaccctgtctcaaaaacaagacaattgaaaaaacaaaggtcgagagtagtgccttactcctgtaatcgcagcactttgggaggccagggcaggaggacagcttcctgttcctcatgtaaacagatggcagctgggccaccccatctgtcctgccccatagctaacactcaacactcctcttagcccaccatatataaaccctgatgagagtacaggagtgtgactgatggggcaggaggtagggccttgagcccatgattataggaaaagggtgggtaggaaaagggtgaggtggggagaaagaggaggcagttttctacttgctgtctcacggggtagtaactgggagaccattgagctgtaggtcagtgcagtggttccttggctgggaattttgcccccgctggtccagagctaggtttttgtcagaagatggaggaaggagatactatactagcaccaaggggccctggctttttctggacagggaaggaatagagcaatttgtgttggaaatgactggagccgaactccaagggctttataacaaaaaggaattatttagctcacataactgaaaagtccagtgtgcaatggcttcagggacggctggatccaggggcctagtatgcttaggaatgcacttctccatctcttgactctttctttctgtgtcagcttcattcccagccaggctcttcccaagcagtgctaaaggagagctaccttttccttccagttcagccccaagggaagggaaagtagtgcctctttcctattggctcaaccagagtcgcagcgttgattctcatgggtccaacttaagtcctataccccgccctgaactaatcactgcagaaatgtgaatggaatatgcagattggccaggtctggtacacaagcccgacctggaactagggagtgggacacaggcacatggattgagaagagggaggagggaagtccccaaaggtaagtcaggcttggggagagaatctgggtagatgcaaactacaggtgcccttcgaagtgaagacaggaggtttagtcttaggctgaggtcctccagaaatgctgggctcaagtctactcagaaggcaaggccaggatatgggtctggttggctttggggcatgggcaccatccagaatgaagatgtctcttgtccgcattggtaagagagacacacaggcctgagaaggaagcagagaagccccattgcaggatctgcctctgctccccctccactgtgaccttgggctctttctccaagaaggcagtggagggacagtcctcactgcaagcctggggcgggtgggactctgtacagagccaggagctcaaggggcttcctgtgagatggtgaactcctgtcccaagtatgccaaccagtggtggggacaactgaaccatgtgggacttgaggctactgtggtggggacagctgaaccacgtggggctgggtagttgtctccagggtggagggaggggggatgaactggatacctgactgtctgcatctccaggaggtgagatggcagctgggcaaaatgggcacgaagagtgggtgggcagcgcatacctgtttgtggagtcctcgctggacaaggtggtcctgtcggatgcctacgcgcacccccagcagaaggtggcagtgtacagggctctgcaggctgccttggcaggtgcgtggatgggcgggcatgtggagaggaaggggtggcctggagcattttgtgggtgggcctgggtttagccacctttaagaagaagatttggggtgggaggagcaagacggaggacccctggctgtgcagactctcttctttgcttgtggcatgaccttgaggataggcgtgtgttctcgagtctgtgtatgatttaccaatttgtgcactaacgtcctttgctccatccccgcccccctccaccagccggctcactcctttctactaattgtggatgtctctctcctcttttcctctcttactgcagcactccttgctcaagacccctccccagtacctacccttccaggc

SEQ ID NO: 16268 - DNA, 2300 bp, Homo sapien
ccgtgagacagcaagtagaaaactgcctcctctttctccccacctcacccttttcctacccacccttttcctataatcatgggctcaaggccctacctcctgccccatcagtcacactcctgtactctcatcagggtttatatatggtgggctaagaggagtgttgagtgttagctatggggcaggacagatggggtggcccagctgccatctgtttacatgaggaacaggaagctgtcctcctgccctggcctcccaaagtgctgcgattacaggagtaaggcactactctcgacctttgttttttcaattgtcttgtttttgagacagggtcttgctctgtcacccaggctggagtgcagtggcactatcgcagctcactgcagccttgaccttcccagctcaagcaaccctctcacctcaacctttcaagtagctgggactttaggcacacgccgccatgcctggctagtttttgtatttttagtagagatggagtttcaccatgttgcccaggctggtctcaaactcctgggctcaagcgatctgcccacctcagcttcccaaagtgctgggttacaggtgtgaggcaccacacccagccttctaatcttttcatagaaaacattaatacttgtgtacttacgccaaaccacagtctggatagtaacaggaagtttgcattttgtttatctctgggcaggatgaaggaaggtaggtgggggtggggaaggattgtgggtgatttttattttctttgtatttagcaatattttctgctttatgtgaagtagacatattttctttgtattaaaagagcaaaataaatttgttttctttaaaagcaaaacaagaaaaaacaggaaactctgcaggtgacaagtgggtccataatagggagccagccacggaggtgagataaggggggagtccttcgaaagtggcctggggagtaggagagagtgggaacttcccctggaaacattccctctttcatgtctttctggccccttgacttgagagtgcttgacttggttatggtcccaccccaaggggtggaagtggggaccgaacaggaccattgtctgcccatcaggtctgtgggggtcgagggggaggtggggagtactgggaacctggagactggggatgctttctcacactcactagtactagaagatggggaaggtgaaccaggctggaggtcgagttaacagggtaaagaggccagggccctagtttcgcatccgccgactggcagctcttcttacgtgttctttcacggaagcccctccttgggaagccccgcgccccacccaccaggagtcgtccctttttgggcggggctgaggcttccaggctgggtcctgagaaagtttggtggccggagactgtggggcgcttaggtaccgacctaacaacttctgcgcctgtttccagggacgagccacgcacggtgccccctgaacacctaacagtcccgggggcagccccacctctggctgggtggacagagacagcctgtgggcgtggcccagaactgaaagcctgtgactccttgcgacccgccgggcacaccccctactcagctacgcagctcccgagcgcttgaggggagcttcccaggctcccactagcccaccctcaagctggggtttcgcacgtgcgatcggctggggtgggcaagggggtctccgctcaaggaaagtattcagaaccagccccttctcccccaccctctctcctgcagggccctactgcacctcgaaagtgctggcagggacgaggagcctgcgggggccaaattccgtaccgtcccccgcctcccacggtgttcgaacagctcagtagaccgccgccaccagctggctggagcagccgccggtgacatctgcgccgcgcccacgcttcggagccaagatccacctcctctcccgcccgcaccggggagcccacccacccacctgctgcactaacctggccgcctcggcggggcctgggttcccacgcccgccaggctccgctctactccgccgcttccgggtgtgcgcggaggcgctggggcggtgccctagcccgagccgccccgtccgcccgcgcgtcccgccccgcgggctcccggtggctgcttcccgtccgctgtcctctgctgccagtcccctgccccgggcaaagcccatctggtccgccgagcaggtaagacaccagcgcccaaggttagacggcaggaagacccgactttgggggtttgcgattcttacgaggcggggggctcgtaagagctacagctgccagacttc

SEQ ID NO: 16269 - DNA, 2300 bp, Homo sapien
agcccacgactccacggagaaggtgagtgggcggtggggagaggagtgtggaggagcaggctcacctgatttttgtgtcgtgccacacggcgctgcaggtagcagcggcggcccaggccctgcagaccctggcggcggcagcacggtctctcagggacaggtggcggaagatgagtgccagcacctcctctggcagtccctctccaggctcggccatggcccagatccggctggggtgggaggatccgccactcccaatagctccggcctggagagagacggacgtctctgaggtcgggaaggcgcaaagtgttgcaggaagaccgagcttaggtgtacaaatgcttgtggcctgaggaactgagggcctctcagacagcgtggggcatcagataaccccgaaacttgttcacaaagcagatttcaccgcctcacctactaaatcaggctctccggaaagggtaaggcccaggaatctgcatttcaacaagcccctgtgactccacaggttccacgttgagaactcccctcccacttttttttttttttttctttttttttgagacagggtctcgctctttacccaggctggagtgcagtggcgcaatcacaactcactgcaccctcagtctcccgggctcaagcaatcctcccacctcagcctcccgagtagctgggactacaggggcacgccaccacgcctggctaatttttgtaattttgttgcagagacgaggtctcgctttgttgcccagactgacctcgaactcctaggctcaagcgatcggcccgcctgggcctcccaaagtgctgggattacgggcatgagccaccgcgcccggcctgagaaaccccatcttaaccccgccggttagtagaaagtgactacagggttaataaggcgggagcgttaatgtaggcttttctttgtcagggaccatgagccaatcaggaagcgaggcgtgggcggggcaaagctggatccacccctggaggggaggctccttccccgcctccgcctcgccggggagatgtcccgggtgcttcctaagacagccccactggatgaaaaaaaacttgggtctctgggacctgacggttctggggcctgaggggctcaagatttaagttccgacccctgagcagccctggctcccgctgagcaatttgggttcggctggaactccgcagacccaccctggagcgcagcctttagagggggatgggttactggaaagtgtgcgtcctctttgaagttgccaatcctgtttgtttttgttttgttttgttttgagacggaatctagctgtgtcgcccaggctggagtgcagtggcgagatctcggctcactgcaaactccgcctcgcgggttcaagcgattcttctgcctcagcctcccgagtagctgggactccaggcgcgcgccacctcgccgggctaatttttgtatttttagtagagacggggtttcaccatattggccaggctggtctcaaactcctgacctcaggtgatccacctgcctcggccttccaaagtgctgggattacaggcgtgagccaccgcgcccggccgccaatcttgttttaaggttcttaaaggtttgtgtacacaaggcttcacactactcgccagttaatgttcccatatcttccgggctaacagtttctcccggaatttgtgccacgtgtttcctggggcttcagatacgttcggccgggcttgtacctgggacccatgggcaccccgttttgagtgcccactggtagcagcgatcttgaagccggatccccaggggtaccagaaaattctggtctccagggggcgcccccttgatttaccgaagtctggcagctgtagctcttacgagccccccgcctcgtaagaatcgcaaacccccaaagtcgggtcttcctgccgtctaaccttgggcgctggtgtcttacctgctcggcggaccagatgggctttgcccggggcaggggactggcagcagaggacagcggacgggaagcagccaccgggagcccgcggggcgggacgcgcgggcggacggggcggctcgggctagggcaccgccccagcgcctccgcgcacacccggaagcggcggagtagagcggagcctggcgggcgtgggaacccaggccccgccgaggcggccaggttagtgcagcaggtgggtgggtgggctccccggtgcgggcgggagaggaggtggatcttggctccgaagcgtgggcgcggcgcagatgtcaccggcggctgctccagccagctggtggcggcggtctactgagc

SEQ ID NO: 16270 - DNA, 2300 bp, Homo sapien
tggtctgaacagagacgtggggagggaggcaggaaatgggatggcagctggaaccccagctaaggggtgggtagaggcttctccgctggtcgcagggactcagctgaggccttttctgcacggctctaacccaagttgcgaatgtgagctggaaggcatgctgccaccttatctgtccgcctgcctcgaccacattcacaacctacggctggaatttgagccatcgaggaagccgagccgccgggcggccatcgagctgctgatggttctggcgggccgtgccccggggctgcgaggcctgcgcctggagtgccgcggagaaaaaccgctcttcgacgcgggccgcgacgtcctggaggctgtgcacgctgtatgcggggcggccagccagctacgccacctcgacctgcggcgcttgtccttcacactggacgacgcgctggtgctgcaggcggcgcgcagctgtcccgagctccacagcctttttctggacaacagtaccctagtgggcagcgtgggtcccggctcagtgctcgagctactggaggcctgcccgcgcctgcgcgctctcggcctgcacctagccagtttgtcgcacgccatcctcgaagcactggcggcgccagaccgagcgcctttcgcgctcttggctctgcggtgcgcgtgccccgaagatgcacgcgcgtccccgctgcccaacgaagcctgggtcgcgttgcgccgccgccaccctgggctggcagtggagctggagctggagcccgcgctgcccgctgagagcgtgacgcgcgtcctgcagccagccgtccccgtggctgcgctgcgcctcaacctctcaggcgacaccgtaggcccagtgcgcttcgcagcacaccactacgccgcaaccctgtgcgcgctcgaggtgcgcgcagccgcttcggccgagctgaacgccgcgctggaggagctggcggcgcgctgcgcggccctgcgcgaggtgcattgtttctgcgtggtgagccactcggtgctggacgccttccgcgcgcactgcccgcgcctgcgcacctataccctcaagctcacgcgcgagccgcatccctggaggcctacgctcgtggcgtgattgggcgacttctctcccccgtccccgtggacgtaagcgctctgagagggaacggggggggtgtccaggcgcgccccgagtgctagtgccttcttttgggattgttgccccccgggtctttaccgagttgggaactgtgatggcatcgggaccagtcctgggcgccctgagaccactcgctgctctcaccctctgcagacgccccacccgctcggtcctggacacactgcccccctctcttgcctccacccctctgcggactctgcagctccgcggccccggcgcagggagagggagggcacgggcgcgggccgggcctcaagggtgagtgtgaaataaacaaatcctgcagtgtttctgcgtcctattaaaggcggggtcggatctgaaagggaaggacagggaacgcgcggggtaccggaggagccatcccggcagaggttgggtttcctcaagagcctctggacgacacagctgcggggggtcagggtcggggcactcacacccttggaatgactacgtcccggggttcggcgggagggggcgtgcttccctgcccccccttcctatctgcttgccctgcctggggcttcactgtgcctctggccattaccttctaggacttgcccagcccacaccaggtcgcgcaccggcgatttctcctgtagaacaaagaaggaaatagagggaccgagaggggtgggactcgaacccaagtctcccactcatctcaccccaccccaccccactccaccccaccccacccctccactccactccactccacacatcccatccagccagccttttctgcctgctggtgcctcggccgctgtccgagccccgccccgcgggcttgcacgtggcccccgcctgacccggcgccccggggcggagtagggcggagcgggcggcaaacgcagcactttccgcggctttgacgagcccgcagcggccgggcccgagcgcagagccgggccgagactgcaccatgcaggaagcgccagctgcgctgcccacggagccaggccccagccccgtgcctgccttcctcggcaagctatgggcgctggtgggggacccaggcacagaccacctgatccgctggagcccggtgagggccggggcccctcgattccccctgtggtcccggggtccctccacgtcagtgaacacccatgcccgcccaacc

SEQ ID NO: 16271 - DNA, 2300 bp, Homo sapien
ggtgacatagtgaaactgtctccaaaaaaaagaaaagaaagaaagaaggaaagagagagagagagagaaagaaaaaagaaaggaagaaagaaagaaataaagaaagaagagaaagaagcatggatattgatacttgcatagggaggggaagggtcccaaagccccagctccaccacccaaacttcaggtcccaggtaggaagcagaggcactttctctgtgccatttatggcaggagtggggaggttgggggtggagagaggatggggatcctctcctatcattttctaaagattgggggattaaaatcttgatgcatctgggttccttgggaacttaatgcggggtggacactgcaggccaaaagcagttctgtctgcacagggggcctctgggcctggaaagcggggacaggagcccagagagtctgctgcctccgatgctgcttcagccccctcaagaaagtgtggaacctgcagggcctctagatgtgagtaccccttctgctgaaacaggggcatgagacctggtggggtctagctctctgtggagcctggggagggcaccactgacccagagctctcctcaggtgctgggccccagtctccaagggcgagaatggaccctgatggacttggacatggagctgtccttggtaagaagtgggtcggggagggcagaggccaggggtggctgagtcaagccctctggtccatagctgttctctgtgagccaaagccgtgtctctagaagaattgtcacagtgatttcccagctgtccccctcagctgctaggtcccctccccagctgctccctgcggttctcacgcagatgcagcccttggttccagagcggggtgagcctgagctggcggtcaaggggttaaattctccaagcccaggtaatggttgtgatgactcctacctgggaggacgccgtgattgggctgagctaccttgattgagtgagggggcaatctgcaatttgcagggaaatcctgagttcaggctgcactgcagagcgttccttgagccacccatgccctcaccattgggcgagagtggggaggttaagaatggatgttttatcctaactgagcagaaggcaggcgggcagggctctccttccctgaagaaaggagggggaacatttcccctggtgagcgcagtcccacttctcctagggaaggaccccacgctcggggccccactcctgctggatgtccaggcggccttgggaggcccagccctgggcctgcctggggctttaaccatttatagcactcctgagagccggactgcctcctacttgggcccggaagccagtccctccccctaagaccccgcgcctctgaaggggcttggaaccagtccgccgctgcacatccttcttggcttcctggcgccccctatcgggggtgagcgaagcccccactactaaatggcctctctccactaccccgactatccctgcacataaactccgttttttttttttctgtttctggtctcttttctctatcgaccagggagcacaggagttatgggtggggggtgattttgcatttgtagaagcgtccagatactaggtttttaatagaggaaccccaggagggtggaggtgcttggggatccggtgcctagctcccttgcttaggcccgggtccagggctggcgcggggccgctgcaatctctgggaagcgggggcttctgggtcgcgctcagctctgcaatgcatgcgttctgtgatcctggtgagttggtatccttctctgaacttcctctgtgacaggcagagaagaggggtcgatgacaagatagatggaaagcacctggaaattggcaggccctgagtgggcgctggacgtgtggggccgcgggccgaactgccccctcctggcctcatctcctggtgcgccccgggtggggagggaaagctgactacatgcacgtccccagccagcgcgcggcctccgcggtgtggctcctagtgcccggggaagaaccctcaccctccctattcccagcagccctggccgccccgcccccgccgcagctgctgcacccacccccaccctgcccggccctttctgcaccgtcatctcctgccccgccgaggcttgacccgtgagtggggacgcccaaaacgggccagaccgggagccccactcccggctgtgggagggaagggaaaccgagattgggcagaatcagcgccccaccacccgctgcggcgctcgggggtcgggggggcggggtgggtaggactgtgggccccgccctgccgcaggactctcaag

SEQ ID NO: 16272 - DNA, 2300 bp, Homo sapien
tggggtggcaaggcaggagctgatggagactcactgagaagtggagaagcaagattcatcacatacgggacataaagggagatggaggggcagggggtagtcctggtctcggcctggtggggaagggcttcaatgggaggaagccagggtgtgaagtgacgggggaggtatagtgtgacaccagagggtactgagaaagacctgggaggcaggatggcggctaggactaaatcctctctcccagagaaggccgagcctcctagagccagagaaggaggcagaggagggacagcaaagggaagaagagatgggaggatgccgtgtgaacaaagccaaggcggggaggagaagaagttattatcagggtgggggtgggctgagggcatggttcaaggcctgatgtctttgcctcctaatgccgggggtcttgctggctgggtcaggccactcacaggaatgggccataatccttggttgacaataaatggacaaagcagctgggtgcggtggctcatgcctgtaatcccaacactttgggaggccaaggtgggtggatcacgaggtcaggagttcgagaccagcctagccaacatagtgaaaccccgtctcaactaaaaacacaaaaaattagctgagcgtggtgcgggcacctgtaatctcagctactcgggaggctgaggcagaagaatcgcttgaactcaggaggcagaggttgcagtgatgagagaatgtgccactgcactccagcctgggcaacagagtgagactctgtcaaaaaaaaaaaaaaaaaatggataaagcagattgactctccctaatagccgctgttggtagagatagtctctcaagagccaggcatggtggttcacatggtggttcacaaagtgctggtaatcccagcactttggaaggctgagatgggaggattgcttgaggccagcagttcgagaccagcctgatcaatatagcaagaccaggacaggcgcggtggctcacgcctgtaatcccagcactttgggaggccaaggcaggtggatcacgaggtcaggagttcaagaccagcctggccaacatagtgaaaccccgtctccactaaaataaataaatacaaaaaatatatatagcaagaccccacctctaaaaaaaaaaaaaaaaaaaaaggctgggcacgagaatcacttgagcctgggaggcggaggttgcagtgagccaagattgcgccactgcactccagcttgggcaacagcgagactccatctcaaaaaaaaaaaaaaaaaagtctctcaaaatagtgcgatccatggaggaaaatcagtccaagttcggcaagtatttgtcggtatcctgtatgagctaggccttgggtacttcaagatcaaacaacaaatgtctgtaggtaattcccaggtcagcagggagccaggtgggtcagcagagagacagtcacattaggagttagggcttcagtagggagacaggtgggtctcaggtgatgtcaagagatcttggtcagagctaggcctgaagaagattctggtatctctgctcaggaatcaggggaccaggaagggccaggagactacattggggttgcactatggtggtggtgttggtgggagggtgtagaggcggggcttgtcctggaaagttggatatcagggtcaaggtaaggggagaggggcagggaggctctcagcactttgtgctctgggttcagaggggactggaggatagagtatggaagcagggagctctgatcctgggttctgcagggccaaagcaggaggcagaaggctggacttagtaagtggtgaggatggtgagagaaatattcagcagtcagactggaaaggacttgtctgcaagctgggtgtggagtatcagcatcaatcctaggtttttctgcctggttaggtggggaagcagatttgagagaaagaccttagtttggataaacggggtctgaactcgcctcggatttgccgggggtggagctcaggacgtcctggttggggagggcattcagagagtagatgccagtcctgggaaaggcaggggaggagaggagagccacggctgacgcttggggacagaaggaggagcctgaggaggagacaggacagagcgtctggagaggcaggaggacaccgagttccccgtgttggcctccaggtcctgtgcttgcggagccgtccggcggctgggatcgaggtgaacttaaaccccagcctgggtgttcactgggggcattgagggagtggtcagaggcggcgagggcagcggggagggcaaccccccat

SEQ ID NO: 16273 - DNA, 2300 bp, Homo sapien
tagagaggaagagattgatgatgtaggagagaggagaaatgctggaagtgagtcactgagcaggcaagggagctcagcagctggagcctctccaggtagtctctggggagggttgggattggactgagtcctggaacagagtcggggtgagcgccctgacactggctttggatgaccactggaaagatccctcagataggggacaagccagagattggcttggatttgctgaagcttccttctgcttcccaaaagcagattctaatttggatttcaacagatggctcagaggagagagggcattctggggggtaccggcgtaagcatggggccctcaaacattgaaactgactgaggccaaataggcaggaggatatgggtaaagccaggtggatgggcaggggtggcactgagaagatgccataggctgaaggcagtccctgaggtcttctcacctacctaatctgcccaggcagctgaagctgcactgtaccacctcccagattaagtgagtgagcacagagattagaatcacgagtaaggggctcagtccttgccttcaggagctcaggctgagaggattccagtaaccaccacctaggtgggtgtttaaaactcttgctttcggctgggtgcgatggctcatgcatttaattccagcactttgggaggctgaggcgggaggatcacttcaggccaggagttggaggctgcaatgagctatgatcattgcactgcactccaccttgggcaacagagtgagaccctgtctcaaaaaacaaaaacgaaaacaaaagtgctttcttccggcccagcatatttgggtgagtctgctggaggcaatggacgctgcagccaatcagacccctggtagcagagcctgggcccaccaagggcccagcagaggcaatgtggagtacagggcctgctggtcgtttggtcacacccactcatgctggtctccacatgcccttctgtgtccccagaggtcgacagtgtggggagttggagtgacccggctggatgtgacccccaggacagaatggtgctggactcaggggctcaggcgtatgatcaggcaccccccagcccgcctaccagtcccccatccctgcgccataggctgaagccctcagaccgagatgggccaccactgtacccctggtctcagtccctggccttgcccctggctctggcagtccccccagcgctgcagccccagcctgagcagcagccgttctcacagatgctcctgggccaccgtggccacatgcgtcgcagtgagagcacctactctgtaaatagtactggccggcgggggcgtggcaccctgggacggcctccacctggacggggacggaacccaggtgggggcaccctgcggcctgcagcctccctgcctcacattgctaagactcaaagggatgcaggccatattgccagcaagagcccctgcatgttggtggccctgcggccaaccaacatggaccgtgagcgagacaagttcttccagtcccattacacctacaatccacagtttgagtaccaggagcccatgcccacggctgtgctggaaaagtactgcgaggcctctggacagttcatccatcaggtcagtccagcctccccaccgtatcctggccctgaccacccaaggggcttgtcctgaccagccactgtggccccgtgtacaggcagttggcatcattgaggctgttctggagaagtttggaacctatgaacactttgaggctgccactggggggcagctgctcaccaagtgccagatatggtcgattgtgcgcaaatacatgcagaaggagggctgcgctggggaggtgagcttgcctgcagagcccttcctctacatgccccaaatcagggtgtcttgtgggcggtcccaggtccagctccacacctgacccacccctgcccctgccccagtgaggtgggagctggttctgagcagaggtgatgaagggtgggtgccctggccaattgtctggcctcgctgccctgtggcatcattgggtccacctgcaccctggccccaggctggtggccatggctcagagcactgccacctgcaggttgtggtgcagctgagtgaggacctgctgtcccaggcagtgatgatggtggagaacagccggcccacattggcgatcaacctgaccggagcccgccagtactggttggagggcatgctgcggcatgagataggtcagggtgtgggtatccgggcagatgggtaggcatgaaaggggcctgggagctgggaggggtgggaaggaggggcc

SEQ ID NO: 16274 - DNA, 2300 bp, Homo sapien
tgtttgatatgcctattaaacattcaagtgatgacactgcagtgaagatggacatgatggcatgtgcctgtggttccagctagttggaaggctgaggtgggaagattgcttgaggccaggaattcaagaccagcctgggcaaatagacagtatctcaaattgcactgaaattggcaacactggtctaaagtttatggaagaagtctgagctaatgtatgtaaaaccacaagagtggatgagaacatctagggagtgaacgtaaatggagaagtttccataggcaagtcctggagcattacagtattaagaggtcagggagacagggatgaccagcaaggtaggaggagaactaagttcgactgtgtttggaaaaccaagtggacagcatgtttccaggaggcagtgacttttttttttttttttttttttgagatggagtttcgctgttgttgcccaggctggagtgccatggcacaatcttggctcaccgcaaactccgcctcccgggttcaagcgattctcctacctcagcctcccgagtagctggggttacaggcatgtgccaccacgcccagctaattttgtattttagtagagacggggtttctccatgttggtcaggctggtctcgaactcccgacctcaggtgatccgcccgcctcggcctcccaaagtgctgggattacaggcgtgagccaccctgcctggcctccaggaggtagtgattaactgtatcgggtgctgatcaatatgaaggtcattgctggtcattggtgaccttgatcagatcaatttggatggagtgctgggaacaaaaggctaattggagtgaatttaagagagaacaggaaaaaaggaactggagactgggtatagatgactcgaggtatgtgctgcaataggagcaagtggagggagatgcagcggggctgtagctggaggagtgtgggttctagtgagggttttgttttgttttttaagatggagaagtaacagcatgtgtttatcctgatggaaagagtccagtagagaggaagagattgatgatgtaggagagaggagaaatgctggaagtgagtcactgagcaggcaagggagctcagcagctggagcctctccaggtagtctctggggagggttgggattggactgagtcctggaacagagtcggggtgagcgccctgacactggctttggatgaccactggaaagatccctcagataggggacaagccagagattggcttggatttgctgaagcttccttctgcttcccaaaagcagattctaatttggatttcaacagatggctcagaggagagagggcattctggggggtaccggcgtaagcatggggccctcaaacattgaaactgactgaggccaaataggcaggaggatatgggtaaagccaggtggatgggcaggggtggcactgagaagatgccataggctgaaggcagtccctgaggtcttctcacctacctaatctgcccaggcagctgaagctgcactgtaccacctcccagattaagtgagtgagcacagagattagaatcacgagtaaggggctcagtccttgccttcaggagctcaggctgagaggattccagtaaccaccacctaggtgggtgtttaaaactcttgctttcggctgggtgcgatggctcatgcatttaattccagcactttgggaggctgaggcgggaggatcacttcaggccaggagttggaggctgcaatgagctatgatcattgcactgcactccaccttgggcaacagagtgagaccctgtctcaaaaaacaaaaacgaaaacaaaagtgctttcttccggcccagcatatttgggtgagtctgctggaggcaatggacgctgcagccaatcagacccctggtagcagagcctgggcccaccaagggcccagcagaggcaatgtggagtacagggcctgctggtcgtttggtcacacccactcatgctggtctccacatgcccttctgtgtccccagaggtcgacagtgtggggagttggagtgacccggctggatgtgacccccaggacagaatggtgctggactcaggggctcaggcgtatgatcaggcaccccccagcccgcctaccagtcccccatccctgcgccataggctgaagccctcagaccgagatgggccaccactgtacccctggtctcagtccctggccttgcccctggctctggcagtccccccagcgctgcagccccagcctgagcagcagccgttctcacagatgctcctgggccaccgtggccacatg

SEQ ID NO: 16275 - DNA, 2300 bp, Homo sapien
cagctcgccaagcgcccgtctcccagccctggtccatgcctgggaccagaagtgcagagagccgctgttctcgctccctcccgtcaaacacttgccccacaaggtggcgccggagggtctggaccaccgagggccatgcgggccttggccttggtcctgaagccgtagttttgcttggtccagctcctcagtgtctgtcctgcagctggacggggcgccttcaggggccttggctccagtggaagctgcgctggacgagttgcagaggaggatctaccgcttggtgttggaggcgctgcaggcggagctccaggtgaggcctccttcaggtcaggatgggagcaggtggagaggtggcggtacagctacgtatgggggtctccgcggcaatgccagatctggatcatttccccagcccctgttcgcggatctgccctcgcgccaatggctgtcgagccctgagctcctgcaaagtgtgtgtgaacggacggggcgcttctgccgggacttctggcgcgtgcggaaccccacggttcaggtgggttgggggaaaagattggggaaggggcggcgcgggtgagaggcgacctgcacccgcctgattgcctccccgcagctgctgctggctgaggccgagcgtgccgtggtgctccagtacctgagcgcgctgatgcaaggccgcctggtgtgccgcggagccgacgagaggacccaggcggccgagcgcctgcggcacgatgctgcccagcttcagcagcttttcctcagtttggtgagagcttcttgggcgggcagacgggcgagagtctcagtggctgggtgggagagagggctggcgcgagaccctaccccgacgtgctcagggcctggaggagaacgcgcactgcgcgccggtgctgctcgccctgagggagctgctaaacctccgcgaccccgcgctgctgggcctggaggtggctggcctgcggcaacaatttcccgacgtgaggtgcggactgggggccagaagggaagagaagccggagggcggggaggacggggctgacgcgcctccttggtgcccctgcagcgaggaccacgtctccgccctcttgggcctgcgcggggacttgtcccgggagcagcacctggccgcgctcagctccctgcaggctgcgctgccgccgtcgccccgcgcgagccgccgcgtcctcttcagcctagtgcccgcgcccgcgctcgcgccggcctcctgcctgccctcggggtcctgcgcccgagccctgctgctcgcagaataaaccacggctgccggacgcctgagtctgtgtgtgttggggaaggtgggatggaataaaagtgcccacgagggttgagggaattcttgcagagtgacacgcttaaagtatcctggctcccgtcctggtacacgggctgcgccccgcctatgcaggcatctgccctctgtgcagactgcgttcccgaggccgcgggctacgcccccacgtctccgcgcccaggccgtgagcaagagtctccgccgccctggccgcctggagcccctgaagcccagcaactcgctgtggccttgggaagggggcgggcccaggaccacgaacaccgccccctcaaccctgcctggcttcgctcccagtggcctcgggggcgcgccgccgcggagactgacgcgaagccccacgctttcgtaagagcgtgcgcgcgcccgaggacgtacgtcatcggcgacggctcccgccggctgggcgtccggtggccggtgtagcagagcgggagcggcgggcggcgagcagaggagctaacaggtgggggcacggcacgcggacggacccccccaaaggccgggaggaggcgcgcgacgcgacctttcctgatctcccggagaagcctccactccattgtctcctggccccaccctccattgggcacgcccttcaccttatcccccaccacttattggctgcaggtcacgcccctcctctatttctggttccccattggctcttcaccttgtcctctccggggcttctctccgcacaggccacaccctctcatttgtcactagaccccgccttaatagtggggggctcctcccccatccatccttcattcattatgcacccagtgctgggtgcttggtacacgggggtgaatcagaccccattcctgccttcggggagttcaggggattgtgggaggacacggacctagactccaacagtgacagctctgagtaaagaagtcgccgaagcagtgggacactagacgcggggaaggcttcctggaggaagtgaggcctaaac

SEQ ID NO: 16276 - DNA, 2300 bp, Homo sapien
ggaggcctgtgcccactctgtctcgcttgacatctgcaggggcacgactgggaaacctagcaggcaaagcctcccaggtgccctccgcatcacacccgctccctctcacttcccgagggggccgggaagaacctccttcctcctctcagaagggcttagacagaggcagcagctcacaggggcatctactctgcctgcttgccccgggcccacctcagctctggctcctccaggcccacaatggactcagcagccaaggatgagatgcagccggcgttgtcccctggtatgaaccttttgggtggactaggggaggaatgatggcaacaaagatgggactggctgggcgcagtggctcacgcctgtaatcccaacactttgggaggtcaagatgggcagatgacctgaggtcaggagctccaaaccaacctggccaacatagtgaaaccccgtctctactaaaaatacaaaaactagctgggcgtgatggcacgcgcctgtaatcccagctcctcgggagactgaggcaggagaatcgcttgaacccgggaggcggaggttacagggacccgagattgcaccactgcactccagcctgggcaacagagcgagactccatctcaataaacaaataaacaaacaaataaataaataaataaataaataagaaagctgggactggggtcgttgggccctcctccctgactacacggctgcccaggctcttccttcccaggacctgagtggccagagcaggagcgggcagagcagctggcccggggtgcagcgctcaagtgggcctcaggcatcttctaccggccggagcagctggccaggctaggccagtaccgcagccgcgaggtgcagcgtacctgctccctggaatcgcgcctcaaggtgggcatggggcagggggtgcgggtgctgggactgtgctgcagggctggcccagcctcatggctccatctttccacagtcagtgatgcagtcatacctggaaggcgtgcagactggtgtgtggcagctggcccaggccattgaggtggtgcagggaacccgggaggccctgagccaggcccgtgggttgctccagggcatgtcccaggccttacagactctagagcccctacgggagcgggttgcccagcacaagcaactgcaggccctgtctcacctgctgcctcggctgcgggcaggtgagcatgcagggaccctgggcctcagcctccaatagtcagtccacaaacacccatccctaatcaaggggctggggcactagatggggaactgcatagagcagcacaccagggacctcccagacagtagcccgggcttcccatggcctatgaggcagctcatcctgggattcccacgtgtgggatgcttgagtcaggacagacacccagtcatgtgactctggccacctggttatcagtatattcaaactcttccctaacagagtggctgagcgagtactggcaggaccccccgatttcccctgccttccctccaggatcctcagcttcctcatattccatgagttcatgggttgacctctggcccaccaggtctttaggacattgccaagatcctcttagattggccagtactctactggttatttatttatttatttatggttttttgttcattttttgttttgttttgtttttgaaacagagtctcactctgtcacccaggctggagtgcagtggtgtgatctcggctcactgcaacctccatatcccaggttcaagcaatcctcctgcctcagcctccccagtagctgggattacaggcatgtgccaccatgcctggctaatttttgtatttttagtagagatgggatttcaccatgttggccgggctggtctcaaactcctgacctcaagtgattcacccacgttggcctcccgaagtgctgggattacaggcatgagccactgtgcccagcttactctactggttgttaaatattttatgcatcacccccgccctgggcctcagtatcccctgctgtacacattgaggcggtgggaaggctgagacccagggccgtctccttttcactctcattagtgccggctgcagtgtcccacacacagactctgattgatggccaacagttcttggaggcatatgtgagccttcgggagctggagcagctgcgagaggatacgtgggcacccctggggggcctggagttgccagtcttccaggggctggaccttctgttcgaggcactgggccaggctgtggaagcagctgcaggggccgcagggaagctggcacgggaggac

SEQ ID NO: 16277 - DNA, 2300 bp, Homo sapien
ggcttggagtgcccgggggcggcggcgcctgtggcccggcctccgccatcgcgcccgcccgccgcctcccctcagccaggccaggccaggccggcgccgccgccacttccgcttccgttcctggccgccgggcagccggagccagcgttactgcttccgcttccgtcccgtgcgccttccagggaacgtggcgctattgctgtctgtgggtgcagccgcaaaacttcagggaccagtagcaaatgtccagcctccgaataagacgaaaactacctgggtagaccggggagttgggatgaagttggggaggaatgagaagggcgtcagtgggccgccctggcagtagagaaggggacgccatcggaactttccttgccaatctgccccaacatcactaactctgcctagtccccatcttgggagaggagaccacactacctgactaatccaatctgctccctcaaacctgttccttttccatttttttctctttatttattcttttatatatttcaaactcattttactgccacatcaaacctgttcctaaaggctgccctactgtcttggggtcaccccatctattcctatccctcacttcctgccaaacagcaagcactaactatatctaccttgtccaccttgttccacccatggtcctagcctcatctttcgctcgtcttgtcctcacagtacagtgctcagagactatggggttatgaacacttcagccaatgcaaacgtgtttacctatgtgtaaatatcagtaaagcactcagtcattcctggcatgcaggaatgtgtgatacggtcattttgtaacttttaacattgttactatttattattgtttcttttagatcaggtcctctgggaaatgggactcgagatagggttttgcagcaagtttgttggggatccacactttttttttttgagacagggtctcactctgttgcccaggccggagtgcagtggcaagatcaatgccgtctcagcttcctgggcccaagcgattctcccacctcagcctcccaagtagctgggaccacaggcatgcaccaccatgcccggctcatttatttttagttttttagagatgtgggtctcactatattgcccaggctagtcttgaactcgtgggctcaagagatcctcccacctcagcctcccagaatgctgggatgaccggtgtgagccaccgcacctggtcaggatccacacctttaagggattaagacaagcagaattgagcagatgcaattatattataggcctcagcctatcccactaggatctctgaaattggggtagcacttctgaagggttcatgttcacacgatggtaccatgcttttgcaccccaatattgactgagagactcagtggtgtgatctcagtagcctacactcctggcagctggagaatgagcacttctgtcctgaagggtggatttgggtggtggactgaacatccactaaataattaccaccttatagtcccttccctggctccctataactctcaagataaacacagctgcccagttgcggtgactcacgcctgtaatctcccaacactttgggaggctgaggcaggcagatcgcttgagcccagaaggctgcagtgagctatggtggtgccactgtactccagccttggtgacagatcaagaccctgtctaaaacaaaaaagataaacacagctttcatgaccctctcctaccaccccccaccacacccctcttcacaagagcctgccacctctcactcctccgcagaggtacacatcctcctcagaggctggccaacacagttttcatcctgtgctgttgatgtcgtctgcatccatatctgcacactctgcccaccaccccaggttgaggccaagtctagcaaatccctatctcctctcctgagcactaagaggttctgggtaggctggtcaagactggttgagtacaagtacaccccacccccccgcccctcagggaagtgtcgcccagctgtccccaccctctgtgcagacactctttcctgttgggaataaaatgccagagactcagcttccttcctttctgttgatggccttggggagggaggagcctcggtgggaagaaggggcttctgggtggggagtgggagagagacttccttggggagaggaattcagctgcacgctggagtcagctggagttgcccaggccctgtgagcaagtggcaggcgtgcccagctgcattggggagagggctgttctcaaggccaaggtcatttttggagggagaactggacgcctgatca

SEQ ID NO: 16278 - DNA, 2300 bp, Homo sapien
ctcacagggcctgggcaactccagctgactccagcgtgcagctgaattcctctccccaaggaagtctctctcccactccccacccagaagccccttcttcccaccgaggctcctccctccccaaggccatcaacagaaaggaaggaagctgagtctctggcattttattcccaacaggaaagagtgtctgcacagagggtggggacagctgggcgacacttccctgaggggcgggggggtggggtgtacttgtactcaaccagtcttgaccagcctacccagaacctcttagtgctcaggagaggagatagggatttgctagacttggcctcaacctggggtggtgggcagagtgtgcagatatggatgcagacgacatcaacagcacaggatgaaaactgtgttggccagcctctgaggaggatgtgtacctctgcggaggagtgagaggtggcaggctcttgtgaagaggggtgtggtggggggtggtaggagagggtcatgaaagctgtgtttatcttttttgttttagacagggtcttgatctgtcaccaaggctggagtacagtggcaccaccatagctcactgcagccttctgggctcaagcgatctgcctgcctcagcctcccaaagtgttgggagattacaggcgtgagtcaccgcaactgggcagctgtgtttatcttgagagttatagggagccagggaagggactataaggtggtaattatttagtggatgttcagtccaccacccaaatccacccttcaggacagaagtgctcattctccagctgccaggagtgtaggctactgagatcacaccactgagtctctcagtcaatattggggtgcaaaagcatggtaccatcgtgtgaacatgaacccttcagaagtgctaccccaatttcagagatcctagtgggataggctgaggcctataatataattgcatctgctcaattctgcttgtcttaatcccttaaaggtgtggatcctgaccaggtgcggtggctcacaccggtcatcccagcattctgggaggctgaggtgggaggatctcttgagcccacgagttcaagactagcctgggcaatatagtgagacccacatctctaaaaaactaaaaataaatgagccgggcatggtggtgcatgcctgtggtcccagctacttgggaggctgaggtgggagaatcgcttgggcccaggaagctgagacggcattgatcttgccactgcactccggcctgggcaacagagtgagaccctgtctcaaaaaaaaaaagtgtggatccccaacaaacttgctgcaaaaccctatctcgagtcccatttcccagaggacctgatctaaaagaaacaataataaatagtaacaatgttaaaagttacaaaatgaccgtatcacacattcctgcatgccaggaatgactgagtgctttactgatatttacacataggtaaacacgtttgcattggctgaagtgttcataaccccatagtctctgagcactgtactgtgaggacaagacgagcgaaagatgaggctaggaccatgggtggaacaaggtggacaaggtagatatagttagtgcttgctgtttggcaggaagtgagggataggaatagatggggtgaccccaagacagtagggcagcctttaggaacaggtttgatgtggcagtaaaatgagtttgaaatatataaaagaataaataaagagaaaaaaatggaaaaggaacaggtttgagggagcagattggattagtcaggtagtgtggtctcctctcccaagatggggactaggcagagttagtgatgttggggcagattggcaaggaaagttccgatggcgtccccttctctactgccagggcggcccactgacgcccttctcattcctccccaacttcatcccaactccccggtctacccaggtagttttcgtcttattcggaggctggacatttgctactggtccctgaagttttgcggctgcacccacagacagcaatagcgccacgttccctggaaggcgcacgggacggaagcggaagcagtaacgctggctccggctgcccggcggccaggaacggaagcggaagtggcggcggcgccggcctggcctggcctggctgaggggaggcggcgggcgggcgcgatggcggaggccgggccacaggcgccgccgcccccgggcactccaagccggcacgaaaagagcctgggactgctcaccaccaagttcgtgtcccttctgcaggaggccaaggacggcgtgcttgacctcaagctggt

SEQ ID NO: 16279 - DNA, 2300 bp, Homo sapien
aaatgcaggcctgacagaaaaatgtggcatttctctgtttgcaaaagtacctttaatggctccttgagggccaccagataagatctgaactcctgagcctggcatgtgaaatccctcatagtcctctctggttgcattttcttctgcttcccctgtgtcctcctggccagaggtttgtagtggagtcatcaccctgtagcgccaccacctctgcctggtgacctgacccagggtctggtctcagtcttgcacagagcaggtgctcagcaagggtgggacagatggggtaccttctgtcagacagggggtgcatgctgagcccagaaagaggcttctgtggcctttccgagttagaaaagctgtaccaatcgcttgcagggggcctttggtaccctgggctcagcactgaggaattcaggtttagcaagtgaggccaacagacagtgccagcttggcctaggcaggacctacatctccttagctgtgtggagcctcagggtgggtggtataggatccgaggaagccagggggctgtagtggggccaggctggacctctgtgccctgagcatggctttcttgtttttcagttttggaactccccaaagagctgtcagaaatctttgatcccacacgaggtaggctgctgcattcctccctgaggctaggggtaagggacacagctcattgggtcctatggctgttttcttgcccttttgaggaccttgttgtggcgcttatggtaactggggcaaagggtgaagttcctgatgggcaggtggggttccctttcctgggctttggtgggtggagaggtgggagctggaatgttagtaactgagctccctccattcccagagtgcatgagctcggagctgctggaggagttgatgtcctcagaaggtgggtggccctggaaggtgggagtgggtgtgggcaggggttgggctgctgctaggggagccctggcccagggcctgagactagtgctctctgcagtgtttgcccctctgcttcgtctttctccacccccgggagaccacgattatatctacaacctggacgagagtgaaggtgtctgtgacctctttgatgtgcctgttctcaacctctgactgacagggacatgccctgtgtggctgggacccagactgtctgacctgggggttgcctggggacctctcccacccgacccctacagagcttgagagccacagacgcctggcttctccggcctcccctcaccgcacagttctggccacagctcccgctcctgtgctggcacttctgtgctcgcagagcaggggaacaggactcagcccccatcaccgtggagccaaagtgtttgcttctccctttctgcggccttcgccagcccaggctcggctgccacccagtggcacagaaccgaggagctgccattaccccccatagggggcagtgtcttgttcctgccagcctcagtgtcttgcttctgccagctccttcccctaggagggaagggtggggtggaactgggcacatgccagcaccacttctagcttccttcgctatcccccaccccctgaccctccagctcctcctggccctctcacgtgcccacttctgctgggcctttagccctagaacctgcaggtggtgggggcggctaccaagaaggaacagaggtctctggggaggagtctgggtggtccagccctgatgattggccccacctcctgctgccccataaccctctcttcatttcggctttttcatttaccctcatttagagccatttgcagagatttagaaagatttacagtaacgaatggattcctatataaagattatttttatactttttgcagcaaaaggaaattgtaatatttgtacagtgttcaagtgaataaaaaccatgcctaaggctagctctgatgtggttctttggggaccctccttgggactgtgctggactggcagtgtgattgggtgggtcaccttgctggaactaggggtggggcggcctccggcagcctgccctccccgcccccacctgccgcaccttggtgtggggcggggccgcctcggcggggcggggcaggcggagccgtcctaccttcctacccccagactccaacccggaactaacctcggctcccttgggaaggccgcgttgcatggccaggagcagcagtctgggccgcgagtgcgggacaccgaggtcaggtctcggaaagggaggacctcctcgtccccaggggccccaggccaggtgcacccttggccgcaggtgcacggtctccggaaagtgcaggcgccc

SEQ ID NO: 16280 - DNA, 2300 bp, Homo sapien
ctccctccattcccagagtgcatgagctcggagctgctggaggagttgatgtcctcagaaggtgggtggccctggaaggtgggagtgggtgtgggcaggggttgggctgctgctaggggagccctggcccagggcctgagactagtgctctctgcagtgtttgcccctctgcttcgtctttctccacccccgggagaccacgattatatctacaacctggacgagagtgaaggtgtctgtgacctctttgatgtgcctgttctcaacctctgactgacagggacatgccctgtgtggctgggacccagactgtctgacctgggggttgcctggggacctctcccacccgacccctacagagcttgagagccacagacgcctggcttctccggcctcccctcaccgcacagttctggccacagctcccgctcctgtgctggcacttctgtgctcgcagagcaggggaacaggactcagcccccatcaccgtggagccaaagtgtttgcttctccctttctgcggccttcgccagcccaggctcggctgccacccagtggcacagaaccgaggagctgccattaccccccatagggggcagtgtcttgttcctgccagcctcagtgtcttgcttctgccagctccttcccctaggagggaagggtggggtggaactgggcacatgccagcaccacttctagcttccttcgctatcccccaccccctgaccctccagctcctcctggccctctcacgtgcccacttctgctgggcctttagccctagaacctgcaggtggtgggggcggctaccaagaaggaacagaggtctctggggaggagtctgggtggtccagccctgatgattggccccacctcctgctgccccataaccctctcttcatttcggctttttcatttaccctcatttagagccatttgcagagatttagaaagatttacagtaacgaatggattcctatataaagattatttttatactttttgcagcaaaaggaaattgtaatatttgtacagtgttcaagtgaataaaaaccatgcctaaggctagctctgatgtggttctttggggaccctccttgggactgtgctggactggcagtgtgattgggtgggtcaccttgctggaactaggggtggggcggcctccggcagcctgccctccccgcccccacctgccgcaccttggtgtggggcggggccgcctcggcggggcggggcaggcggagccgtcctaccttcctacccccagactccaacccggaactaacctcggctcccttgggaaggccgcgttgcatggccaggagcagcagtctgggccgcgagtgcgggacaccgaggtcaggtctcggaaagggaggacctcctcgtccccaggggccccaggccaggtgcacccttggccgcaggtgcacggtctccggaaagtgcaggcgcccacgtcccagctggaccatggcgcctccgcggaacgtggtgaagattgccatcaagatgcgtgacgccatcccgcagctcatccagctggaccaggtcacccggctggtcccgcctccatctgccccactgccccacctcccggtagccccctggccctcggggcagcccgccccacccctccccccaggctcctccccatccctccctgcccaggccgcgagaatgaccactccacttgcaggcgaagcccctggccgctgtgctgaaggaggtgtgcgacgcgtgagtgctgccgggccagggcctgcggagggcgggagggcaggaggggcggcgccccctgccggcctcgctgagcctcgtgcccctcaggtggagcctgacgcactctgagcgttacgccctgcagtttgcggatgggcaccggagatacatcaccgagaatgtgagtcccctctccccagccccaagctcggccttccgacccctctaacccacctggccccgataactctggctcttcatcccactaccggagcgcgatctgttattcacccccagccgccctcaccgacaccccagttgatcagtcctcggagccctccctgacctcgctgccttttctgctgtcttctccagaaccgcgcggagatcaagaatggcagcatcctgtgcctcagcacggccccagtaatgcccctcccgtcccgccttccccatccctgcccctttgctccaggtccagaggccccccgccccggaggcccccgccccagccctgccttgcgccacctagttgacgcccggggccgcacacttccaggtcccacccttaccat

SEQ ID NO: 16281 - DNA, 2300 bp, Homo sapien
gccctgcagtttgcggatgggcaccggagatacatcaccgagaatgtgagtcccctctccccagccccaagctcggccttccgacccctctaacccacctggccccgataactctggctcttcatcccactaccggagcgcgatctgttattcacccccagccgccctcaccgacaccccagttgatcagtcctcggagccctccctgacctcgctgccttttctgctgtcttctccagaaccgcgcggagatcaagaatggcagcatcctgtgcctcagcacggccccagtaatgcccctcccgtcccgccttccccatccctgcccctttgctccaggtccagaggccccccgccccggaggcccccgccccagccctgccttgcgccacctagttgacgcccggggccgcacacttccaggtcccacccttaccatgcccagcctcttcacctctgctcctgctccgttcctgccaggaccttgaggctgagcagctcttgggtgggctgcagagtaacagtcctgaagggcgccgggaagccctgaggcgccttgttccgctggcctcggacatgatctttgccagggaggtcatcagccgtaatgggctccagatactaggcaccatcattgaagatggggacgagtgagcacagggatgtgtgggctgggggagatggtgggtctttctggtcctggggtggtcctgctcagccccagatgtcccccctccagcctaggagaggtgctggccctcagcctgagggccttctcagagctcatggagcacggcgtggtgtcctgggagactctgagcatcccctttgtgaggaaggtgggtgggctttcctagggcagcgggtgggggcagtggagcagtggggcagtggtagacccggtcttccatgggggtgaggtggtgacacccccgccccttacaggtggtgtgctacgtgaacatgaacctcatggatgcctccgtgcctcccctggcccttgggctgctggagagtgtgaccttgagcagcccagccctgggccagctggtcaagagcgaggtgcccctggataggctgctggtgcacctacaggtgtaagcctctggggctggggtccagatgcagggagcagggctggagcctgaatgttccactgagccctcttcttgccataggatgaaccagcagctgcaaaccaaggccatggccctgctgacagccttgctgcagggggccagccctgtggaacgcaaggtgagtgtcgatcggtggctagatgggggcagcacccggtgggcgctgccccaccctgaagcaaaatcctctaagccccccttttttttttttttgagatggagtcttgctctgtcgcccaggctggagtgcagtggtgcgatcttggctcactgcaagctctgcctcccgggttcacaccattctcctgcctcagcctcccgagtagctgggactacaggctcccgccaccacgcccagctgatttttttttttttttttttttttttaagtagagacggggtttcactgtgttagccaggttggcctccatctcctgacctcgtgatccgcccgccttggcctcccaaagtgctgggattacaggcgtgagccaccgcgcccagcctaagccccctttctttctaccccctcagcacatgcttgactatctttggcagaggaaccttcgccagttcatctataaggtaggaagtggtgggccagggggacctctctgcccctccctccccgtgagccctcgcttacaccagggactggctgtcctgcagaacatcatccacagtgcagcaccaatgggcgacgagatggctcatcacctgtacgtactgcaggctctcatgctggggctgctggagccgcgcatgcggacgcccctggacccctacagccaggtgtgtgtctttggtgaggacaaggcagggggtggcttagagcttggccttgaatctataatcttgatcccctcccccgccacccaacactgaccccaggagcagcgggagcagctgcaggtcctacgccaggctgccttcgaggtggagggggagtcctcgggtgccgggctaagtgctgaccgtcgccgttccctctgtgcccgagagttccgcaaactgggcttttctgtgagtatcacccctacccaactccccacccctgcctcagcccagggctgttgttccaggcggccgtggcccttcttgaactgcctgtgcccacttcccccagaacagcaacccagcacaggacctggagcgcgtgcc

SEQ ID NO: 16282 - DNA, 2300 bp, Homo sapien
tgaccatgttccagaagtaggggctggaaggggaacctggctgacctctggttcctgtgaaagaggccaggagctggttcctgtctcttacaccactccttcctgtcattatagccatgggtgccacttttctgtggtagaagccaggctggcctctccacacctgggaatgagtcctgtgtttcttaggagaatcctgttgataagtatcttgcaggagcacatcctgtgagtcacttctaccttctgcattccttttttttttttttgagatggagttttgctgtgttgcccagactggagtgcagtggtgcaatcttggatcactgcaacctccacctctcaggttcaagtagctgggattataagcatgcaccaccacacccagctaatttcttttttttttttttgagatggagtcttgctctgtcacccaggctggagtgcagtgatgcagtctcggctcactgcaagctccacctcccgggttcacgccattctcctgcctcagcctcccaagtagctgggactacaggtgcccacgaccatgcccggctaatttttttgtatttttagtagagatggggtttcaccatgttagccaggatggtctcgatctcctgacctcatgatcagcccactttggcctcccagagtgctgggattacaggtgtgagccaccgcgcccagcctaatttctgtatttttagtagagatggggtttcaccatgttggccaggctagtctcaaactcttgacctcaagtgatccacccgcctcagcctcccaaagtgctgggattacaggcaggagccaccgtgcctggcttggattcccttttgatgatggtctgtggggtaccagcagggaacagcagcttgtttttgcagttactgacaagacaggtttaggggaggattctttcctgcatcaggaccatgttgattcaaacaagagccctctttgagtaccacgtgcctgcaacatgggcaagaggtagggagatggggcaaggattttagaatccaagccctcttctccctctccccagagatctgttccacacaaattataccgatttccctttggctcactccagtgcaatatcaggaaaagttctttgaagatatctccttagctgggagctcctaaatgcctgcacaagccaacttattcccactatgtagccctgagcttttctcttgggtcccacctgactccagctgtgcactccccattatcactcccctgttcctctacgcagagccagctcaacttccttggcacgggtgaggtgtgttctgttagctcccacccacggaaatgggaggcttcagcgtccttaccgtgacagatagatgccccctccagagatatgccacagggatcacaagcacatcttgaactctggagcatccggggcccaataccaggcagctccacgtgttcatgcacacacacatgcacatgcacatacatgcacacacacatatatgcacatgcacacatttttgcttacacacagaacacatttttgcaaacattcatgtgacaggctctctcaggccaccaggggacttaggcctcactgcctgccccagacctctggcacctgggccatagagggttgtggtgagtgacacctacctcacttctatcgccttccactcttcagagggctacgctctctagaaagtgggggaggctggctgcttagctcatgccaagtccctggagtaggaggctgagtccatggatctcagggcctccttctgaaagtcccaaaggttggggtctggcatactttgccctcccacaccctggggacttcactgggtttcctctaggtcacatctcagccctcctgtgctcagcatgccaactccccactctgtctccacccctccctcagtatcccatcctgtccatcgctaaccttcccgccttcctctgatggtcatctcctttgaaccccagctcccacttcctacccatacccaacttgaccacacatgacaccacacaccatggtgggtctccattgtggaagggcccttccttgacctgccctcaacctctggccagtgacttgtcaccaaacccaatgcccagcaccctctgaagccagagggctacccccaggcctgctgctgctccgtagacagatgtgcgatacaacatccccgtgtcctctgcctccctctcggccatcaagagcctgggcctcaggggcatctgctgcatcagcctgaccaacctggatggctctctggcttcacaccaggtgctacaatctgttg

SEQ ID NO: 16283 - DNA, 2300 bp, Homo sapien
ccagctccactacttccacatatactgatgtgtgaccttaaacaaggtacttgacctctgggagtttcagtttccatatctataaaatagggatactttaaaaaaatctagatcatagcctcatggggattaaattttacatatatatagtgtgtgtgtgacaactagatgttccataaatggttgctggattgctgttactaaaatttctacctctgcaacttccccacctcagtagctcagatttctaccaccccaaacctggattccttccacaatctcccacctgaactctttgcctccaagttcatccttgctaatacattatgcacactgtcacaaggttaatttttcctataaaacagttttcagtttcagctcacccctgctgtaaaacttcagggttcacagtactctcaggacagtctccactcctggatcagcactgccaggcctctgtgcctgattggactcgctggtccccaaacttccccagtccagtctccccattgccctacgcacacagcatgtctatttccttttgcctatgcgggccttttccctgggatccccttcttgaagcttaacttcaccaacccattgtgatctctccttcctttctcagatgccaagcacgcaggcacagtgctcagccagtgcttactggattaaattaaggttggacagtccagtcctctacctctattttcaccaagagtatgctcagggaaggggtcggggaaataaagcagtcattactgagaggacaatgactggcagaatagacttctgggccaggaagggaggcatagggaagacagtattgatggggactgggactgaccaagtcccaatccctccagggaggcacggaagcctgtttgagctgagttaagacagtggccatcctgtcttctggggctaagcagccagcccaagagcaaagggagaggggaacaaacctgtcatcccttggggtgagtcgggaagggacacaattcattgacctaagaagagggtggcctttctagagggacaagaggaggcagtgatgaggatggagtgaccatcccatgagtcccatctcaagggggctactggagataatgattggtcactcatggggtctatggggatggaaatagatagcccctaaagctaagggggaaagggatagcactgcaagctcaataggggtgggaacaggcctatttttgctaaggacaggagcatcattccaggaccgatgggaaagggtggcctgtttcccatgggcagagagagggggctgccaaccctcaggacaaaagagatggagaagccattccaacaggccactgaagacaaaacctgttatctccctggcagatggggcagagtggtcttgcccctggctaaggggaaggagcaaacatcccacggagtgaaagaggtaagggcggccatcactaggggcctaggaatggggaacaggcctatccttgttaaaggaactcagagatcattgcagttgatggggagggagcagtctgtttcccactgccagggagaaggggcggccgtctctgtaggaaatggagagatcatcccaagggaccaatggggataagatcagttacccttcgggacgatgagatggagcggacatcttccagaactgagcggggaggagacagccacttcaagggaaggggatgggcagagggcctgttctcgcggagatgacagggcagctatcttctggggccgatagggaaggggaggacggtcccccaagctaaagggacagagtggcccaaaggaggaaccgttacccagagctagaaggtcccgggatcgggagggcgggtcgtttccgccaggctggaggggccgggctagctatctgacagcccctccccaaagctcaggaccgcgagggcggggcctgtccagagctaggcctgagggcggcttcctctcacctccaggggcagcgactccgccatcgcatccctgccgcctccgcccccactgcgcaaggctttctgggaaatgtagtctcgcctctttggggcggggcttgggaaggaagtgagacctatttccgtcgcaaaagctgacgacttcggtctgcgccggaagtgcatgagctgccgatgtggtgcttagtgattgcggtttcggtcgctctcccgtgtttcccgggctgggtatttgcctcgcaccatggcggtaaggaggatggatagggcggggtccgcaccagcaaagctctccaggggctgtgagagtgaaaactgagaaagaacattaaggga

SEQ ID NO: 16284 - DNA, 2300 bp, Homo sapien
agatgccccttcttgggagcgcccccagcccacataccagaagccagaaggaccagacatagagagagaagcagctgagcacctgcacgatggctgtcagtaggatcacatccttaaggtgcctgtggatagaaataaagctggaaagacagcatatgggcccttccacccttttcaagttgcaactcccttccacccttttcaagttacaagtagctgtgcttcttgggctatctgggccccagccctggggccgctcacctgggctggcggtgggggacactcactctgccatgccctgctccatgttgaggtccatgccaccatccatcagggccccatcctcagagaacgctgctcgtgccatcgagctcatagagtggtagctggccccatacactgccagactaaagcccagggccaactgcagagcaagaatgagggtatcaaaggccagccactgaccctacgcactcatccacctcccaggatggagatacttacccaggcccaaaatgaggcagatgagtaaaagaagaccaacgtcacaaggcagtaaatggcctgcaagcaatcacaggatcaggttggggtcagaagttacctccaaaccatgggtctccctcaactctgaccaagaattaggccaggctgtgggaggagcaaggttgttcttacagggttgaagaaagggccctgctccctgaatcccaaatacccactctcctctgacacccaactcagcccaggaaagaagcctttgtgtacttggaggtaggaagagctctcaaattcagctacgactcacgccttcattttctttgtgttttactagttagcactttctctgtgcccagatctctcatttctttttgactggagctctcttctagagctttttcgggtaccactcctcgtcaccaagcagggctgaggactagggaactgactataagtgggcatagaagcaaggaggtaggcacttacattggcccccagtatgatccgcaggtagaacttcagagtctctctgttctcttcaaatatctgcttcttccctctcgtgcccactttgcccttgggctgcagaggaatgatgagatgccgtcaggaggccacggtcctcctcattctccccaccagcctggtgagctatagagctccatccgcaactcagccaggtccccgtagtgcagaaacctagcaaaatccctgggatgtccacccatcctccagtccattctgcctagggctgacgccatctctccagcacccgcagctaggatcaatcgcctcttgctcgccctggaacaattcaatcctaagctaataccgcctctggatcccgtggtagtctggctttaggctaacgactcttccaagggtactcctgagcggagttgaatggtgcctctctcaggcctccgctggcgtagtcccgatctgggttaacccccacctcaggtcacttagatctctggcctgccctggtactgatgcccaccccgctctggcactagtcctggtatggtcctgcgccgccatccccccagcccagctctagcacggtctggccagggatggcgccccgctctggcccaccccatatcccttaatgttctttctcagttttcactctcacagcccctggagagctttgctggtgcggaccccgccctatccatcctccttaccgccatggtgcgaggcaaatacccagcccgggaaacacgggagagcgaccgaaaccgcaatcactaagcaccacatcggcagctcatgcacttccggcgcagaccgaagtcgtcagcttttgcgacggaaataggtctcacttccttcccaagccccgccccaaagaggcgagactacatttcccagaaagccttgcgcagtgggggcggaggcggcagggatgcgatggcggagtcgctgcccctggaggtgagaggaagccgccctcaggcctagctctggacaggccccgccctcgcggtcctgagctttggggaggggctgtcagatagctagcccggcccctccagcctggcggaaacgacccgccctcccgatcccgggaccttctagctctgggtaacggttcctcctttgggccactctgtccctttagcttgggggaccgtcctccccttccctatcggccccagaagatagctgccctgtcatctccgcgagaacaggccctctgcccatccccttcccttgaagtggctgtctcctccccgctcagttctggaagatgtccgctccatctcatcgtcccgaagggtaactgatct

SEQ ID NO: 16285 - DNA, 2300 bp, Homo sapien
catctgccgccgctcctgtcggcgctgccgtttctcattgtgctctggtgctggggtgccactgtctgcagtgaaccaggggcccagcacattcacccacaggaggtaaagggcccggcctggagcctacaagagaaacggtaacttgaagcaagatgcagggaataaaagatggggagggttagatgccccttcttgggagcgcccccagcccacataccagaagccagaaggaccagacatagagagagaagcagctgagcacctgcacgatggctgtcagtaggatcacatccttaaggtgcctgtggatagaaataaagctggaaagacagcatatgggcccttccacccttttcaagttgcaactcccttccacccttttcaagttacaagtagctgtgcttcttgggctatctgggccccagccctggggccgctcacctgggctggcggtgggggacactcactctgccatgccctgctccatgttgaggtccatgccaccatccatcagggccccatcctcagagaacgctgctcgtgccatcgagctcatagagtggtagctggccccatacactgccagactaaagcccagggccaactgcagagcaagaatgagggtatcaaaggccagccactgaccctacgcactcatccacctcccaggatggagatacttacccaggcccaaaatgaggcagatgagtaaaagaagaccaacgtcacaaggcagtaaatggcctgcaagcaatcacaggatcaggttggggtcagaagttacctccaaaccatgggtctccctcaactctgaccaagaattaggccaggctgtgggaggagcaaggttgttcttacagggttgaagaaagggccctgctccctgaatcccaaatacccactctcctctgacacccaactcagcccaggaaagaagcctttgtgtacttggaggtaggaagagctctcaaattcagctacgactcacgccttcattttctttgtgttttactagttagcactttctctgtgcccagatctctcatttctttttgactggagctctcttctagagctttttcgggtaccactcctcgtcaccaagcagggctgaggactagggaactgactataagtgggcatagaagcaaggaggtaggcacttacattggcccccagtatgatccgcaggtagaacttcagagtctctctgttctcttcaaatatctgcttcttccctctcgtgcccactttgcccttgggctgcagaggaatgatgagatgccgtcaggaggccacggtcctcctcattctccccaccagcctggtgagctatagagctccatccgcaactcagccaggtccccgtagtgcagaaacctagcaaaatccctgggatgtccacccatcctccagtccattctgcctagggctgacgccatctctccagcacccgcagctaggatcaatcgcctcttgctcgccctggaacaattcaatcctaagctaataccgcctctggatcccgtggtagtctggctttaggctaacgactcttccaagggtactcctgagcggagttgaatggtgcctctctcaggcctccgctggcgtagtcccgatctgggttaacccccacctcaggtcacttagatctctggcctgccctggtactgatgcccaccccgctctggcactagtcctggtatggtcctgcgccgccatccccccagcccagctctagcacggtctggccagggatggcgccccgctctggcccaccccatatcccttaatgttctttctcagttttcactctcacagcccctggagagctttgctggtgcggaccccgccctatccatcctccttaccgccatggtgcgaggcaaatacccagcccgggaaacacgggagagcgaccgaaaccgcaatcactaagcaccacatcggcagctcatgcacttccggcgcagaccgaagtcgtcagcttttgcgacggaaataggtctcacttccttcccaagccccgccccaaagaggcgagactacatttcccagaaagccttgcgcagtgggggcggaggcggcagggatgcgatggcggagtcgctgcccctggaggtgagaggaagccgccctcaggcctagctctggacaggccccgccctcgcggtcctgagctttggggaggggctgtcagatagctagcccggcccctccagcctggcggaaacgacccgccctcccgatcccgggaccttctagctctgggtaacggttcctcctttgggcca

SEQ ID NO: 16286 - DNA, 2300 bp, Homo sapien
cacaaagaaaatgaaggcgtgagtcgtagctgaatttgagagctcttcctacctccaagtacacaaaggcttctttcctgggctgagttgggtgtcagaggagagtgggtatttgggattcagggagcagggccctttcttcaaccctgtaagaacaaccttgctcctcccacagcctggcctaattcttggtcagagttgagggagacccatggtttggaggtaacttctgaccccaacctgatcctgtgattgcttgcaggccatttactgccttgtgacgttggtcttcttttactcatctgcctcattttgggcctgggtaagtatctccatcctgggaggtggatgagtgcgtagggtcagtggctggcctttgataccctcattcttgctctgcagttggccctgggctttagtctggcagtgtatggggccagctaccactctatgagctcgatggcacgagcagcgttctctgaggatggggccctgatggatggtggcatggacctcaacatggagcagggcatggcagagtgagtgtcccccaccgccagcccaggtgagcggccccagggctggggcccagatagcccaagaagcacagctacttgtaacttgaaaagggtggaagggagttgcaacttgaaaagggtggaagggcccatatgctgtctttccagctttatttctatccacaggcaccttaaggatgtgatcctactgacagccatcgtgcaggtgctcagctgcttctctctctatgtctggtccttctggcttctggtatgtgggctgggggcgctcccaagaaggggcatctaaccctccccatcttttattccctgcatcttgcttcaagttaccgtttctcttgtaggctccaggccgggccctttacctcctgtgggtgaatgtgctgggcccctggttcactgcagacagtggcaccccagcaccagagcacaatgagaaacggcagcgccgacaggagcggcggcagatgaagcggttatagccattgacattgtggccacaggccactggccctgggtggctctgtcagggtgcacagcccctcatgcctggagcaatgagggtctagtccaggggccaaaagcagtctgaggtattgggtatacttatactctatagggtcgttgaataaatggcttagaatgtggctgatggctgtgtgggtgatgagggatgaggcaggaaaagctggtcctatgggatttccctcctgctacaaacccagcctggtggggaccctgaaagaagagaaacctgttggattagctaagaaaattttattttgctccgtgcgttcaaggagctcacacacatgcacatgcatatgcatgcacacacacacatacacacacactcacatgcatacacacacggctaatactgctcaaggcatggctcctgggcacagagttctggggccagaattctgctctgggccctcctcactctgtcatctcctgcactgcagtccagggtccagatagatttccgggatacagcaccttcacacctccaggccaggacccttgcttagtcccagtgcctgcaccaggtcatctccgagcccactcttcaacgtccttctcactgcagggacagagcagggttggagggggttgatggggttcaggtgggcagtgggattgtggggggttacttacaagacttgcggttgccgcgggaacgcttgcgttccctagcagctaaggcacgaggactgctcttggtcactgactgcaccagaaggtccatgatctcatctgatgtatcactgggtaaactggagcctgggggttcttctggggatgcagtggagggccccactgtgggcatgattggggagctgctctggaccatgcctgaggaaggccagatagcaaagtcaggccaaggtggcactggagcccattccccacagctgctatgggcctcacctctgctgcggcgattgtgtgtggtgtcctcaggcctgctggtcagcagactcttcatactagcatgactgtcagcatctccccggcctggcccgctgctcactgctactgggacagaggggttgctgggggcttccccagccacacctgagaacttctctgtctggagaaagaagaagggtgagctgggaggagcgaaggaaaccaaggaggtggcagtcaagactaagacctggaagggcacccacctcggtgatcatgcgtccccgggtcttgttgcgctcacggtatgtggcctgcttctgctgctgctgtagcactcgttcc

SEQ ID NO: 16287 - DNA, 2300 bp, Homo sapien
caaaggccccttcccaccacctccacctctacctctggctgcccctcttccccattcagtgcctgacagctcagccctccccactaagaggaagacagtaaaacttttctggcgtgagctgaagctggctgggggccatggagtctctgcaagccgctttgggccctgcgccaccctctgggcttcactggaccctgtctcagtggacacggcccgactggaacacctctttgagtctcgtgccaaagaggtgctgccctccaaggtaaatccactcatctgcaaggtagccccaagggaggcaggagggaatcagagcttaaggatctgacctgttggagctagtcactcacttcccacatggggaaaccaaggcaaagaaaggagtaggaaattgtccaaggtctcctaacaagggatcagcagtgccccaactagaatctaaatgtggccgggcatggtggctcacacctgtaatccaagagtttgagaccagcctgtgcaacatagtgagacattatctctactaaaagttggtctgggtgtagtggctcatgcctgtaatcccaggaccttgggaggccgaggcaggtggatcatttgaggtcaggagttcgagaccagcctggtcaaattagcaaaaccccgtctctactaaaaacacaaaattagccaagcgtggtggcgggcacctgtaatcccagctactcgggaggctgaggcaggagaatcacttgaacccgggaggtagaggttgcagtgagtcgagatcgcaccattgcactccagcctgggggacaagagcaagacttcgtctcaaaaataactaaataaataaaaataaataaatgttaaaaaaaaaattagccgggcatggtggctcacccctgtaatcccagcactttgggaggccaaggcaggcagattacttgaggccaggagtttgagaccagcctggccaacatggtgaaaccccgtctctactaaaaatatgaaaatgagctgggcgtggtggctcatgcctgcaataccagctacttgggaggctgaggcaaaagaattgcttgaacctgggaggcggaaaaaaaaatgttaaaaaaaaaaatagttgggtatggtggtacacgcctgtaatcccagctacttgggaggctgaggcaggaaaatcccagaagataagctgcagtgggcgatgatggcaccactgcactccagcctagatggtagagccaggccctgtctcaaaagaatctaagctcatccccatgacttacacattccaggttgccagtttgtcagttgtgggatcatttggcaatctagaggagggccttggagtgccctctgaggttgctgtcccagctagtcccttcctcagtctttttttttttttttttttttttgagacagagtcttgctcagtcacccaggatgtagtgcaatggtgtgatctcagctcactgcaagctccgcctcccgggttcacgccattctcctgcctcagcctcccgagtagctgggactacaggtgcccgccaccacgcccagctaattttttttgtatttttagtagagatggggtttcaccatgttagccaggatggtctcgatctcctgacctcgtggtccacccgccttggcctcccaaagtgctgggattacaggcgtgagccaccgcgtcaggcccccttcctcagtcttacactgcccttcccccaaccatgcagaaagctggagagggccgccggacaatgaccacagtgctggaccccaagcgcagcaacgccatcaacatcggcctaaccacactgccacctgtgcatgtcattaaggctgctctgctcaactttgatgagtttgctgtcagcaaggatggcattgaggtgaggtcacccagctatgggtgttggggggaggtctggccttctcctttggtaggtgggcatttcctgtccctctggtggtgggcatgggcttggcatttctgcagggcagtccccagacactggggcctcccctagatgactgaggggtcaagaccaatgcctcaggcctcaggcctgcattgagggggccatgtcaggctctggctacatcctcagaagctactgaccatgatgcccacggaggaagagcggcagaagattgaggaagcccagctggccaaccctgacatacccctgggcccagccgagaacttcctgatgactcttgcctccattggcggcctcgctgctcgtctacaactctgggccttcaagctggactatgacagcatggagcgggtacctgggtcttgg

SEQ ID NO: 16288 - DNA, 2300 bp, Homo sapien
ttatgctgaaataatgggtgcaatccagtgtttcttttctggcccctccagcctctgtcagctctcagtccctgcctttccctcagccttaggttacccctccacccccacaccacacaccacacagcaccctaggtcccctccctgctcgcttctgagctgaagacttggcagaatgagccccaggttgggtgtccacatccccatctctggctgctaaggtgttgctattgaagcacagggaccactgtgaccccagtgaattggttcccagtgcttagcctttgggttaccgaggaggcatatgtctgggagaggataggcctgagtcccccagctttggttgcatcaggcacgtgaaacccctgctgggggaagcaatgctgaagccctgagcacatggcaggcctggcaggccggcctctgtacttactccagcctggcctgcccaggaggggactgggggacgggtgggctctcaggggccctgggtaggggggatgagaggaagagatggtaactgtggtgtcagctccatggttgctcatacccacacagagctaggcagtgatattggggttccttcccagccgcagtgggaagtgggggaaggtatgacacgaggaaactggaagtggaggggagagactgacgtggagcaggacagggtgctggaagagacagaggcagcagaacaagggagtgacagatagtgggcgggagacatgacaagaggcaaagacaggcagaacgtcggaggagacaaaggaaaccacaggaggaggagatccagtcagagccgaaccccacccgctggcagtcacttaccaaacggaagcagtttggtgaagtctggaaagagagagagagaaagcacgcgtttgggcagaggaggctgagtgcccatggaggggcgcaaagcggagggacaatgggagagaggactccagggtggcctctgtctccctacttacttgtagatgctcctctcgctggaggtgtcagctgagggtgccacagagatggtaggaaaaaggttcactgaagcttggagaccggagggagggcccacagggctggaggcggggcctgtcagcagggcggggccggtggaagaggtggggcctaccggtgaggcggggcctgtggggctgaaagcaggggctgtcagtggggcggggcctgagaagctggaggcggggcctgtcagtggggtggggcctgcggggcgggaggtggggcatgtcggtagggcaggcccagtggaggaggtgggggctgtctgtggggcggggcctgagggggttggggtcagggcctgtcagctcactgggccatgcctagtagatccaccctttcccatctacagatgctcgtacttacccaggttccggggcacgcgcggggcagcccccgccttccagagaacggcggctcctcttgccctcctcagaagaaggctttcgtcgttcccgccgcccaccagcgcctggggcttcttcgatgtctccatcctccaatttcagggcgttctagcagaggcggaccaggatgtaagaaagtggttaacgtgtatgcaggtggggtggggcgctggggactgcgcttctctcttccctctttccaatccgcctcagagcgtaaggcccggcccacctcgtagagcacaagctgcgtgcgcaggtcgacgtcagtgcccgcagtgcccaggtggcgctggaccagcgcttccatgccctgctgctccagtgcatccgtcacatcgtagaaggagtcctggtccgggagcgccgccagcgtctggagggcggggataagaaggcaaggctgaggttggtggggaggtcaggagcctgagcatcccagagctggcacccagtccttggccacaccttgttgatgagggtgaccgtgtacaccaacaactcagggtcagcgccattcttctcctccaggatggacaccagattggcccagggaggagcacctgccacacagaaagtggagcagtcatgggggaacaggtaggagagagggctctgagcggtggggggagaaagggacagtctctgaccggtggtgctggccacagagttcactgcacggatgaacagcggtgcgttgttttcggagtattctacaaacaccaacagcagcttcagggctgtcttcaccaccaagcgggactgaggagagaggtcagtacatatgagtggggcttaggccagacctgtgccagctgttgctggggaaggggaagggctgctggggctggacccagagagaatctaggcagaatg

SEQ ID NO: 16289 - DNA, 2300 bp, Homo sapien
tccctccccagctccgcctccagggtccgctacagcccaagcggctaccgtcactctgaccagggaagccaccctggcagaccgacggcgagtggaactcgagcacctccccaggtgcgcctaattcgaagggcagtcagaatggcggagccaagttcctggcacccctcttcagtttcccctcaacttgagaggggactcccccgcaggcggggcagagtggaccctgggaccccagcccaagacttttccggagaagaacactcgctccagcctcttcccgcggagcacctcccaccagttttcatggcgcccaccctgaacccccgatcgccccaacctttctccggcctccctcaccttgagcggcgctcccagcaggcggtgcaccgcgggtatctgcgcgcccaagggcagcgccccgtccaggctgcaggtgggggcccggcgcggctccggaaagttggcacatgcgaaggggtcggtgtcttccaggtactgcaccctcacggtcaccactgataccggctctccgtccccgcggtcttccccgcccgccatggctctgcggccggctcacgcagcgcgcctccgagtcccggccccagtgcagcttctactcaaagcacactgtagctccgcggttcgggcccggccggaccggacgcggctggaggggcggggccagacggaggcggggccgaggaagggggtggagccaagattagtccccgagtgcgcgccaggaggtaaccactgccggaggcggggccgccgctagccactcacagggcccaatgggaatcccgttagttcactggctaggagggcgggaaaaaccgagctcgcgccccaccttcgagaacgcgcagaaggcggggaggctttctttggtctggggatagtgaggctgcgttctctttgaggggtgttagggcagatggggcagaagtttctttagatagtggccggccaggtctctctcagttgagggacaagatagccctcattccttccatttgaggggtgagtccctgtggtttcctcatttagggaaagcagtgagagggggtcccttcaatttggagcaagaagtgagaataaattccacccagtttgaaggaagaggtgggatcagttccctttagttgtgggaggaagagggaaggatgcccttcagttttctgggaaaagattgggaggagtcagtttgagggggcagatagaacacgttcccctcagttttggagaaaaagtgggatgggtgcccctcagcctgaatgaaaagtggagacggtcctcctctgtttggggcgctatgagccgaatgcccctcagatttggaaaaagttgggtgcatctcgcctagtttgaagggaatcagtaggctgggttttccataggttcctgtcagcttcatcaaagagatgagacagttctctgtagtgtgactgaaagggagggccaggtgccccttggtttgggagatgaagaacagcctccctcttcgcctggcacgagctgggccagtctgggccttagggtttctgggacgttgggggcagcgttgtccgtcactgctttggggagcgtccagtgcgcgtgcgcagctcaggtccgggtgggggccggcagggggtcctgggcttggcaacgtgggcggagggcggccaagcacggtcccctgcgttttgcacccggccgcgccttggtcccaggggggtgctgctcgccgcacagcagcgctggccgaggaggagccgtgcccctcccgtcctgaccgcgccccccgcagacccccgcccttcccgctgcgggctgccccaggggggccgtggccgcgcaccgctctggatctggtgggggcggttttggggaggtttgggggcgcggactcgaaggagtaggttgtggaacttgggggagagctgcactggggaatttccggagctgggactgatttagggaggaaagaggagagagtccccgactacgagagtccgaggcagggtctcggagcctggacctggcttgggggtatcggagccgggattggggggagcgggccccacgtgcctgtgacgcgggggcgcccggtaggtggcggcggcgacgcggggccggcggccgtgcggtgccgggagggcggctgggcaggcggcaggatgctgcgcgccgccctgtccctgctcgcgctgcccctggcgggggcggccgaagagcccacccagaagccagagtccccgggcgagcctcccccaggcttagagctcttccgctggcagtggcacgaggtggag

SEQ ID NO: 16290 - DNA, 2300 bp, Homo sapien
accctcccctcaatgtccccacacatcctcaccagcgacagaggtttctgggaggctagggattggtgggggagagaccagactgaagagggcctactgcaaggggaagaggggagcggagagggcaaaggagcctacagatggagttggggagagcgggggacagcccttcagaaaggcaaatcctcagagctcccaggggagaagacagggacctgggacccacaagaagcgatgcaggaactgggcgagagcccggatttgtggaatccaaacctaagtcccagcaccgtgcaagaagccagccccaatctgaggaccgaggaggtgggggtgttgggggcgggtccgccgctggcggtcggcctggcgcacgcacacacgcactcaccgattttggccagactggccaccaggatccacagggccaccaggtagggcgcctccacctcgtgccactgccagcggaagagctctaagcctgggggaggctcgcccggggactctggcttctgggtgggctcttcggccgcccccgccaggggcagcgcgagcagggacagggcggcgcgcagcatcctgccgcctgcccagccgccctcccggcaccgcacggccgccggccccgcgtcgccgccgccacctaccgggcgcccccgcgtcacaggcacgtggggcccgctccccccaatcccggctccgatacccccaagccaggtccaggctccgagaccctgcctcggactctcgtagtcggggactctctcctctttcctccctaaatcagtcccagctccggaaattccccagtgcagctctcccccaagttccacaacctactccttcgagtccgcgcccccaaacctccccaaaaccgcccccaccagatccagagcggtgcgcggccacggcccccctggggcagcccgcagcgggaagggcgggggtctgcggggggcgcggtcaggacgggaggggcacggctcctcctcggccagcgctgctgtgcggcgagcagcacccccctgggaccaaggcgcggccgggtgcaaaacgcaggggaccgtgcttggccgccctccgcccacgttgccaagcccaggaccccctgccggcccccacccggacctgagctgcgcacgcgcactggacgctccccaaagcagtgacggacaacgctgcccccaacgtcccagaaaccctaaggcccagactggcccagctcgtgccaggcgaagagggaggctgttcttcatctcccaaaccaaggggcacctggccctccctttcagtcacactacagagaactgtctcatctctttgatgaagctgacaggaacctatggaaaacccagcctactgattcccttcaaactaggcgagatgcacccaactttttccaaatctgaggggcattcggctcatagcgccccaaacagaggaggaccgtctccacttttcattcaggctgaggggcacccatcccactttttctccaaaactgaggggaacgtgttctatctgccccctcaaactgactcctcccaatcttttcccagaaaactgaagggcatccttccctcttcctcccacaactaaagggaactgatcccacctcttccttcaaactgggtggaatttattctcacttcttgctccaaattgaagggaccccctctcactgctttccctaaatgaggaaaccacagggactcacccctcaaatggaaggaatgagggctatcttgtccctcaactgagagagacctggccggccactatctaaagaaacttctgccccatctgccctaacacccctcaaagagaacgcagcctcactatccccagaccaaagaaagcctccccgccttctgcgcgttctcgaaggtggggcgcgagctcggtttttcccgccctcctagccagtgaactaacgggattcccattgggccctgtgagtggctagcggcggccccgcctccggcagtggttacctcctggcgcgcactcggggactaatcttggctccacccccttcctcggccccgcctccgtctggccccgcccctccagccgcgtccggtccggccgggcccgaaccgcggagctacagtgtgctttgagtagaagctgcactggggccgggactcggaggcgcgctgcgtgagccggccgcagagccatggcgggcggggaagaccgcggggacggagagccggtatcagtggtgaccgtgagggtgcagtacctggaagacaccgaccccttcgcatgtgccaactttccggagccgcgccggg

SEQ ID NO: 16291 - DNA, 2300 bp, Homo sapien
gtcactcacaagtgtcattctgggtgtgttacatgctctctctgagcctcagtgtcctcatctctcaaatgagataatcatactcacttcataaggctgctgtcaggattaaatgacaaaatttaatgggaagaatctacccagggcctggctcaaggtaagggatcataaatgtcattatttgtcgggccgggtgcggtggctcatggttgtaatcccagcactttggtaggccaaggcgggtggatcccttgaggtcaggagtttgagatcagcctggccaacatgctgaaactccatctctactgaaaatacaaaaactagctgggcatggtggtgcatgcctgtaatcccagctactctggaggctgaggcaggagaatcacttgagcccaggagatggaggttgcagtggtgggggcagatgaacatggtgggtttgacagggaggcaggcaggtgacttggatgcaggagagcaagtgcgtcaagcgctcatccatgggtccttgccatgtgactgggcagggtggcctgagctgagagaacttggctggggtagtcttcgtgaaggagatgctgcacccaggcctcaaatgaggaaggattttgattaggggagatgggcatgggccttcaggaagaggagccagtgtgagactagactagtaatcagatttgttttccaggccagtctgggaggtagatgggaaggctgtgatgcctctaagtggccttgactgtcataccaaggagtttggagtttatttaggccaaaggcaagagaggtctggaagttctggggtatttgttgccctcagtatttggggtagtactgaagaggggtgtgcaaggtgaatgactgtgggtctgttgtcactagacccagtgaggcccagagccctcccctcctttttatttatttatttatttttgagacagagtctcgctttgtcacccaggctggagtgcagtggtgtgatcttgcctcactggaacccctgctttccaggttcatgtgattctcttgcctcagcctctcaagtagctgggattacaggcatgtgccaccacatctggctagtttttgtatttttagtagagatggggttttgccatgttggccaagctagtctggaactcccgacctcaggtgatctgcctgacttggccacccaaagtgctgggattttgtggcataagccacagtgcccggcccattttatttttgattgagtcatgttggcaagaaatgggaggctgagggagagttggggaagggccaggggagggaggcccattcccattttatgatctcagtggaaaaggctgctgtgagttgattctgctgccaggagagccacagagatgggccccatgagtcactgctcagtcctgcaagctcagcccacaaagcctgctgtggtcagccacccctggctggctccaggcccagctccccaatattccccactaggcctcagtgtgtcctcatttctatctgtacctttgccatcctgggccatgcaacctgtagctctcggcctcttctgtctcctttcaggctgagtctctgaatctgtctccatttgtgactctggtttccatgggatacatagatgtggagcctcaggagggcaggggtagtgtgatcagtgtcaggcgccccaaagcatttattctgtgccaggccctgtgctggatgctgaaagtacggaagtggataacatacagtctctgtttccatgaagcctacaatgcacattctctgtggagtggagaaaccagggcccagccctgcctctatctcagtatggctgtacctcccctgaatctgcctgctgtgcccagggtgccaggtcagctatagcctgtggcttgaggctcttctttgcctctggcattcacaggggtatgtgtgcccgccagcaggtcccccccggctcttagggctcctgggggacttggctggtgggtgctggtgggcagcagaaggggagggagggagcagaaggcagtgactcagtgggggtggccctgggacagaactggggaggaagccaaggttggatgatgcttcctgaagccaggagggtgggaagagaggtctggctgggagttagggatggagcaggacaactccaaggctcccctctggcagccagacctgctcatgaagaaggctcctcggtagctgcctgaaagtctggactctgggggctgggctgggctgggtggggagattgctgttggtcccactgtgcctgttgtaatccccaggttcatgaaagaggtgcctgc

SEQ ID NO: 16292 - DNA, 2300 bp, Homo sapien
gtgtgagactagactagtaatcagatttgttttccaggccagtctgggaggtagatgggaaggctgtgatgcctctaagtggccttgactgtcataccaaggagtttggagtttatttaggccaaaggcaagagaggtctggaagttctggggtatttgttgccctcagtatttggggtagtactgaagaggggtgtgcaaggtgaatgactgtgggtctgttgtcactagacccagtgaggcccagagccctcccctcctttttatttatttatttatttttgagacagagtctcgctttgtcacccaggctggagtgcagtggtgtgatcttgcctcactggaacccctgctttccaggttcatgtgattctcttgcctcagcctctcaagtagctgggattacaggcatgtgccaccacatctggctagtttttgtatttttagtagagatggggttttgccatgttggccaagctagtctggaactcccgacctcaggtgatctgcctgacttggccacccaaagtgctgggattttgtggcataagccacagtgcccggcccattttatttttgattgagtcatgttggcaagaaatgggaggctgagggagagttggggaagggccaggggagggaggcccattcccattttatgatctcagtggaaaaggctgctgtgagttgattctgctgccaggagagccacagagatgggccccatgagtcactgctcagtcctgcaagctcagcccacaaagcctgctgtggtcagccacccctggctggctccaggcccagctccccaatattccccactaggcctcagtgtgtcctcatttctatctgtacctttgccatcctgggccatgcaacctgtagctctcggcctcttctgtctcctttcaggctgagtctctgaatctgtctccatttgtgactctggtttccatgggatacatagatgtggagcctcaggagggcaggggtagtgtgatcagtgtcaggcgccccaaagcatttattctgtgccaggccctgtgctggatgctgaaagtacggaagtggataacatacagtctctgtttccatgaagcctacaatgcacattctctgtggagtggagaaaccagggcccagccctgcctctatctcagtatggctgtacctcccctgaatctgcctgctgtgcccagggtgccaggtcagctatagcctgtggcttgaggctcttctttgcctctggcattcacaggggtatgtgtgcccgccagcaggtcccccccggctcttagggctcctgggggacttggctggtgggtgctggtgggcagcagaaggggagggagggagcagaaggcagtgactcagtgggggtggccctgggacagaactggggaggaagccaaggttggatgatgcttcctgaagccaggagggtgggaagagaggtctggctgggagttagggatggagcaggacaactccaaggctcccctctggcagccagacctgctcatgaagaaggctcctcggtagctgcctgaaagtctggactctgggggctgggctgggctgggtggggagattgctgttggtcccactgtgcctgttgtaatccccaggttcatgaaagaggtgcctgccttagagccagggaagccgttgcacccggtgccccctctccccagggaccatgggcctgggcacactgtggggctcagggtcttctcctggtcgcagagctgaccttcccacaatcttcccacaaattctggggagtgtcgggccaggcccacatgccctaaagggacctcaaatcgcacagctacccacttgggtagctttcatcagttcaggattccctgactgcgggtgaaatgagggggcagggcaccaacacagcccgagtgctggcagcgggtgaacgtataacacagggagtcttccccagtcctcacggcaaccccaggagaaaaatgactttccatttttacaggtgaggagggtgaggctcaaagagcagagttcctggagcgcccccagcaggtaagtggagaagccaggcctgggctgggggctctggctccagaaccccacctcagcaccagcctcctgcaccggactttgtggagaagggggtaagggggtgccagggatggcaaaggggtagaggatctggtggactctggcaggcctgggtcagctccacccattggtctcactcccacccggatggcagccccatcccacgtgggatcatgcgacctgtctctgggtgcccgcggcgaggcagc

SEQ ID NO: 16293 - DNA, 2300 bp, Homo sapien
aagctcagcccacaaagcctgctgtggtcagccacccctggctggctccaggcccagctccccaatattccccactaggcctcagtgtgtcctcatttctatctgtacctttgccatcctgggccatgcaacctgtagctctcggcctcttctgtctcctttcaggctgagtctctgaatctgtctccatttgtgactctggtttccatgggatacatagatgtggagcctcaggagggcaggggtagtgtgatcagtgtcaggcgccccaaagcatttattctgtgccaggccctgtgctggatgctgaaagtacggaagtggataacatacagtctctgtttccatgaagcctacaatgcacattctctgtggagtggagaaaccagggcccagccctgcctctatctcagtatggctgtacctcccctgaatctgcctgctgtgcccagggtgccaggtcagctatagcctgtggcttgaggctcttctttgcctctggcattcacaggggtatgtgtgcccgccagcaggtcccccccggctcttagggctcctgggggacttggctggtgggtgctggtgggcagcagaaggggagggagggagcagaaggcagtgactcagtgggggtggccctgggacagaactggggaggaagccaaggttggatgatgcttcctgaagccaggagggtgggaagagaggtctggctgggagttagggatggagcaggacaactccaaggctcccctctggcagccagacctgctcatgaagaaggctcctcggtagctgcctgaaagtctggactctgggggctgggctgggctgggtggggagattgctgttggtcccactgtgcctgttgtaatccccaggttcatgaaagaggtgcctgccttagagccagggaagccgttgcacccggtgccccctctccccagggaccatgggcctgggcacactgtggggctcagggtcttctcctggtcgcagagctgaccttcccacaatcttcccacaaattctggggagtgtcgggccaggcccacatgccctaaagggacctcaaatcgcacagctacccacttgggtagctttcatcagttcaggattccctgactgcgggtgaaatgagggggcagggcaccaacacagcccgagtgctggcagcgggtgaacgtataacacagggagtcttccccagtcctcacggcaaccccaggagaaaaatgactttccatttttacaggtgaggagggtgaggctcaaagagcagagttcctggagcgcccccagcaggtaagtggagaagccaggcctgggctgggggctctggctccagaaccccacctcagcaccagcctcctgcaccggactttgtggagaagggggtaagggggtgccagggatggcaaaggggtagaggatctggtggactctggcaggcctgggtcagctccacccattggtctcactcccacccggatggcagccccatcccacgtgggatcatgcgacctgtctctgggtgcccgcggcgaggcagcaccccgcttccctacacagaaggccttcccctcccgtcggctcattcagccgcggaagcccctgggagaccccgccccgccccgtcccgcggtgccccccgcgcactcaccctcgctcacccacgcggccttcctggcgggagagcgcttccggcgtcctcgccaggcccggggagtgggcacggtggagctgccgaccgttggtcgctgccccaacccacgcactgcgacgccgcgggtgaggcgcgcggtctgcggggcccgggggtgcggcggggcggggctggcgggctgtccgggcccacggagaggacggcggcgggcgggggttgctgcagggcccgcaccttgtcttccgcgccggcagggctgtgccccgtcgagacctgctcgggctgtggctccgtcctccggcctccagggggcggcgcggcgctgcgcggcgccccggcggcactgccctcccttcccagcggccaggaggcggtgtcccgtgacgccgcgcggccgcgctgtagtggccgtcgaggccgccgtctgttcgaaggctgtccgacttcacggttccccgcggctcggcccgggggcgtgagtgtcgccagcgggcgacgggggggcgcgcggtaggccctgcaacaaggccagggcctgggggggccggcaggagagcgaacccgaggcatcgtggtgccatggcggggccgcccccacgggcatgggcctgcagagcgtggccgtgaggacgct

SEQ ID NO: 16294 - DNA, 2300 bp, Homo sapien
gtccatctctcccacagcaatattcagacataaagaagagcaattatatatgccacatttgagactagaagagttaaagggggtaataagagaaatatgacaaattgtgaaatgattgcataactgacagaagcagagccagaaaagtcaatctaatgagctaacctagaattctaagtcccagcccttctaaaagcctttctacaagttcatgttcaggcaaaggctgaatgtaacaaatggagtgactaagggtctcacatagaccagaaagcataaatatgcaaggaaggacccttgattctgctttctgttctccttaaaggtggctgagagctcaatgggggtgctcagagtgtgcagatgttggatgccaaagaaaacctacttctcgaaggtgagccccagttctggtctcagttcctcttttctttctttcttttttttctttttttctttttttctttttttttttttttgagacggagtctcgctctctagcccaggctggagtgcagtggcacgattttggctcactgcaagctccacctcccgggtttacgccattctcctgcctcagcctccagcctcctcaagtagctgggactacaggcgcccgccaccacgcccggctttattttattttattttattttattttgttttatttttgtatttttagtagagatggggtttcactgtgttagccaggatggtctcgatctcctgacctcgtgatccacatgcttcggcctcccaaagtgctgggattacagacgtgagccaccacgcccagcccaccctcttttcttgttaaggatagggtgtgacaagagggtcctggctccttcttacatacatgtcccatccacaggtgggctcttaagtgcctgctggagtgagggtaggggttagggatgcggctgttctttcccaaagactactcaggggctggttagtgcagagctatcgcagcctggcgacagccctcagtcacaggcaagcttaggggaacctgtggtgcttgaaagacaaaaggcttcttgccggactgacttcaggaaacggggtagccctaaagcagtcatccccaccccattacaaagagcttctctctttcccacgctgatccttctcccccgaagaagctccgtccaagtaaatttcttaccttttttttttttttttttttgagacaaggtctggctctgtcactcaggtcgcccaggctggagtgcagtggtgcaatctcggttcactgcaacctccacctcccgggttcaagcgattctcctgcctcagcctcccgagtagctgggactacaggccgtgccaccacacccggctaatttttgtatttttagtagagatggggtttcaccatgttggccaggctggtcttgaactcttgacctcaggtgatccgcccacctcgggctcccaaagtgctgggattacaggcgtgagacaccgcgcccagcccgtccaagtcaatttctagagctagaacttcctcatgctctaaagacaggaccccaactcctcagagccaggattcccaacctttcagatctggagctccccatcatgccttagagttctgtccccacgctccaatccttcagatttggatctccccttcacacacaccctcgccttgccccaaagtcagcatcccccagcgctgagatatgaagaccaccccgtcaaaggggcacacgcccagccctcagaaccggagtcccccacatcctcagagccagaacacttcatccctcaagacagagcgttattctaactcctcagagccagccccccaaatccttcccggctgggggcccctcgctctctcccatgccccagagccaggtctcgaaccacttagccccaatccttggccacagcggcccccattcgccgctttggtgcttttggcgcccccgccagagcgggctccgtaccatggtcgcggctccagcagcgggcgggcgggcttgtgacccggccaataacggttcccggggtcgcggcggcgcgcgcgcggggggcggggcagtgggcggggcctggcgtgcgccgggtggtctcgcgggcggtggcaggtgagcggcgggcggggatggcggagcaatgggagctggacgaggaaggcattcgccgcctgggggcgctgacgctggagcagccgggtagggtctggccgggagggtgtggactgggaacgtagggtcagaagctgtggaaagaaaactgaagtggaaggcggggaacctgagatagaggcgagggaaccacagaga

SEQ ID NO: 16295 - DNA, 2300 bp, Homo sapien
ggaatttgcttcaaaatagtcagtgtagggggttggaggtgggtggaggataggtgaggtatacgtgaaagaagcttggccatgaattgatgataactgttgaggtaggctaatagagttcattattctgttatctctactcttgtatatatttgaaaattgccataatataaaattataaaataagtgataaatgcttatatatgtagagaatatttctggaaaactatccaagatactggtaacagtaattgcctttaggaaggggaactaggcctatgagacggggatgggggagtaaagactttcttctcactgtacaatttttattttatttatttattttttcgagacggagtctcactctgtcacccaggctggagtgcagtggcgcgatctcggctcactgcaagctccgcctcctgggttcacgccattctcctgcctcagcctcccgagtagctgggactacaggcgcccgccaccatgctccgctaattttttttgtatttttagtagagacggggtttcactgtgttagccaggatggtctcgatctcctgactcgtgatccgcccgcctcggcctcccagagtgctgggattacagtcgtgagccaccgcgcctggccctcactgtacaattattatattacccacagaataaattaattgaattattttaacagtcaaaatgagtaaatattacatatttcccccctctaccaaattaatcattagactaccgacatgctctagtatatccttcctgttctgttcttgactgcacatcatacgcttcagctaccatctatttctgcagtctcttttacagctaaaattttcagcaaaagttcttactttcactgtctcttcccctcaaatatcatttccctttttcatcccactccaatctggtttccctcctccccaccctcccaaaactccctctgtcaaggtcaccagtaagttccatgttgctaaatctaacagacactctgcatttaagttgctcagcctgtcaatagcatttggcacagttggccattgcttgctcgatacactaccccttctcaaattccaagataccacattcttcctctatacaacctctaaacactgaaatattccaaggttgagtcttaagctttctttcacttctccatcgacattctctccttagctgagttcatccactcccgtagctttaaataccacctattgctaatgtctccaaaattttcatctctaaccctgacctctcctctgaggtccagacccatatatccaactgcctactaggtaccttacacttggatgtctaatagacattttattatttatttattttatttattattattatttttgagatggagtctcgctctgtcgcccaggctgcagtgcagtggtgcgatctcggctaactgcaacctccgcctcccgggttcaagcgattctcctgcctcagcctcccgagtagctgggattatagacttgaaccaccacgccgggctaatttttgtattttagtagagacggggtttcaccatgttggccacgctcaggtgatccacccgcctccgcctcccaaagtgctgggattacagcggtcagccaccgccccccgcagttctgtcacctgcggcagggtcccctgttaaccttgtttctccttccctacttcacactcccctcttctctctcaattcctcgggctctgccccacaccctcccgttacttcagttcctccacctccacctccctctaaccttctgcctcaagttatccccccgccccccagcctcaggtaccgcttctctgtggttccctcgcctctatctcaggttccccgccttccacttcagttttctttccacagcttctgaccctacgttcccagtccacaccctcccggccagaccctacccggctgctccagcgtcagcgcccccaggcggcgaatgccttcctcgtccagctcccattgctccgccatccccgcccgccgctcacctgccaccgcccgcgagaccacccggcgcacgccaggccccgcccactgccccgccccccgcgcgcgcgccgccgcgaccccgggaaccgttattggccgggtcacaagcccgcccgcccgctgctggagccgcgaccatggtacggagcccgctctggcgggggcgccaaaagcaccaaagcggcgaatgggggccgctgtggccaaggattggggctaagtggttcgagacctggctctggggcatgggagagagcgaggggcccccagccgggaaggattt

SEQ ID NO: 16296 - DNA, 2300 bp, Homo sapien
tgcactccagcctgggcgatagagtgataccctgtctcaaaaaaaaaaaaaaaaagtatgcgattatacatatgtacatgttttgaaattgtcctgaaatttagtattgggcaaaagcagctaactagctaaatacataaagatgaaatcttttcaatagcaggtttcagcagaggaagaaaactgtggcttttcctcttgagtttgccaggcctgattgtactgttgccagttaggtagagggtggggttgctaaatccacaagaaagagaactgaacaaggaagaacatttctgcaaaggagaactgactgattgattaaatgggaagcttgcgtggtagcaggaactctgaagaggaaaacagtctaggaggcctagactggtccaggagtgaggacttggagatagcattgttttgtttccctaaatagtcctttgaccatataagtgaggcactgagatatgagaacacaacacaacacacacacacatacacacacacacacttttttttttttaaccatgcccctttcccccagaaccagcttttttgcttacctcccttcttcttgtaaattaaggtgcttttgggatcaggagaggggttgggacaaaagtgagagaattctaatgtggcttggccactgggaaaccactgtgaaggattggattgcattgggagaataattggagagccaacagaagtggagaattgactgcagatatttgagtgtcagattttgtaaagaaggaaatgtattatatatgtgaattatttaacgtatggaacacccagtgctcatggactgcagtggtcttattttcggacaagttaagtgagagttccagccctgcctttctcacggggacttggataacatgtttaaggacggaaagtaacatatatttccatctttatctatgaggttcctagtctttaccaatatgccatttcataatgtggtgttttccttgtagggaatccagtatttatgttcactccaagacctgaatttatattataacaacattccttcattagtggaagtgtcccgtctacaaccgttacccttcctcaaagaactggatttgagacttaatcctgttgtaaggaaagatacagattataggctctttgctgtatatacactacaaactctggagaaattaggtaagaccttccttctctgttcctgtccacagaatcttactttaaatcagctgccccttaaccttttggatgttggcccacagtgtgcactggcaggatatatttgtttattagtcaatatttatgtaactcttttgtgttggcaggatgtatgacgagttcttttattgtttattgaatgacagtctatgattttattagttacttccagctttagttttcttcagttgatggtttcaccgccccttcctcctcaacacaaaatttccaggttgagaattatttttccaggtgccccaactttgcaactgtattagcaatagaaagctaatacaatttatttgggggcttagttgggggcttagttgaagaaatattccttcaaatgagctggtctatattttcttattattttactttattttttatttatttatttattttgagacagggtctcactctgttgcccaggctggagtgcagtggcacgatcttggctcactgccgcctggacctcccaggctcaagcaattctcacatctcagtctcccaagtagctggaactacaggcacgcaccaccacacccagctaatttttgtgttttttgtagagatggggtttcatcatgttgcccagactggacttccttataattttattgttgagtatacatttcttattgatacaaaattggatttcacatggccctgggaaagtaattgtagggaaactaagtaaactctttcagacaatggtatgactttcagccctaacattaggcctttgaattgtttactgtccaagctctgctttcctgaagggtagttacaactgtgaggcagtggtcgctatggcttcctgcagtctccctgagttcctgcctgctccagtgacaacataatagcattattttgtgacctgtctctaacacaccaagatgagactggtcctaatttttcctctgcgaatatggttttctgattaactactagttatgtctatgccaaaaaaagaaacatgctcagaccacggtttttgcctccagatgaccgaactgtacgtgaaggtgagagaaaagctgccaagctgcattttagtcagttgggcaacagtgaaaattttcttt

SEQ ID NO: 16297 - DNA, 2300 bp, Homo sapien
gcgagcgcgattcgctcgtagggagtcccctcccttcttccccactgctccaggctctgaatcctacccaagagagcacgggagttgtggcctgggggtgccatccgttcagtggatggcagtgctcttgagtcaaccgtatacccctgtcactgagggagagctccttcccgattccccaagccccaccaatgccccgcgcagctccccagtggcctctggttgactctctggggagctggatctcttctggagattggggccgcttagagctttaggcacatcccaggatgggaggctgtttcctcagggggccgtccgaagacgccccgaactgcagagcgctggtctcgccgtcgcgaggaccgcggagttgcgggggaggggcgggatgcggctcccggagagtctcggggagggcggggcctcgtgggcggggccggcgtgaccttggtcactctcccgccgagacagcctcgggggtgggactcgccgtctctatggagaccgagaaacaggggataatacggcggagccgcctgggctgcagtcccacccgggagccggcagggagcggagctgcggagccgcctggtctcccgcgtccatcggtccattcctgcgtcgttctgtccttccgaacgcacacttcaggagcagccgcgaggtagaagcccataggagacccagatgcccgccaccccaatcagtatcctgcacgatgagggttggggggagcagcctggaaagggtcccaacctccggcggtcccagccgaggagccagctgagcggccctgccctggccccaagcattccacctcgcagcccccacctcctggtccggctgattgatgactccagctgtcccagtgggagcgggacgggtggctccagttcacgggtgtggccactccatccatggcctgcagacccatggggctgcggcctgcaacccagcgccacctgaccgcgctgagatgaccaagaatccatctttccacggacaggagtgagcactgcacgcaggatccgcccagtgcttgggccaagcaccctgtggcatccaagctcccctggacgttacccttggtgaaccaagtgcgggtcttggggtccctggtgggaggttgcacccagggaaagggaaggggagtgcagcgtggactggggttatggtccctgtaacgtaggaaccaccggtgctcacagtcccagaaactgccacttagggatgggagtgtggtcactggcgaggagtttttggtggaagatggggcagccgggcagagcccaggccgtggtcactggaagccctagtgtaaaaggcagagctagaagatggttgctgagaccgagggtgtggtcaggaggtggcagtggaggagggggatgtggtggggaggtctctacgcaggggatctccgcatagtacctgggagtcttataatgttagtgtgtggatgtggactggggccttcagtgcaggctgagggtgtggccagagggctgagggtgtgtggacaaaggggtgctgagggtcagggcgccttgataaagggctgcgggtattggagggggtgagtggctgaggctatggtcaggggtctcaggaagggatgcaggtttgtggccaggggcctcagccccagggctgcgggtgtggggatggagaaggctgctgtgtaggctcagggtgtggccaggggtctgcagcggagggctgtgggtgtggggggcactttagtgctggactgtgggtattactggggttggcgcaggcttgttagtatatatgtgggggctggtggccgagggctgtggctgtgggtgtgaagatggaggatggagggctgaaggtatggccaggggtacaaggcccagggggtggcaggccagggctgagtgcacagggtcgctgggaatgtgggctggtgtggccaagttcagggcgtggccaggggaggtctgaggtgtagacatgatgaagtgtgtttcagccacagccccacttgccagcacgactcttggggttcgtaactctacagcccccacgctactagcccccaacctcctgctcccccaaaactccacagtgggaggttacagcaccagtcggtggcaaggggccaggaagccacggttatgccctaggcgcagggagtgctggcgtgccccacccgtgggccccagcttcccagcccagcccagcccctcagcactgggagcttctccctgagctgccctgacaccatcctgcccttagcaacattctccaagcagcaccaccctcccttagca

SEQ ID NO: 16298 - DNA, 2300 bp, Homo sapien
gctcgggagccacacctggcctcccagcctccttgacttccaccttccccaggagatggagttctacatgcggaccttcagacatatgcgcccagagccccctggccaggccgggccagcagcagtgaatgccaagtgagtgcaacctgggcatgtgccactgggcatctccagttagcatggcagggccatcgaggcaggagaagggggtaggctaaggtcggggcatgggtcaggcccttctctgagctaacaggaagggaagcttctctcagcacctccagtggggagggatttggggaacaggccccaggcttaccctcctgcttccccctcagtccctcccagtttcttgccacccgtggccaagcggaacctccaccaccctcttccccagacactctcgccctgcctccccggatccgaccccaggtaggagggactgtgctgggcctccggtccaggtggagtgggatagaaagaagcctctaccctggcgctcgcctctgcttcttttggcgatgtggggccctcaggctcccccgtgtctctgcagaaaaagaggaagaggcgcgtgtataaagtgcgaacgtctgagacctcggatccggcgtcgggtgagcgcctctccctgtccgggtcctgctctgggaactcgagggaggggaaggcagagccacaagcgagccgcagccactgggctcatgttcccttcccttgcgcagggcctagggcccccagccgccgctccagctcgtcgacggattccgcggacgccagccctgtgcacgccgctggccctgccggcgcctaccactcggcgtcggcagagtccgtggacgagattccagtggcgcagacgcgcctgggcagcgccgctctggccgccccgcggggccggggccgacagcccacgctggcgcggcaggcgcgtgcgcccgccgttttcgtgagcccgagcagcggcgagcccagggcgccgggcggccgggaggctggtctggcttagctgggccgagaggccggagggccgagttagagcggccggcctgactctctatgcaacaccccatccttgccgcaccgagtgcactttaggggcccctacggccggcgggatcggcctccctcccccacgactcagcaatacccgccccaccggctgtgatgctccaataaacttttttatgcttttgcggacgtcgcgcttactttcttaatggcaggggccacgggccatccagaagcccgaccctggccagtggaccgggggcggggaggaggtccctgtatagtaggtagccacccaggctgccctgtggaggtgctcacgtgcggctcgtggttaggaaaggccttagaaggcggcctggaggaggttatttttcttaaagatgggctttgcactgggaggccgagagaaagcaggctttgggctccgaaagcagcagtgggcgctgaggctgcgaggccgtggggaggtggcggcgaaaggagggggccgagccaggaggtcccgcagcttttccccggcagcagggctgccgtcgaatgccagcatcctggggctgggcgagcgcgattcgctcgtagggagtcccctcccttcttccccactgctccaggctctgaatcctacccaagagagcacgggagttgtggcctgggggtgccatccgttcagtggatggcagtgctcttgagtcaaccgtatacccctgtcactgagggagagctccttcccgattccccaagccccaccaatgccccgcgcagctccccagtggcctctggttgactctctggggagctggatctcttctggagattggggccgcttagagctttaggcacatcccaggatgggaggctgtttcctcagggggccgtccgaagacgccccgaactgcagagcgctggtctcgccgtcgcgaggaccgcggagttgcgggggaggggcgggatgcggctcccggagagtctcggggagggcggggcctcgtgggcggggccggcgtgaccttggtcactctcccgccgagacagcctcgggggtgggactcgccgtctctatggagaccgagaaacaggggataatacggcggagccgcctgggctgcagtcccacccgggagccggcagggagcggagctgcggagccgcctggtctcccgcgtccatcggtccattcctgcgtcgttctgtccttccgaacgcacacttcaggagcagccgcgaggtagaagcccataggagacccagatgcccgccaccccaatcagtatcctgcacgatgaggg

SEQ ID NO: 16299 - DNA, 2300 bp, Homo sapien
cgtctgcgccactggaatctcgtccacggactctgccgacgccgagtggtaggcgccggcagggccagcggcgtgcacagggctggcgtccgcggaatccgtcgacgagctggagcggcggctgggggccctaggccctgcgcaagggaagggaacatgagcccagtggctgcggctcgcttgtggctctgccttcccctccctcgagttcccagagcaggacccggacagggagaggcgctcacccgacgccggatccgaggtctcagacgttcgcactttatacacgcgcctcttcctctttttctgcagagacacgggggagcctgagggccccacatcgccaaaagaagcagaggcgagcgccagggtagaggcttctttctatcccactccacctggaccggaggcccagcacagtccctcctacctggggtcggatccggggaggcagggcgagagtgtctggggaagagggtggtggaggttccgcttggccacgggtggcaagaaactgggagggactgagggggaagcaggagggtaagcctggggcctgttccccaaatccctccccactggaggtgctgagagaagcttcccttcctgttagctcagagaagggcctgacccatgccccgaccttagcctacccccttctcctgcctcgatggccctgccatgctaactggagatgcccagtggcacatgcccaggttgcactcacttggcattcactgctgctggcccggcctggccagggggctctgggcgcatatgtctgaaggtccgcatgtagaactccatctcctggggaaggtggaagtcaaggaggctgggaggccaggtgtggctcccgagcctgctgagccctaagcccacgcagtcctgccctcattggcctctgtgggatatctcaggcctcatgccaggctcccagccatgctgggaaaaccccatctgtagggtaaggcttaaaacacccatttctggcccttgccccatccccaggtccttacctcatctattcagcctctgcctcctgcaggaaggctcccagcccccatgggtctataggcccagtttagagaggctcagccagggagtggtgggaagctcagagctgcccgcacctgctcctggtgtccccagggatccagcctctgaaccaattgttttcccctggctgagaaacaggcctgagtgtgcatccaccagctcccgcagagctgagtcctgggcacacccctcgccctcacagaggaccagccacgatccaggctgccgagaaggggctgcgtaaatgcacatgcggtggtctccctgccactacaccaaaagggaaggtagcaggtggtggaacaaacagagccgcagccccactgagcaccaggcttatgggcaagccctgatcttcacagcaaccctgagggtgcagacgcgacccctgagagcaaaggggccttgaggccagggggttgcaggagtggcctagtcctgcacccccgcccgcaggactcgccccagctttgcccagaaggactccaggtgaggaaacaaaagcctggggaaagcaggcccgggaagggcgtggtgcgagatgggggcgggtcccgggcggggtgggagccgggaggggttgccgggagcacccggacagctgtcgccagttcagcagccgtttccatggagacggaggcgtcctgactaatgcagagaggacactgtaacagcaaggccgtctctaaaacaagcctatgtttgggggcaacggctccagagaggggcccctcccgcattcctgctggggtgggggtgggtggctgcctgcagggccctgacagatctgggggaggagcccagccagcggccccgcccaacctctgccctggctgctgctctggagaggggtgtgggggcgccagcctgggccgaggagcgcggggtcaggggtcagaggccagtcacagggactggaaacctcaagatcactctcccccacacctcttttctgccccagtgtggactcagtgaccctctagggccagcagaggggcaaagcccactggggggccctgggctccagaggggggagcagaggaggggccagcagtagaggaggtctcagaagctgaggggcctggatgggaaaggcgccaggccctagccagctcaagaagtctgaaagcgtccccagtgagtccccactcagagccctgtcctctctcgccatggctgtccagaggatactgtctcagagaccttcaaaaccgtgtacattcctgaatggtactgggccc

SEQ ID NO: 16300 - DNA, 2300 bp, Homo sapien
acctctgcctcctgggttcaagccattctcttgcctcagcctcccgagtagctgggactacaggcacatgccatcacgcctggcttactttgtacttttagtggagatggggtttcaccgtgttagccaggatggtctcgatctcctgacctcatgatccacctgccttggcctcccaaagtgttgggattacaggtgtgagccactgagaccagctgagagataagatcttactttcacccaggctggagtgcagtggcatgatcgtaattcactgcaatcttgaactcccgaactcaagtgattcttttctcctgccccagcctcgtgagtagctgggactataggcacaggccaccaggcccagctattttttttcatcttttgtagagatgggagtctctctatgtatcccaggctggtctcaaactcctggcttcaagtgattttcctgcctcagcctccttaaagtgctgggattacaggtgtgagccactgcatccagcctcatccttcaccttgatttctgggtcatgatctctgtttgacccgaagttttccaattccagataagagttaagtagtcagcttgtactctgaagccagaatagcattgatatttatctcacattgagtttgagtttatcagtcttgaaaacaagaatttaagtaataggttatgtcacttgcacaaggacccacacacctgtcatgtgacagagaaggagtagttatgttgcctaataaaacatacaataagtatgcttgtgacttatacattttagagataaggatgttttctttccctatctgtcatatctgccttggagatgcgcacaggacagatagcagaagacaaagtgtcttcctgtcttttgagaaagcctgagctcatagaagattccattctgagtgtccacaaggagaagaggagaggggacttttagggaaaccaagttagcagggaagtctcccaggtagagaaagggaagggaggctgcaggccatggagcagaggaagcaggtgtctgtccctggcagccccagggagaggcaggggcctcaggcagggatggcctcatagagcccaaacctgaaaatctttgtggactggagcaatggttgtggcctcagtaccagacaaaaccctgaccagagagttttttgcttatttgtttttgattgttgttttttgctataggaaaacatgagtcctttggaattacctagctaaaaggagtacagtggagactgagactgaatttcccggccgggcaggggctcacgcctgtaatcctagcacttttggaggctgaggtgggcgggtcgcttgagttcaggagttcgaaaccagcctgggcaacatggcaaaaccacgcctctacaaaaaaatgcgaaaattagtcgggcgtggtggtgttcgcctgtagtcctagctactctggaggctgaggcgggaggatcgcctgagcccaggagttcgaggctgcagagagccgtgatcgtgccactgcactccagcctgggtaacagagaccagtttaaaaaatagaaaaagactgaatttcccatcagcctggaagattggggcttgatttttgcttgatttaaaggcaataaataaatgagatattttgtgctgcttattttaagctcttacgcttctcgctttatattctggggtacctgcatttttagtggtgtaatttatttgtctagatctgtttgcctcttaacctgtaagctcccggaagggtcgggatatcatggatgttccagcacatacgctcattgaagtgtgcaggttgactggggttgggggaggtctcttcttgagagcggtggtctcaggatagaaactggaagggggcgcttttgagatgttaggatttcggggagacaagctgtgactcgggagtagggaaaagcggattttctagacgaaaggttaggaagaatctgggaatgggccgactggggcaccaagagggtccctggcaagccccgccctggccgggggaccggcgcggagtgacgcagcgcggtttggccgctgtggggcgccgtagcccgcgccgttgtcaggggaacgggcccagcgccggacgaggcccagccagtctgggtctggcctggccgcccctccagcctgctggagccggagccggagccggagccggagccggagccggagccagagccagagctcgaggactcaccggcccagtctccgtccgggatggggccccgctcccgggcgcgttgccgcccagtcccggggaccgtccctaccgcgaggg

SEQ ID NO: 16301 - DNA, 2300 bp, Homo sapien
atcgcctcctggcaagtctgtccccatggtggccttcacggttccttcccaggacagtgtaggaccctgcttctgcctctttccttatcttgccttcctgccccatccccctactcttcaactcctgctttagcaagtgctggttctatctgtgttgccttgaccttgaaggctccccaggaccctcatctcagcttctactcccttcctcactccaaggggaagactccaatggactgaggctggagaaaccacagccagactcttggtgtggtggctaaagctggggggtctggccaatccaatctctacagctcaaatcaggaagtcaggccaggggtgctgtgtctgcctccaagcctgggccatacattcaccgcaacaggaatcagtgactttggaaaaggaatgtttccctgagtttctagaggcaggatgacccagaccgaaggacagagagttaccagaaacacacacaatgcacacaaatgtactcacttgcacacacagggtcatggcatagggagtgacacaaccaaatggcctggacaagccacagagtcccatggacacaagtgcttacaaacacaggcacacaaggtcatgtacccaaggtcaggcacacacaccctcctcattcaagtcctgcctcccaggtctggggcttgcctgtcatctgtccttaggaggagggataggtggaggcacaggagtggctcagggcaaattggtcctccacccagagactctccctttaggtgggtctggctcccagcctcccctgagatttccctggctcaccagggggctgtgtctggtggcagagagggctttggaggaggcattgccctgaaaccctggcagagcctgggcacctaagagagaatgagcaacagggctaggaagtgtgacagggagtccacaacctcccaggatcttgggagggcagggatgaggcactgagcacggcctggaagcccacgggaagcagggacccctctgtcgagggctacacctactgctctcagcatcaagcctgcagccaggtactggcaccaactcccagtgcctggcagagccctggcatggatgctaggcacagggtgccagacacgggggtgggcagggtggggggccactgggccacacacaagcatggagaccttcacacacgcaggcagaaaaatccacccacactcataccacttattttaccccctgggggttcaggggagcaaggcagggaccaccctgtcctagaggctgccttcaccgacgtccctctggcctggctcttggggttggcgggggtgggccataagtaatgggagacctaggtgcttcctctgacaccccaccctccactgacccccacacacatacatttgtgaggcaggaagtggggttgtgcgtccccaggtttaagccctggaaggaaagggaaagacggggcagagactccaagaaccgggagcggtcgtcctgttcccccgccagcccctgtcccaggcaggttttgtggccgcgagctgctcaggggtgagcgcgccttagggtgtgtgcgccagggacctggcgcagccgaccacgtgggagtgcggcgcgtgtacgggcgcgggcggcagcggcagcggcagcggagaccgggtgagcaccggctggttcctcgcggtgttcctgcaggcttggcggccgcggtggtgcgatcagcaaagggcaccgggatgccggttgtgcgtgtcctcaggtgtcccgaacaagcgtgagtggcatgtgctcacctgagcgcggcggcttggcggccccgggcgtgtgggtgggggcgcggcggagagctgaggccgggcacccgggctggaccgacgggccctctcccaagcaccgcccgcagccaggcggctcctcgagcgcagcaactttgggactttgttccggctttttccaaatcgaatctggtcgagggggcggggcggggggggagcacctgccctgcggggggtgccgggagagaagtgaaggaaagccccgcccccgcccctcccgctccccgccctctcccccgcccccggggctcttcataagctcggcccgagggcgagcagagaaagcgagtgtccctctcgcgccccaggccggtgtacccccgcactccgcgccccggcctagaagctctctctccccgctccccggcccggcccccgccccgccccgccccagcccgctgggccgccatggagcgctggccttggccgtcgggcggcgcctggctgctcgtggctgcccgcgcgctgctgcagctg

SEQ ID NO: 16302 - DNA, 2300 bp, Homo sapien
cctacctgctgaccttgtctgccgtaggctctcccagcaactctgagctggttctgggctgtttgtggcttcttcagtttctccatctttaatgaagagatagaccagtgagtctgcaggccctcttgggggatgggggtgctctatcctgctctggcctctctttccaaccccacagtggccccctgggtcgctggtctgtgcctaccctgctgttggacttgtcctaaggaggaggctggttttccaaatgtggacgccaggccttcctgggaggtgtagagaagtaggcgttaggccccgaatccacagctgcccctccagaagggaggatgtcatggcctcttatgcaagcctgtctttggcatggtctgagcttgggtctgccccagcggtgattagatcatgttatggctagctgcctcctttataaatcaattttaggagcaaggaggcaggagaagctcaggtcagtgtacatggcccagagcattgcttctgccacttccaaggcaacagcctaggctggggacccctcaatacccagccctgtgggccttgtggcacgggcactctgtgccgtgtagggcatttgaacatcaggattctggcctaggccacctgcccacccctcaaaccatgtttcctccccagcggcttttttccaggactgcatttcagagcaggaccttgacgagatgaacatcgagatcatccgcaacaccctctacaaggtaatgccccacacaagccatgggggattggcctgtcggtgggtggggctgtgggaagtggtagggtggtgatttatgtgaggtgctgggacaggatgcagctatgtcaggctcctatcccagggacttactgcttattctctggctcccatgctgggcacaaggctgtgtggaacaggttctccatcccatagtgcctgtgacgggctcagataaaatcagcaggagtggctggtgctccaccgctggcctgttacagctggctcctggacagccgctcccccagcatccaggagggtcatggactaccacccaggccgtggcccctggaaccgccctacctaagctattgccagcaaggacaggcacttgagcaaaggcaacagtgtgctcacttatggtggggggagggatctggcgaggcatagctaggtcctcatgtccctcgtaggttcccaagcttggagtcagtgccacttcccactgtcctcatcccctgcccacctcttgcctcccaccaggctgtagcatagactgggcaacccctgaggatttctgggtcagcactaccctggcccaaagagattaaagagccaggggaccggagaggagaggaaagtttaaaaatttaaaaaaaaaaaaaaaaagcccgagaccagttaggttaggggtgtctgggatagactctgctctggctgcggtgaggcactgagctatagcgccaggaccccagatgggctgcagtcaggaacatggatccgcagtgggcaggccccaaagcagggctgaggatggccctggccgagggacctgctgacctcacctgtctattgggtgagagtcctctcctgccctggttggagcgagctggctgacatttggctgcagcctgagcccaggcctgccaatctccctgcaggggcctgggccagagcacagtgagggttggtggtaggggaagggcctgcctggaggttgcagtggtgtcggcaagggaccagcacgtgcagaaggaaagcatagagcatgggccaagtggcaggcagtttgctgtggaaggacacattccagatggacaggggagaagtctagaagaaaaggcaggcatgggatcaagttacccagggctttgaatgtaaggccagaagtttgaacatagtcccgtgggcagggtcagccagtagaggtttccaacagagcagagtcttctcagaaagccccttctagccacaatgtggagagcagattagagggcctgaaaccagaggtgggaaggtcgtcagcttctttaatccttcagactgcgctaggaactaggaaggtgtcattatccccatgtgaaaatggggaaaccgaaggctcagagaagtagggtgggttgcctaaagccacataataagtcactggcagcgccagggatcacacctggctcagcttgtttgcaaaagtgagtgctctcacccactccgctaatagggcacaggccagccagttagctgagaggagagagagcatacacacgtgtgtgtttgtgtgtgtgtgtgtacgcacgcgcctagctggcct

SEQ ID NO: 16303 - DNA, 2300 bp, Homo sapien
gctcccagagctcccaggtcagtgtgagcaagggtgggactgggcggggcctgaataccctctggccacaaatagtctcccctggcataaaccctctttctcccttcccaaaccctcccctgggaggtgggtgctttgtgcatgggggttcctgccctcacatcctctgccccaggcctgggcctgcgggccccactgaagaagacaactgcagaacaggcagaagaggatctgttgcaggaggctcaggccttggcagaggtaactgctcagggaaaagggtaaggtggtggcccttgggagggggcattgggtattagctcctctccccagctccaaactccctcaccagcgacgacactaccgaccaccccttcccatgctccactgccatcctgcacaggttgggacaggtaagatccctggatctgtctttagaggcctgtgctggttccccacccctgcaggtactagacctgcaggaccgcgagccccgctcctcacgtcgctgcgtaaggctgcatgagtcctgcctgggacagcaggtgccttgctgtgacccatgtgccacgtgctactgccgcttcttcaatgccttctgctactgccgcaagctgggtactgccatgaatccctgcagccgcacctagctggccaacgtcagggtcggggctagggtaggggcaaggaaactcgaataaaggatgggaccaaccccaaggctgtggttatttcaaacgtggccgtcaaaggagggagggttcatggagggggtgggagtgtcaccaagccaagaaaccacacatactcttatcccagggcctgggctaccctatcataggaggcacatacacgggcgcttttaggggtcctggtgcccctgggaaaaatagagaagagccgcactccagctttcgaaaatcttgtacagcaagtgcggggaacgcaggacgcagcgtggcacaggggctatcactcctggctaacaaataagccttaggctccagggcttgctgctacttccacgcaaagcctgcccctcatcctgttaccagagggaaggccaggagtgtgcgttgttcaggtccttagcgtttcgaacaaagaattgaacaaaacccagaaagtaacaaacgaatgacacacaggaaggaagcagacagctgggatttgttaaagcgagaaagcactacgcagggtgggagtgggcctgagcaagaggctgaaggggctcagttacaaagttttccgggttttaagtactccttttgcggtccctgtccgttaccccttatctggatgaagggtttggtccatggctaattaatccatttatgcctgaggttgcaatctttttgaatttttgcaatcagaccttggccatgaccttgagcagtaggatataaataactcccatatgcttagcgttccaataatggaacacaaggcataaatggggctaaggtgaattggcgccctatgcagatgaagggatggcccgtgcttggcccgcagccaatccaaggcactctccctttcaactgagacgtggtggaagggggagggttgtggggacagtggcctttgatcctttgttacttggacatggggagatggggtttttctttttggtttagctttagtaagctcgccttagttggcctccggttccctgcccccagaccttggtgttttcccttgattcagcttcagaattcagcacgtattggcctcaagttccccgcctccagaccctattctcctacctcaatcggacctcagtttccctctggggaggaggctggcccagcagtctggaaactttccaagcttgagaagggctcgctcccttctttaccccgcccgccctgcagcgtcaagtgcagcaaaccggggaaagctagagaaggcccagtcaaatccctgcggccacaggcgccaccaagcggccggcctcaaacttcctctttttagcgcgcaggcgccgcagggccagcccacgcctgcaccgcgcttccgcgcagccacccggaagccgggcaccgctcagagccacgcccccttatggtcacgtgaggcgcttgcgcgtcacctgacgcacttgacagcccgctgaggacgcagcgtcagctgacctggggagtcgcgattcgtgccggccggtcctggttctccggtcccgccgctcccgcagcagccatgtcgttcttcccggagctttactttaacgtggacaatggctacttggagggactggtgcgcggcctgaaggccggggtgctcagccaggccgactacct

SEQ ID NO: 16304 - DNA, 2300 bp, Homo sapien
tggccttttttttttttttttttaatggggactgggtttcgccatgttgcccaggctggcctcgaattcctaggctcaagtgatctgcctgcctcagcctcccaaagtgctgggattataggcgtgagccaccaccaccatggctcactgcagcctcaatctcctgggccgaagctatcctcctccctgtctcctgagtagctgggactacaggtgtgcatcaccacattcagctaattaaattttttttttttggtagagacagagtctcactatgttgccactcctgggctcaagaaggtgtgaatcactacacctggccgtttttttttttttgtttagttttgtttttgttttttgagacggcaacttgctttgtcgcccaggctggagtgcagtagcgcgatcacagctcattgcattttggcgctgggttttcttgatatctcccccactggacctgaccggggcatgggctgccctgtgagtgcctcagccctcgtccatcactgcccatggggctgatacacctgtgtgcacacactcaggtgaagacagctgctgcccgtaggtgaggtaagacactgagcacctgtgtgggaggagatcttccactcccactctgtccacaccagaccatgaagagctctccatagcatgggtgctgaccaggcccagcctgggtgacagagtgagaccctgactcaaagaaaaagacataatgaggtgtgattttaatttcttggatgtcccagtatatataaatgttgggagtatggattgcttcatttcattttaaatagcattttttttttaagatggagtctcactctgtcacccaggttggagtgcagtggtgcgatctctgctcactgcagtctctgcctcccgtgttacaagtgattctcctgcctcagcctcccgggtaggtgggattacaggcatgtgccaccatgcctgaataacttttgtatttttagtagagatagggtttcaccatattggccaagctggtttgaactcctgacctccagtgatccgcccaccttggcctcccaaaatgctgggattacaggcgtgagccaccgtgcctggccaccctttatcttcttttctttttgagacaggatcttgctctgtcgctcagcctggagtgtggtgatgcagtcatagctcactgcactcttgaatccctgtgctcaagccatcctcccacctcagcctctactacaggcatgcaccactacacccagctatttttttattttttgtagcaacggggtctcaccatgatacccaggctggtcttaaacccctggccttgtgatcctcccaccttggcctctcaaaatgctggaattacaggtgtgagccaccatacctggcccccttcatcttttttccactgccttgtgccaacccagtttgtgcactggggccttgcgatcctctcaaagctgattcagcctgcattcctttcccagatggacacgtgtgtgataaacagctctgcagtggggtgagggaaggcaggggcagcagggtcctgtatgtcctgccatctccacaaaagggcagtccttaccccagccttgtgctgatgagaccaggcatagacagtcctgacgacacagggcggaagggagcagccattagtgctaatgaggcaggcggcctgaaagctttgtactctgcagtggctcgcccacccagggaacagttcgttctgtttccttggcttccaggaaccctaggcagaaaggggtttggggacaggagcaggagtgggcggtcttggagaaacctggagggagaaagggaggggaggaccagaaatgtagtcaggagggcctaggattggttaggtgggcttttccttcccctttccctccaaagaaacccaggttctggttctgcacctacccctgcccaacagtggccattggcccatcacccgctccaatgtccttgacccgaattcttggaagcacaggaaacaacatgccacataggggttgagtaagcatctctggggccacaaattaaattaagctttcagggccgcctgccttgttattgctaatggttctagccctgctcagctcctaggtccctgtcctgtggaaatttgtggaccctgggcaccctctcttgctcccaaattttaatcggctcctggaaacctcaccccaaattggagataggcactcctcttgtagaacaaaaggctcaggttcagggagtgagggcctgaactgtgcccccaccctccaggaagggtccttcacggcctggctgca

SEQ ID NO: 16305 - DNA, 2300 bp, Homo sapien
actgctgcctggccatggtgagcagtatgaaaggagtcaataggaggctggaacagagggtgtctgcagagaaagtactcagaagatgcctggctgagaggtgactttaggggtgggcagaggccaattggtgccagctttgagaactccagaaaaccccagtctctagctcaggtggatgcctgggtagacagtggtgctttgtagggatggggacaatgctgaggactggtgagtcaaccagaaagcagccaggggctctgaaacaggagagggctctgggcacagagggaagtttgggatggtcagcagtgaatggatgggagccctgagactggatgatattttagggtagggtgaataaagagaagaactcagcccctggaagtcatgcccaggtttaaggacttcagagaaaagggcactgaccggcccagtggctcatgcctgtaatcccagcactttgagaggccaaggtgggtggatcgcttgaggccaggaggtggaggccagcctggccaacatggtgaaaccccatctctaccaaaaatataaaaattagccgggacatctctaccaaaaatatagaaattagaaggcggaggttgcagtgagccgagatcacgccactatactccagcctgggcaacagagggagactccgtcccccaaaaaaaaacaaaaaagaaagaaagaaaagggcactacaaaggaagcccaagaggaggggctggagagtggagaactgtgaggcagaggtggctcaagcctgtaatcccagtactttgggaggccaaggtgggaggatcgcttgagcccagttagagaccagtctgagcaacatgaagaaagcccatctctaaaaaaccgaccaaacaggctgggcgcggtggctcatgcctgtaatcccagcactttgggaggccaaggcgggcagatcacgaggtcaggagatcgagaccatcctggctaacatggtgaaaccccatctctaccaaaaatacaaaaaattagccgggcgtggtgtgggcgcctgtagtcccagctactcgggaggctgaggcaggagaatggcatgaacctgggaggtggagcttgcactgcattccagcctgggcgacagtgacactctgtctcaaaaaaaaaaaaaaaaaacccgaccaaacaaaaccaagcaaacaagcaaaacacacaaaaaaacagccctcaggactggtgggggcggggtacagatattcagggacctcttactgtccctgaaaccattcctgggtaggtctgacatacatgagggctgcgggagtgcaaggcctggagaagcctcaggggtgtccaggttggaagggccaggggtgtctgattgatgggaggagcgggggagtggaactggccctttgaccccaacatggggtcgactctcagccccacctttaccgactgtgtggagggccagcattctagccccggctttggaaaggactgggttgcccaacacatggccctgtacccggaccctgccagcgtccccaccccaagactgcccgaaaaccagtacccaatgagtggggaatgcatgacccggctatgagcctggacttaccagccagacagtggcagaaagggcggcctgcctctacagcgacgctgaggctggctgaaatggcagggctgaagggcagcgtctggacccagaaggtgccaggcggcttctggactccccaaggccttcacaacagccctggatcctttccaccaaccagcctaagccagcagtagcagctccaggacctgtttcaggtggtcacggacagggggcccgcaaggtctccagagcccgagggatctggggaggggacaagcaggcggggctccctggcgctcaccgttttagggtctgcgtgagaaagcctccctcacatcccccagggtctgccctccctgcaagctggtgggctgcgtgggccaccggcctgccccgttatccgagagggcggagcgagccgtgggcgcctctaggggtgcgggagccgcgggagcgcagggggtggggcccggcgggccaggggaggggcggcggggcggcgggcggagggaggggccggcgcctgcggcggcgacagcggcagctgcggcgcgaccaggccgggcacctccgagcgcaaggacagcgcgaggtccgcgcagcccagcgcagccatgtgagtgtcccgcgccgtttccggggctgcaggccgggcggggagcaggcgcggaggttctggtgcccccccgccggcgccgcccggtgggtccgggatctg

SEQ ID NO: 16306 - DNA, 2300 bp, Homo sapien
gattccccagggctggtttctgccagctgggagagaggtgcgcagtgctgaggatacttgcagcaggcaagtgatgggatggtggctgtggatccaggctggggaggaggctgtgcagggaaggtacagaagagaaggtaggagggagctagcagaaaaaaagaaagcagaggcggactgtgagctctgcacagggtggtgtctgtgaaattctgggctgtatctccagtgactggcacatgcttggcacaaggttgccactcagtgaataggtgaataaatgggtgagggctcaaggggccagaggtctcaggtaaaaggcaggtgaggtgggggtgatggaaagcctgagggttgcatcagtgtggttgtggtttaggaggggggcattccaaaggcaggtgataaggctggggatggctgaagggaccagagaggccagcgataggcaggcaatccatgggaatgcacaggtcaccagtgtagggtgcagggtacccaggcttcgccttcaaggaggaggggagaataacatatctcaaactgaggtccctggacctcttgcatctgaatctgtcggggggagggggaacttgtggaaatgcagacccctgggcccaacccagccttttggggagaaagtaagcacagtatgggagaactgagcctcaaggagcaagagtgtttatgggatgggggagcatccagcccctccaaggtcaagggagggatgggcatggtggcatctatccaggctagaggtggacatgggatattcaaagaagagataggctgggcgcggtggctcatgcctgtaatcccagcactttgggagaatgaggcaggctgatcacttgaggtcaggggttcaagaccagcctggccaacatggtgaaaccccgtctctattaaaaatacaaacattagccaggcatagtggcgggtgtttgtaataccagctatttgggagcctgaggcaggagaatcgcttgaatctgagaggcagaggttgcagtgagccaagatcgtgccactgcactacagcttgggagacacagaaaaaaaaagagaggtactggggatggggatcaggatgggaacgcagaacctgagaggcccatgtgagctgggggcaggaaggatggggcattagcctaggatgcagcttgactagggaggaggccctggctggcagccagacctgatcctttcccctgggtcctgggaagaggggagtgctcaggctgagcactccctctgtgggagtagggatggggtggtgcatggggctgtgggactctgcatccagttccttctctgcatctctcttggcgcagcagcacacactatggggtggatctagcctcacactttcagcctctcttctcagcctcagtcccctggtgatcagtgccctaactctccgccctccattggcacagcccctccaatcagcacccttagcccatctttccactcttcagccccctactatccaccttctcacacttagaaccccagctctcagccctctgtgtgttcagccttagcactgctcaacagccactcttttttgggggagacggagtctcgctctgtcgcccaggctggagtgcagtggcgccacctcccgggttcaagcgattctcctgtctcagcctcctgagtagctgggattacaggcgcgcgtcaccatgtccggctaatttttgtatttttagtagagacggggtttcaccttgttggtcaggctgatctcgaattcctgacctcgtgatccgcccgcctcggcctcccaaagtgctgagattacaggcgtgagccactgtgcccggcctcaatagcgactctttaagccccctactctaatgtctgatacttcctccacttagcgtctccattctatcccttcatattcatccccatgctcaaatccctttacgcacattgctgaccccagctgagcagacccctcgccccccgtcggtcccctccccgaggggaaccccagtcaccggtcccgccccatccaggcgggctgagtcaggcggcaggaactgggcggggggcggcgccgggaggagccgaagccgagccagagccgctgggagcgagcccggagcccagccgggcggctcgaagtggccagggccggaaggtccgcggggggcgagcgcgggtcgggggccgtcccggacccaccatgaacaccaagaagagaggtaggacccagctcggggctgcgaaagctcagggactggccccaggggaagcaggccgggtttgggggccaggagtgt

SEQ ID NO: 16307 - DNA, 2300 bp, Homo sapien
tgcagacccctgggcccaacccagccttttggggagaaagtaagcacagtatgggagaactgagcctcaaggagcaagagtgtttatgggatgggggagcatccagcccctccaaggtcaagggagggatgggcatggtggcatctatccaggctagaggtggacatgggatattcaaagaagagataggctgggcgcggtggctcatgcctgtaatcccagcactttgggagaatgaggcaggctgatcacttgaggtcaggggttcaagaccagcctggccaacatggtgaaaccccgtctctattaaaaatacaaacattagccaggcatagtggcgggtgtttgtaataccagctatttgggagcctgaggcaggagaatcgcttgaatctgagaggcagaggttgcagtgagccaagatcgtgccactgcactacagcttgggagacacagaaaaaaaaagagaggtactggggatggggatcaggatgggaacgcagaacctgagaggcccatgtgagctgggggcaggaaggatggggcattagcctaggatgcagcttgactagggaggaggccctggctggcagccagacctgatcctttcccctgggtcctgggaagaggggagtgctcaggctgagcactccctctgtgggagtagggatggggtggtgcatggggctgtgggactctgcatccagttccttctctgcatctctcttggcgcagcagcacacactatggggtggatctagcctcacactttcagcctctcttctcagcctcagtcccctggtgatcagtgccctaactctccgccctccattggcacagcccctccaatcagcacccttagcccatctttccactcttcagccccctactatccaccttctcacacttagaaccccagctctcagccctctgtgtgttcagccttagcactgctcaacagccactcttttttgggggagacggagtctcgctctgtcgcccaggctggagtgcagtggcgccacctcccgggttcaagcgattctcctgtctcagcctcctgagtagctgggattacaggcgcgcgtcaccatgtccggctaatttttgtatttttagtagagacggggtttcaccttgttggtcaggctgatctcgaattcctgacctcgtgatccgcccgcctcggcctcccaaagtgctgagattacaggcgtgagccactgtgcccggcctcaatagcgactctttaagccccctactctaatgtctgatacttcctccacttagcgtctccattctatcccttcatattcatccccatgctcaaatccctttacgcacattgctgaccccagctgagcagacccctcgccccccgtcggtcccctccccgaggggaaccccagtcaccggtcccgccccatccaggcgggctgagtcaggcggcaggaactgggcggggggcggcgccgggaggagccgaagccgagccagagccgctgggagcgagcccggagcccagccgggcggctcgaagtggccagggccggaaggtccgcggggggcgagcgcgggtcgggggccgtcccggacccaccatgaacaccaagaagagaggtaggacccagctcggggctgcgaaagctcagggactggccccaggggaagcaggccgggtttgggggccaggagtgtgtgtttcgccgaagcggggtgggggtctgccgaggagctctccccgccgatgccggggtggaggcgcacgtccgtgactcagtttccaggtgggagcctcaggaaagaggagggggcggggcccttctcggcatcgcgcccagctctgggaatccccctgcctggagggcgccgggacgcccgggccggtgggggctgggggcagcaggtcacgctggcaggcggggggcgggcgacaaacccgcaccggctgggcctgtcgggcagctccgcagggctccgagcgtggccccgccccgccccgtgacctccttgggctcccggggtggggggccccgagctccgggtgccctggggggggaaatcgggggcagggctggggaggctgccccgcccccgggtaaacaggcgcttccgcacattcttcgcgcgcgccgcccctttcctgccccttcccagccggaggagggtccccgcgcgaccccccttcctgccccgcggcaggcggagcccgcacctcggcaggaagtgggggccgagccgaggccacgctgagtccgaggccgagtcgcctgcggctgtcctgtcattagtgcccgggt

SEQ ID NO: 16308 - DNA, 2300 bp, Homo sapien
cgtccgtgactcagtttccaggtgggagcctcaggaaagaggagggggcggggcccttctcggcatcgcgcccagctctgggaatccccctgcctggagggcgccgggacgcccgggccggtgggggctgggggcagcaggtcacgctggcaggcggggggcgggcgacaaacccgcaccggctgggcctgtcgggcagctccgcagggctccgagcgtggccccgccccgccccgtgacctccttgggctcccggggtggggggccccgagctccgggtgccctggggggggaaatcgggggcagggctggggaggctgccccgcccccgggtaaacaggcgcttccgcacattcttcgcgcgcgccgcccctttcctgccccttcccagccggaggagggtccccgcgcgaccccccttcctgccccgcggcaggcggagcccgcacctcggcaggaagtgggggccgagccgaggccacgctgagtccgaggccgagtcgcctgcggctgtcctgtcattagtgcccgggtcggcgggactaggcggacccggccggagcccgctggggcagctgtgcctagcgacaggaaagacctgcgccagccctggatcccgctgcgtgggagagggcttcggggatccgactggtactggacacccccccgatcacccgcagggagccccgcgcggactcactctatgatgtccctgtcggtgcggccgcagcgccgtctgctcagcgcccgggtcaataggagccagtccttcgcaggcgtcctcggcagccacgagcgggggcccaggtacgcggccgcgcagggttggtggggtcaaagggcgtcagatggggctgggtctgggggtgcgtagtgagagtctgggggactcctgctctcctctttctgaggacagcctctccttcaggagtttcccggtcttcagcccgccggggcccccacggaagccccccgcgctctcccgagtgtccaggatgttttccgtggctcacccagccgccaaggtgccgcagcccgagcggctggacctggtgtacacggcgctgaagcggggcctgacgtgagcagctcctctgttcccagccctgtcccgggatccctccccaagcccgcatcctgctagcaggaaccttctccagccccatgccctctccctgctgtctgcaccctgggcagcatgaggctggagagccgagttcattcttgtggtcgcccctttcctcagggcctacttggaagtgcaccagcaggagcaagagaaactccaggggcagataagggagtccaagaggaattcccgcttggtgagtggcgggaggtacggatgccctttgcctctttggtgtggagggctgggcaagggcagccctgggtgatatctgggctattttctgaagtgatctggttcaggtgtgagtagaaaaggggatatcaggaaaggctgaggggcttttctatccccaaactttgctgtgcatactttctgcttgggactcagtacctgctccaggagcttccagtggggtaggtgggacccctacagacatggacagcaggagattctgctgcagtggtactgagcagtggtactgctgcatggtgcttcttgggaagaggttagggcttcctggaggagggaacacttctgccggggcttgatgggagttcccctgcagagggaaccttgcacaaggaagcagagagctctccccaggcggctgcaggaaaaggaatcccagggaagaggtggaaggaggggtcctggagggggctgaagggaccagatctgtgctaccagcatccaccaagggctagaccagcaggaaggggcgtcagttgctactgtgacaggagtgcttgtggactgtggtgtgagaaaggggagctgtgacgagtctgagtgcctctgctggagtcctcctcatccctcctaaatatttgccccttctccccacccctgcagggcttcctgtatgatctggacaaggtgagtatgcatggaatggtactggaaggggttggctcacagggagggtaaggaccctgggcctcaggcccctcctgacccacctctcccccagcaagtcaagtccattgaacgcttcctgcgacgactggagttccatgccagcaaggtacgagtgcagcatgtgtgcagagtggggtggggggttggatatcatagggagaagaggggtggtgccaggccctgggtgagcaaccttagaggtgagtaaccccagaggtgagtctcagtccccctactgtcaccccactca

SEQ ID NO: 16309 - DNA, 2300 bp, Homo sapien
ggtgcttcttgggaagaggttagggcttcctggaggagggaacacttctgccggggcttgatgggagttcccctgcagagggaaccttgcacaaggaagcagagagctctccccaggcggctgcaggaaaaggaatcccagggaagaggtggaaggaggggtcctggagggggctgaagggaccagatctgtgctaccagcatccaccaagggctagaccagcaggaaggggcgtcagttgctactgtgacaggagtgcttgtggactgtggtgtgagaaaggggagctgtgacgagtctgagtgcctctgctggagtcctcctcatccctcctaaatatttgccccttctccccacccctgcagggcttcctgtatgatctggacaaggtgagtatgcatggaatggtactggaaggggttggctcacagggagggtaaggaccctgggcctcaggcccctcctgacccacctctcccccagcaagtcaagtccattgaacgcttcctgcgacgactggagttccatgccagcaaggtacgagtgcagcatgtgtgcagagtggggtggggggttggatatcatagggagaagaggggtggtgccaggccctgggtgagcaaccttagaggtgagtaaccccagaggtgagtctcagtccccctactgtcaccccactcaccttcccagatcgatgagctgtatgaggcatactgtgtccagcggcgtctccgggatggtgcctacaacatggtccgtgcctacaccactgggtccccgggaagccgagaggcccgggacagcctggcagaggccactcgggggcatcgcgagtacacggaggtgagggatgggggcccatgaggcagaggcacagggtgtggcagggctagtggctggcccttgaccccctcctgtccctgcccctccctcccagagcatgtgtctgctggagagcgagctggaggcacagctgggcgagtttcatctccgaatgaaaggtactgagttgtgggggcaggtggggggctggagggagtatgctgaagaaccccaatatggctcaccgacttctccccttctcctccaactcagggctggctggcttcgccaggctgtgtgtaggcgatcagtatgaggtatgagaatgtgcagggaagggctgggtcggtagggtcccaacacctaggctgcctcatcctacctgttcccccagatctgcatgaaatatgggcgtcagcgctggaaactacggggccgaattgagggtagtggaaagcaggtgtgggacagtgaagaaaccatctttctccctctactcacggaatttctgtctattaaggtgatgtctctgcccaggacggcaggccaccatggccctgtgaaccccttgtgacccccattaccctgagtcccttactcctgtgatcccctcatagctccatagccctgtgaagatatgattccatgaccttcatgatctctgtggccctgagaggaacaatctttgtgactcttaggacatcatggcttcctgaccctgtgacctcctcatgatcttctgaccctgtgaatatttgacctcctaagctcccatgaggctgtgacctctatgacctcagtgaccctaccatgcagacctctgtgattcccatgctcccaggctgcttcaagcatccatggctccatgagcatgcatgtgtctgtctatctatctaggagttggcgggtctcactctgtcacccaggttggagtgcagcagtgcaatcatacctcactgcagtctcaaactcctgggctcaacccatcctcccacttcagcctcccaagtagctgggactacaggtgcaccaccatgcctggctaaaaattttttttttttttttttttgagacagagtcttgccatgttgcccaagctggtcttgaactcctggccttaagtgatcctcctgcctcagcctcccatgaccattttataagttctatgcaaattcagacctcagatttcccatgatctcatagcccctgcacccttgtgaccctaccatgcactcttggctacaggtgacagaactgaagggcctggccaaccatgtggttgtgggcagtgtctcctgtgagaccaaggacctgtttgccgccctgccccaggttgtggctgtggatatcaatgaccttggtaccatcaagctcagcctggaagtcacatggaggttggtggggctgagaggcttggaggagggccaggagggctgtggcacctgccaacagcctcttcccttcccagccccttcgac

SEQ ID NO: 16310 - DNA, 2300 bp, Homo sapien
agcctagcctggggacctagcccacctacacacccagctcccacccatggagagcaccccagtcctgttcctcctgccctggaccctggccactctgccacaagctctaccctcggtacaacaggctctgtccccacatctacagaccctgccccatctgcacacctagactcagttcataagtccacagactctggcccttcagaactgccaggccccactcacaccactacaggctctacctatagtgccattaccactacccacagtgctccaagccccctcactcacactactacaggctccacccacaagcccataatctctacccttactactacaggccctaccctcaatatcataggcccagtccagactaccacaagccccacccacactatgccaagccctacccataccacagcaagccccactcatacttccacaagccccacccatacccccacaagtcccacccacaaaaccagtatgtcacctcccaccactacaagtcctacccccagtggtatgggcctagtccagactgccacaagtcccacccatcctaccacaagccccacccatcccaccacaagccccatccttataaatgtaagcccttccacttctctagaacttgctaccctctccagcccctccaaacactcagaccccaccctcccaggcactgactcccttccctgtagtcccccagtctccaattcctacactcaggcagaccctatggcccccagaactccccacccaagtcctgcccattccagtaggaaacccctcacaagccctgccccagatccctcagagtctacggttcagagtctaagccccactccctcacccccaacccctgcaccccagcattcagacctttgcctggccatggctgtccagaccccagtcccaacggcagccggagggtctggggacaggagcctggaggaggcactgggggccctaatggctgccctggatgactaccgtggccagtttcctgagctgcagggcctggagcaggaggtgacccgcctagaaagtctgctcatggtgaggagggctgggctgggctagggcaaccagggagggcagccagggggcggcagccgctctgatgcccttcacaacctcagcagagacaaggtctgactcgcagccgggcctccagtctcagcatcactgtggagcatgccttggagagcttcagcttcctcaatgaagacgaagatgaagacaatgatgttcctggggacaggtgagggggctaggcaagatgggtgtgaggctaggtgagagggaaaaggtgaggcaggaccaggggaaggtggaacaggtgaattgggagaaagtcaaaggacaggacaggtgaggcagggccaggtggagcatgtgaggactgagttgctggcaggtgcacctgtgtccacccctcccatgtccttcatgcccatgtctccaaccctacgtgtgtccccagtgcttctgaccgccctcttcatctctgcaatgtctgcctcccctgccggtccccatcagcttgggtgcctccagcccctcctcttccccttggcctcaccttggacctgccctttaaggagctctctcagtgtctcgccgtgcaccctgggaccccagcactgccccactccttctcaaccccgactctcccagaggccctggcccctcaactgtcagtcctggagtggcctttgctggttcccagttgagagttgtgccaggtccctccttcctctgctgctgcccaggctacagccccatgccctgcaccctttgcagtccacttgtcataaaccatcccgcctgcagcctactcctacccatgccatccccagtggtcccagctggaggtagcatggcgcagactgactccagagatccctactaccacctgctggtcccagccccttcctccttctggaaatcctccatgaacttaccccactgtctgctgtcggtgcatcatcttcttcctttctggcatgggggaagcttaataaaaataaacgctggtgaccaggtggtgatgtgtgcctgtggggtggtggaccccatttttccctcaggcctccaagcagcccggaggctggggctgaggacagcatagactcacccagtgcccgccccctcagcacggggtgtccagctctggatgctgccttggtccggcacctgtaccactgcagtcgcctcctgctggtgaggctgatggtgttcccccacccttcctttgtaacccctaaccccagggagtcctgcccttccat

SEQ ID NO: 16311 - DNA, 2300 bp, Homo sapien
cctatataggtcaagcaagcctcctctctcctggatcacccatctttcttccccaccatatccctcccaatggcacataaacatgctctgggaaccctaccatcttttattttatttattattattttttgagatggagtcccgctttgttgcccaggctggagtgctgtggcccaatcttggctctctgcaacctctgcctcccgggttcaagcaattctcctgcctcagcctccccagtagcttggattacaggcgcgcgataccatgcccaactaatttttgtatttttagtagagaccgggtttcaccatattggccaggctggtctcgaactcctgacctcaggtgatccacctgccttggcctcccaaagtgctaggataacaggcgtgagccactgcgcccggcccctactatcttttaaaagatttctttctatatctatccccaaacttatctggtcccttcacagcaaaacctctctcaaattgcatacatgtgctgtctccatttcctcactttcctggtgactgtttaacccattccggtcaggtccacctccctgatatactcacgtgaatcaagccaaggccatcagtgacattctccagtgacttgcaaggtgacccaatccaatagccacatctctggcccaagtttatcacaccgctcagctgatgcctcctacctgaaaccttctctgcccagggattccacaactcagcgctagctttcatgacttcctagatgctgcctttcagactccttctccattaccctcccaatattggagtgccccaggatttggccatggaatttctcttcactctttcctccaagccaagccaggggtcgtaaactgacagctcatctgtgtggtttaatcagctcatgaagtttaaaaacatctgattcagttgctaacatctaaaaactctggagatttgacatcttaaaaatacagatttttttattcctttaggggaaaaaaaaagagtatgttattgggccagcattctcacaacggaacggtcagatggatggagaagaagctgctccctagatattgggtccatttgatatctaagggaagagtcatattccctgtaagtaccaaaaggctctcatcccagagccaccagcaccttgcagtcagttcttggtcaacttgactgcaggttgggaagggtccgcaggcgcctcctggggaggggtgggactgaaggtctccgcccacagagaacagctctcccgcaaagacaagaaatgcacgtttccacagaattacacagcgctaaatacagaaactcctttcagtaaaaagcgattgctatgaacgtgttaaagcatcaagtctggttttccgccacctctccgggctgaggtggcctggggacaccaagaggaggccctcccactctcctctcgcacccgcttttaggtggccctcttctagggcggagagatcaccaaaagccgctgagcaaggacagcccttccagtcgtcgctcgcgggcacggagctgggagcgcgcgggaaccgaccgggccttactctggggcgggcagctgtaagacattcggagggcgggtcgggcctggctggggcggagactgggcggggccgggcccgggagcctcctcagccccactggcttgccccgcgcgcgcttcctccagccacccccacttccccaaccctgtacgggttcagggggccggagacagcagctagggaataaggtcaagcggactggatccggcaccgcccaggggcggcggcctccgcccaggaagccccacccagcgggagccaggacgccgcggcgccggcagagcccacgagcgacccggcgagggcgcgtgcggcgtgacgacgcgactcgcggcgcgtcccgtgacgccatcgcgcccgcttttgaaagttggcgcccggggccgcctcccatgctgccctgcgccaacccctcccctcacctttcctcccccgccctctactcgccgcccggccggtccccccacccgtcccttcccttatcagcacccgcggccccggcagcgccgacgcaggcgcactgcaccgcgccgccgccattttgtgtctgagcctgtggagcgattaaaccgtgcgcggagctgcttctttggcggcagcggcggcggcggtggccggtgcggacgcgcggagctcgccggagacgccgggtggccggagccgtggagcggcggcggagcgggcgccgcggggggtgtggcgcggaggtaagggggcccggggtggaggaggtttcgcgggc

SEQ ID NO: 16312 - DNA, 2300 bp, Homo sapien
tttttcaccatttattggtttgaatcaggatccaaagaagattcatgcattgtgattgattactgtctctttaagactcttttatctgtatcagagtttctcagcctcagtgctcttgacatcttgggcctgataattctttttttttttttttttgagatggaatctcgctctgtcgcccaggctggagtgcagtggcgcgatcttggctcactgcaagctccgcctcccaggttcacgccattctcctgcctcagcctcccaagagctgggactacaggcgcccaccaccacgcccggctaatttttttgtattttttagtagagacggggtttcaccgtgttagccaggatggtctcgatctcctgacctccggtaatctgcccgcctcagcctcccaaagtgctgggattacaggcgtgagccaccgtgcccggcctggcctgataattctttgtggtggaggactgacctgtgtcttggaggatgtttaatagcatctctagctttcacccacgagataacagtagcacatcccagcccagtagtgacaaccaaaaatgtgttagccaaatgttcctagaggcaaagtcaccccaggctgagaactactgatctactggttctccctccaatcagtcttcccttgtattcttcttgttatctatttgcagaagaacctgagtataatcttgcagtgtttccctcggtatggatttcactgatttaatccctgtagtataatttaacatcctgagtcaccaatttcctgttaattgggttggatctagagacttgattggtttcagagttttggagtttgtttgacaaaattgcattataggtagtggttttttctttttcttttttttttttttttttttgagatggagtcttgctctgtcccccacgctggagcgcagtggtgcaatctcggctcactgcaagctccgcctcctggattcaagctattcttctgcctcagcctcccgagtagctgggactacaggcgcccgccaccatgcctggctaattttttttgtatttttagtagagacggggtttcaccgtgttagccaggatgttctcgatctcctgacctcgtgatccgcccgcctcagcctcccaaagtgctgggattacaggcgtgagccactgcacctggccagtagtggttgtttctttcatcaagaggcacatgtctgttgtgtcttttttaatattaacaaccattgatgcctaattcattcaccaaagggtctttttgttttaaaatgtatatttttatttagacatgctttgctttaaataacaatctgtgttctcccttaataaaggcaggggaaatggaaggtgatgcagtcgaagccattgtggaggagtccgaaacttttattaaaggaaaggagagaaagacttaccagagacgccgggaagggggccaggaagaagatgcctgccacttaccccagaaccagacggatgggggtgaggtggtccaggatgtcaacagcagtgtacagatggtgatgatggaacagctggaccccacccttcttcagatgaagactgaagtaatggagggcacagtggctccagaagcagaggctgctgtggacgatacccagattataactttacaggttgtaaatatggaggaacagcccataaacataggagaacttcagcttgttcaagtacctgttcctgtgactgtacctgttgctaccacttcagtagaagaacttcagggggcttatgaaaatgaagtgtctaaagagggccttgcggaaagtgaacccatgatatgccacaccctacctttgcctgaagggtttcaggtggttaaagtgggggccaatggagaggtggagacactagaacaaggggaacttccaccccaggaagatcctagttggcaaaaagacccagactatcagccaccagccaaaaaaacaaagaaaaccaaaaagagcaaactgcgttatacagaggagggcaaagatgtagatgtgtctgtctacgattttgaggaagaacagcaggagggtctgctatcagaggttaatgcagagaaagtggttggtaatatgaagcctccaaagccaacaaaaattaaaaagaaaggtaaaacgagtttatccatagtggtttcataaaaccattttgggataagcatacaacacagtgcatatgcaagttgttttatattaaccgtatttgtaaaaggtcgttatgtgggtaccgttctttaaaaccagtctaaaataagttttttccagattgaatgctctttttt

SEQ ID NO: 16313 - DNA, 2300 bp, Homo sapien
ggcagtactgtgtgagacctactgaattgtcaccctacaagcagtttgagggttctgtgtggtcttagagccttagatcttaatccaaattatgtctcttcgtggccaggcatggtgtctcacgcctgtaatcccagcactttgggaggccgaggtgggcagatcacctgaggtcaggagttggagaccagcctgacaaacatggtgaaaccccgtctctactaaaaacataaaaattccctgggtgtggtggcacatgcctgtaatcccagctacttgggaggctgaggcagaagaattgcttgaacccaggaggcagaggttgcagtgaaccaagatcgccctactgcactccagcctgggcaacaagagcgaagctctgtctaaaataataataataataatgataataataataataataattagcccaggcatggtggtgggcacctgtaatcccagctactcgggagactgaggcaggagaattgctggaacctgggaggcggaggctgcagtgaaccaagatcgccctactgcactccagcctgggcaacaagagcgaagctctgtctaaaataataataataataatgataataataataataataattagcccaggcatggtggtgggcacctgtaatcccagctactcgggagactgaggcaggagaattgctggaacctgggaggcggaggctgcagtgagccaagattgtgccactgcactccagcctggaccacagagcaagactctatctcaaaaccaacaaacaaaccaagtatgtctcttcaatcggggaggcagcaggaactctctgtgctgcatcttctgcagctgactcctccttgtcacccttagctgtcatttcacctccaccttgctgagctatgggcagggtagactgctgttccttaccgcttaagtggagtttagattgtaatagaagaaaaaaaatgcagtctcttcctgtgaactttccagaatctaggtcctggtctttgagagggcaacaggctaccaggccccaccctatgactgtctgacccctctcagccctggagacactggcttatttctctctctctggctgccccctcccaaactctctccagcctggggagaaggcagacacaagaagaccctcatgtacctggacgactcactccggccctctatgaagtgcttggggttcagggctcaccttagccccaggcttccccccgaaggctccgggtacaccctcaccttcggccctgaccccacctctgcggcaaggaagggcgtctggacccatcaggctgttttttttttttttttttagacaggacctggctttgtcacccaggctggagtacagtggtgcgatctccgctcactgcaaactctgcctcccaagctcaagtgatcctcccacctcagcctcccaagtagctaggattacagacacacgccatcacgccgtctaattttgtaaattattttgcagagacagggtctccctatgttgcccagcttggtctcgaactctttggctcaagcgttcctccttcctcggccttccaaagtgctgggattacaggcgtgagccaccgcgcctggccccatctgacattttttcccacccattcaaaatctcttggatccctaacagggtcacggactccaggttcggagcaacgggcaggacctccggtgttggcagaattcgggcgctccttgctgaacagtcccccttctgccaggcgcctcgtccacctccgcagcctgggctttggaggggaccagccccggtgggccgcggggatccccaggcaggcagcgtcccctggtgttcgcggcagggactgcggggcggggtggaagccgggggcaaggacccgctggaggcccgccacacccgcgaccctcccggccacgccactgcccaccccgacgtctaccctggcggagaagctcctgggcgacggggcgggcgggcaggtgggactcggcccccctcccacaaccccgctcccgggcaagctctcgagccgcgaggccggggcggggaggggccgggccgggggcggcctggcaggaagcggcgcgcaccttccgccgccggaggagcaggtggctgccgtgcgggtctgggccccaggcttcctgtgtgcgcgctcgtcctctgctgtttcccgccggagctcgttgggcctccccggcccgcccggcccatggcccagacccccgacggcatctcctgtgagctccgaggtaagcgctggcccttcctgccttcttggccgggaggaag

SEQ ID NO: 16314 - DNA, 2300 bp, Homo sapien
ccgctgagggtgagtcccagggcctggccacacccccgcccgccagcagctaccttggcagggggctgcatctgcagagtggtccttcttggccttgtgggccctgactttgcaccagcactgggctctgggcagccgacaggaggggagtccaggcagatctggctctgccccaggctgcccaaaggactggacttccatgagggcggggctgggggcttggtcccagctgatctaggccctttctaggtggactgcacgttcagctacctggaggtccaggccatggcgctgcaggagacaccccctcaggtgagacacctagtaccctacctgggcctgcagcctggtcttcatgctaccaccatcacctgcgcccatgtgtggagccgaggcctagtagtgccccttccctaggtcacctttgagctggagtccctgcgtgagctggtcctggagtttcctggtgtggccgccctggaacagctggcccagcacgtggctgcagccatcaagaaggtcttccctcgctcgacccttgggtgaggcctggcaaattcgaggggctggcaggggaggagggagtgcatgagaagggctgcttcccatcccagaggctggaagtcctttgcccccttctccttaaccccctaccaggaagctattccggaggcccacaccagcctccatgctggctcggctggagagaagcagcccctcggagtccactgacccctgcagcccctgtggtaagggtgaaggcagagccacaggccttccagcctgccccacctctgcctccccagacccgcaagctgggggggccccaaactgaacagagccattcaggtcccagccaccacctagtctgtgggtctggtcttcctccatcgctgatgttttgtctctctccttttccacatcgcacccctatcccctccccaggtggcttcttggagacatacgaggctctgtgtgactacaatggcttccctttccgagaggagattcagtgggtgagggtagggcccttttgaagggctctggagacatctggtcccccatgtgtgctgagcccctccctgccccttgtggccccaggcgaactgtaagcatctccttctcacccaggacgtggacaccatttaccatcgccagggctgccgccatttcagcctgggagacttcagccacctcggcagtcggtgtgtggcctgccaggatgggagaggaggaagatcccggggcccatatccctgggcctcagtttctccatggaggggctgctgggcctgggacctggctggagggccctgagctctgcctctgttcccaccctcccaccagggacctggccttgagtgtggctgccctgtcctacaacctgtggttccggtgcctctcctgtgtggacatgaagctggtgagggggttcggggtaagggcagggaggggccaagggtgtgggccagggtgcagcccgctgagggccagggtgcagcccgtgagccgccgccctctgcttctcagagccttgaggtctcagaacagattctgcacatgatgagtcagtcatcacacctggaggagctggtgctggagacctgcagcctgagggggtgagggggacagggcagggcttggagaggagagtctggaggcttgggactgggggctagtggcctgggaggggttggcaaaccaggggcagaatctcatgcctggggtctggtccccagagactttgtccgacgactggcccaggcgctggcgggacactcaagctctgggctgcgggagctcagcctcgcggggaacctgctggatgaccgaggtatgactgagcctggggaccgcaggggtgggcagcaggaggaggtgagacccacgtggctgttcccaccccccaaggcatgactgcactcagcagacacctcgagcgttgtccaggagccctgaggagactcagcctggcccagacagggttgacaccgcgaggtaggctggatgagggagggggtgaggggaggggggtgggggtctgtccaactgctgagtgaccccgacccaccaccaggaatgagggctctgggccgggcactggccaccaatgccgccttcgactccaccctgacccacctggacctttctgggaatcctggggcgctgggggcctccgaggacagtggggtgagtggctgtcttcagggtgggagcttggggttgctcataagccctgggtaggcgatcccccactccatcgcacccctgtcctccctccagggcctctatagcttcct

SEQ ID NO: 16315 - DNA, 2300 bp, Homo sapien
ctttccttcctattctgggcacttaggaagtgtatataaagtccttaaaatgaaccaaagcaacagatagttccttccctccttgaacagatagggttccaaagtggctggtctaagggtgtcagcttcaggacctccctctgttaaagagcctgggaggaaggcaggcaggatctgggagactgggagggggctaggctgagactgatccccatttcgccccaggaagtgaatgaattgtgtcagtcggtgcaggagcatgtggagctgctgggctgtggggctgggccccagggtgaagccgctgtgcgccaggccgaggatgccatccaaaatgccaacttctctctcagcgtgagcactccccctcctgctacaaggacccttcccctcttagtcaggtgtcagctcgcaactgcttttcctctttggccctcagattctccccattctatatgaagctggaagctccccaagccatcactggcagcttgggcagaagctggagggccttctgagacaggtgggcgaggtctgccgccaggacatccaggtgagagggtactcctgccccaaccccacctccgtttgcaggtttgactcccatcctttagttttaactgtgatatcccctgactcaatattctgttggagttggagcctcaagccagcagcctggtgtctggccacatcctcaccatgctctgactgacctttgtctaggacttcactcaggccacactggacacagcaaggagcctctgcccacagatgctgcagggatccagctggagggagcagctagagggggtcctggcaggctcgaggggcctcccggagctgctcccagagcagctgctgcaagatgccttcactaggctcaggtaggctggatggggctgggctgggcaaggctgagcaaagccagcccattaacccctgtcctctcctgcccttagggacatgcggctatcaatcacggggaccttggcagagagcattgtggctcaggctttggcaggcctgagtgcagcccgggatcagctggtgagggggagatgtgcacacactttcgtgcaaacacacacatgcagtgacttggccatctcccttgcaggggctctgtaatgtcttctggggtcatgtagcccagggctatttcagggtccccttagttagcatcaatgggatcatggctgaggccctacctgccatctttggctgcttggtattgcaggtggagagtctggctcagcaggcaacagtgacaatgccccctgccctaccagcaccggatggaggtgagcccagcctccttgagcctggggaattggaaggtcttttcttccccgaggagaaggaagaggagaaggagaaggtaagtggttttagaacacggggcatggcactcccagtcttcccatcttgctgtggagtgtggaaggtgaaaggcagctcttttgggttggtgctctcctaccccaggctgagtttgtgccctccccaccaggatgacagtcctccacagaaatggcctgagctcagccacggtcttcacctggtccccttcattcacagtaagtcagggccttgggggagggagtttacgtgggtgggctgaagctccattagacttggggacccggggacctggatgaactcattcagccttgtctgggtacccaccagcccttgactgggccaggtcgggccccttgtgcaacctgcaaagctggggtctgctgtggtcagcccggggcgggacctgggcggatctgggacaggacaccggctcagctcgcctccccgcgcccctttccctaccccagggacgcgcatgctgggcggcggcgcggagccgcgcgcgctcggggccgcgctcagcaccacggacagcggcggcggcgggggaggggcggaggggcagaggggcggggggacgggcggcgtagccgggcccctccccgcgccctgggcgggtcccccgccgccctagcgcctccgccgccacctccccgggctcggcgctcggtgctcttctggtgctgtcccctcaggtgctgctgaggaagcggagccggagcccgagctggcggctccgggagaagatgcagagccgcaggcggggccgtccgcgcgcggctctccgagccctgccgcccctgggcccccggccggcccgctgccccgcatggacctgccactggcggggcagcccctgcgccatccgacccgggcccggccgcggccgcgccgccagcaccaccaccgcccgccgccggggggcccccaggtgagca

SEQ ID NO: 16316 - DNA, 2300 bp, Homo sapien
gtttactctcatgtcctgtgggatatgacccttgcccaactcctcaccctgacatctcccaagcaaatccccagactgaccgtggccttgcatcgtgaggcagcccagtgggtgacagggggtgctgtgcaagggccctccagtgtcaggcagctttcagccaggcacacgagtgccccctgatgctcctggtcctcccgcatttcatccagaagctgggacagtgataggcctggggacaggggaccatgggatgagtcaaggcttaaaggggaggaccaggagggtgagggggaagacagcttattgaggaagcataaggttaaggctggagagatcactgcacagcgtgttaggatcactggtcaagctctacagtacctgcattggacgaggtggactctgaaaggtgctccctacaggaagagagtggccaggactcaggaaccatgctgaggcctgtctacctagatacaccatcccctcaccaaacaacacgtggcccccgagcccaaccccagactcactcaaggcagtcatagagctttttctgaacatctaagtcttggttgctaagaaaaagagaagggtagttaatgggggcccaagccctcctaccccataggcgtctgccagcgccggccaggctggggtggggagagctgctggagggcggaggcatcacttaccaaccaggcacccgtagccggggctgctccgtgggcagcaggctgaagcggtccacctggagatagaactctgcgggctggaggagttcggggggaagggggggtctcagaatcgtcacgaagagtcatgcccggtaacccgcccaaggcagtctcaccactcaccgcgccgccctcagcgacctggacatgaaccccgcagtcctgcagcagcagcagccggccctctgtcccgcggaagccgaactccttctcctccctgcaacaagcaggatcctcactgccgggcccacctgaacacaaggcccgcccacctcgcgctctcctgccggactccgacctccagagccgcgcggggcctctcaccagtccgaggtgtccagggcctcccgcgtcaccaggcatcggacactgtgggtcccgtcagacacaagcagcgtggccccgacgtcggacgtatcaggggcgtgggatgggcccgcgaccgcggcctcggcgtcctgtagtacctgacggcggcgagcggcgtcaatcccaccaccccgggcctccgcctcggtctccgggccctgaatgggggctcacctcaagcagctgcccggctcgtggactggagggtgtctctgaccccagaatcagctcccgaatccagggccgtaggaccagcctccccgaacctgccatccccacggctacacccagcggatgcaacgggcccgggtttcccgcgggcgcccaggccccgcctttcctcggaagaggaagctccttcgctgggcggggccggaggaggaggccccgcccacgtacaccccgcgcctgcgcacgagggcgtcctgctcgggggcctgtgtgcagactcccgctggtccaccccgctggtgcacgggatgctggcccgtttactctcatcgcggcgtcactctgacagcggccaggcatttgggccgttcgtcaagattcctgtggtaccggtagggaacagaacaagggctggtcccgtccctggagagggttccagggccggaggctgaggccgagtgccgtccgagcgagttgactcgaaaccatttcagcaccgtgtgacccccgaacggttcagcacatatttattatgactcagtttcctcatctacacagtgcacggtcttgtaaggccagtggaaataagagcacacacacagcgctaaataaatggtacttccttcgccctcccctcggattggcggagccctgctccccagactccgggggcgcgcggacctcagcgtgatgacgcaagagcggaggacggctcctctccatccacggctccgtttcctaggaaacgtggactccgcgttccactctgcgtcgctgcccccttgacgtcacgctccggatgggaaggcggggcgtgtgctaccgccaggggcggggcggcgcgggcgggccggccgggctgtgcacctgcgcctcggcgggccgcctggggcaccgtccccggcccgcccggccccgccatggcccggccgcagaggactccggcgcgcagtcccgatagcatcgtcgaggtgaagagcaaagtaagggctcctccggcctcggccctaggcgctcccaattccctct

SEQ ID NO: 16317 - DNA, 2300 bp, Homo sapien
cacgttattgcgctggttggcgggcttgacagtgacaatgaggttatggctgttggcaaccatcatgtccgtcacttggtccaaggtcttcccggctacttcaatgccattgacctcgaggatctcatcactgaccgccagcagccctgtactctcagccagacccccacgtaccaggcgggagatgaagattcctggaacccgctccaggccctggggagccacacgcacgctcatgccatctcggatgtagaagcccagggggcggtctgaaccatgcttgtgcagccgcacccgtcggtgggtctcaggcagtaggtccacgtctatgactgaggaaacctggcggaaatcttggggcaggctgattagcaagggtggccgggtgcgcaggggtgccactggccgcagcaagagccctttcttgcgccgctgcagagagttggaggcaaaagccaggccgctggagtcagcttctgctgcagaagaggggggatgttgagatcagagacctgctccccgacttgggctgtttacagggggcactgtagctatttcctaccacttagaggtcaagccaagggcagggactgcagagggtgacgcttgggtaccctgggcatggactaacccttgtagacctgccccacagacaccttaccccacagaggctgcccactgtacccctcctcaccccgcttctgcaccagtaggcgcagtggcgggggcccgctggccagggcccggtgcaggctgtcgtcgttggtgaggggcagcaggtcgccatgagcatccgtatagccaagtagcacgtccaggcccgggatctggtgcaccgcccgcagcaaccgcgagaactcctggaagccgctcaccgaagcgcgaggcagcgcgaagcgtcggaactcggcgtcaaactggaagtcggggttgggggagaggaggagtcaggacagcctgcgcccctttctcaccgcaggctggcaggaatgggaaagatgcggctgccgcttttgcggcagccttaagcccagacctcagctccagtaccagggacgctgtccaaggtcttcttaccgccctccaggtactcaggccacagagagctggagaccagcagtggaggaaggaagacggatgggggaaggcgagcagaaaagcagaatgggacttggaggatagagggaagaggtggcggggaccaaggagctgggaaggggagaaagagggaattgggagcgcctagggccgaggccggaggagcccttactttgctcttcacctcgacgatgctatcgggactgcgcgccggagtcctctgcggccgggccatggcggggccgggcgggccggggacggtgccccaggcggcccgccgaggcgcaggtgcacagcccggccggcccgcccgcgccgccccgcccctggcggtagcacacgccccgccttcccatccggagcgtgacgtcaagggggcagcgacgcagagtggaacgcggagtccacgtttcctaggaaacggagccgtggatggagaggagccgtcctccgctcttgcgtcatcacgctgaggtccgcgcgcccccggagtctggggagcagggctccgccaatccgaggggagggcgaaggaagtaccatttatttagcgctgtgtgtgtgctcttatttccactggccttacaagaccgtgcactgtgtagatgaggaaactgagtcataataaatatgtgctgaaccgttcgggggtcacacggtgctgaaatggtttcgagtcaactcgctcggacggcactcggcctcagcctccggccctggaaccctctccagggacgggaccagcccttgttctgttccctaccggtaccacaggaatcttgacgaacggcccaaatgcctggccgctgtcagagtgacgccgcgatgagagtaaacgggccagcatcccgtgcaccagcggggtggaccagcgggagtctgcacacaggcccccgagcaggacgccctcgtgcgcaggcgcggggtgtacgtgggcggggcctcctcctccggccccgcccagcgaaggagcttcctcttccgaggaaaggcggggcctgggcgcccgcgggaaacccgggcccgttgcatccgctgggtgtagccgtggggatggcaggttcggggaggctggtcctacggccctggattcgggagctgattctggggtcagagacaccctccagtccacgagccgggcagctgcttgaggtgagcccccattcagggcccggagaccgaggcggaggcccggggtggtg

SEQ ID NO: 16318 - DNA, 2300 bp, Homo sapien
tgccaagcctggtggccctcctgctgcttgattgcaggaagttctccccaatgtcactcctgccttagtccagagcagaaggcaagctggtgagaccagggaggaggctggaactgggacacacaaggaccatgactgtatttgtagaaaacctttaatgttccccaggctgagggagccctgtgagccagctaaaaacccccactgtgaagtccctgccatgtcccagcagtgtggagtggcatggggcttcatcctgactgtcagaggctgaagccactaccatctcctcgaatgcgactcccccagccagaactggcctgctcctggtcatccagggagggcagagagctgcgggtaccaggatgtcggcagccagggtgcaggtcccagcacgggggcccctgagacagcccattggaactgggaggctggcggttctcaatgaccaggtcactgctgtcatcgtcactatcaggctcagcaggcccaggccctgcagagggaggacctgtcaaacgcccagatgcccctcgcaccacgttattgcgctggttggcgggcttgacagtgacaatgaggttatggctgttggcaaccatcatgtccgtcacttggtccaaggtcttcccggctacttcaatgccattgacctcgaggatctcatcactgaccgccagcagccctgtactctcagccagacccccacgtaccaggcgggagatgaagattcctggaacccgctccaggccctggggagccacacgcacgctcatgccatctcggatgtagaagcccagggggcggtctgaaccatgcttgtgcagccgcacccgtcggtgggtctcaggcagtaggtccacgtctatgactgaggaaacctggcggaaatcttggggcaggctgattagcaagggtggccgggtgcgcaggggtgccactggccgcagcaagagccctttcttgcgccgctgcagagagttggaggcaaaagccaggccgctggagtcagcttctgctgcagaagaggggggatgttgagatcagagacctgctccccgacttgggctgtttacagggggcactgtagctatttcctaccacttagaggtcaagccaagggcagggactgcagagggtgacgcttgggtaccctgggcatggactaacccttgtagacctgccccacagacaccttaccccacagaggctgcccactgtacccctcctcaccccgcttctgcaccagtaggcgcagtggcgggggcccgctggccagggcccggtgcaggctgtcgtcgttggtgaggggcagcaggtcgccatgagcatccgtatagccaagtagcacgtccaggcccgggatctggtgcaccgcccgcagcaaccgcgagaactcctggaagccgctcaccgaagcgcgaggcagcgcgaagcgtcggaactcggcgtcaaactggaagtcggggttgggggagaggaggagtcaggacagcctgcgcccctttctcaccgcaggctggcaggaatgggaaagatgcggctgccgcttttgcggcagccttaagcccagacctcagctccagtaccagggacgctgtccaaggtcttcttaccgccctccaggtactcaggccacagagagctggagaccagcagtggaggaaggaagacggatgggggaaggcgagcagaaaagcagaatgggacttggaggatagagggaagaggtggcggggaccaaggagctgggaaggggagaaagagggaattgggagcgcctagggccgaggccggaggagcccttactttgctcttcacctcgacgatgctatcgggactgcgcgccggagtcctctgcggccgggccatggcggggccgggcgggccggggacggtgccccaggcggcccgccgaggcgcaggtgcacagcccggccggcccgcccgcgccgccccgcccctggcggtagcacacgccccgccttcccatccggagcgtgacgtcaagggggcagcgacgcagagtggaacgcggagtccacgtttcctaggaaacggagccgtggatggagaggagccgtcctccgctcttgcgtcatcacgctgaggtccgcgcgcccccggagtctggggagcagggctccgccaatccgaggggagggcgaaggaagtaccatttatttagcgctgtgtgtgtgctcttatttccactggccttacaagaccgtgcactgtgtagatgaggaaactgagtcataataaatatgtgctgaaccgttcgggggtcacacggtgct

SEQ ID NO: 16319 - DNA, 2300 bp, Homo sapien
cctagcatctccactgctgcgtgccctgtggtctgtgaggttccatcttttgggaatgttctcttctgctgtccctttgactaattgctacttgccctcaggatcagccccaccatcactacttctgagaagccccccagcctcgccctgcagcagagccagggtctcttagtcctctgttacctctgtgacttccctcccaccccagaactcagatcagggtacagttgcctgttggccaacaaaatggataatacttctggctccctgaagcaggtacctggagctgggccttgacccgggactccaccttgtcgtacttgggtgagcgccacagagctttcaggggcctgggctggccctgctcccggctgcgctcctgttctctgaagcgcttctgaatctccctgatccgcctcaggttctccttctcatggtccttagggtccttccctggagaaaagatgcccccaggttctgccctacatggggcccacacagtccaacttccactagttcacacacaggcctgccccctgcctcctacagaaagagctccctgacctctccaactaccttagaccctacacacactctccctcatcaccgtgttcccttcctcatgtagtaagtatcacaggatgattttctccattattattattattattattatttgagacagggtctcactctgtcacccaggctggagtacagtggcatgatcatagctcactgtagcctcaacctccccggctacctcagcctgccgagtagctgggattacagacacactccaccatgccagcctgatttttgtattttttgtagagatggggtttcaccatgttggccaggctggtcttcaactcctggactcaagtgatctgcccgcctgggcctcccaaagtgctgggattccaggagtgagccactgcgcccaggtgatttcctccattattatagtgaagtacaccattgaagtacaccatagatcatctcatatatgacattcatctcttgatctttgtatcccaccttgactcagtgatggctcatgcttatcttcagccctgtgttctagcatctatatggcctggcacacagtaggcactcaacaaacaaatttaatgggtaacaaatgcataaagcagagctagggcttcgtgggaactacctcattcagttcacctccttcgagaaggtagcatatttctcccccttttatagttggggaaactgagactcaagagatgcaaagcctgggcccacgtcagggtggaaagagcagctgcttttgatctctttccaccccgcactgcctctctgtcccttcttccattcctgggacttactcttgagagaggccccaggacctagggagatcccctcgagttgcaacagcacgtccccgacgccgcgctggccgcgctccaggatctctccggcaccgggaccgatgcaggggccacggggagcggtggtgtccagggcccggtcggaagtcagcaagtccagcttcagcgcgtttccctcgaggcgcccttgagctgtggggcggagccgggcggagtccggggctcagaggtggagccagggccgacccctgagcctcgcaccaccgccaagcccccggactcacccgaggtcggccgcctgtagttgtcaggacagagcgtcgggtctggggggatgggccccgagatgcgggacgggccctcgcacatgccgccggcgccgcccagcaacggtgccccgaggcctgcagggctgtttacctccctccccgggcccccttccccaaccccgggccccctccctcgcccggcaccctgaccctggcgtgcccgccactcccgggcccctgccggtccccgcctgggccccggcctcgctcgccacctccgcgacctctgctcccagcccacttctcggtcccgctcgcggcctctcccccgcggcactcgggcaggggctcactcgagaggttttgccgccagccgctgccacccgacgggacttgttgttgccgggcaaccgtggcttccgtccccggggtcagggcccactgaccccggcgcaaagcgtcctggggcttgtagtttcggccgagggtgggctccgcggtcgccggtttctcttcccagctctgccctcgcttgctggccggtctccggggtcagcgcggggccaccatccagccccttggggcccgccccaagcagctgtcgaggacgcactcagcctgcgcagccatggcctcggcaggggcggagaggcggccgggggtccaggaggcg

SEQ ID NO: 16320 - DNA, 2300 bp, Homo sapien
cacagacaaggtccggtccagctatggtctggcaatgagtaggaaacatcccaaagctgtcactgttgtgacaggcaaaagaactctgtgctacctcctaggaggatcccaagttttgatcccctcaaggtgagaccaaatgcaggcccttccccaggagacagaagagcagggccaaacacctgcttcccatgacccaacagaccctttcttttctctgccccaagttcctccttctcacttccctcttcatcacccagttagctgcctgaccctcagattcacctaaacacacagcaccaggtccaccctgattcagtgaggcatggggtggcacaaaggaatctgtcattgtcaaagtctcaggtgatgcagatgaccattcaggcctcaaaccctgcactgttgagtcctccatcctcttacccatttcaggcaacctatctggggaatcacaaagtctttgaaaaagaaaaatatttattttcagcaagaccaaagtcccaagtgggggcaggtgccaaatttgcccccgccaccagagggcctaggcccacaggaagcctgaagccaaattcaggcgtggaaggaggggagccaccagtggggcgggacagtcacttgtactgaggagagagcggggggacaagtggagcagtgcagacactcagcatcttgtcgatgtccacctgggttgacttatccacctcggccttgtggtcactcacccccaagctgggcaagcccccaggctcctctccagcctcctctccgaggggagccagggcatgggtgggggtcactagtggactgggacagggcaaagcgaggcctgggcccagctcacctgccaagggcagcaaggcctgcagttgctccacacctccctcctcgggaaccggggccagctctgcctctgcctccacctcagcctccccgtcccccttccctgcctggttcagctcagggttgcaatagttgacgtactggtacagcggccgcaggcgctgggcctttcctgcaaagacccagggcagggcagaggctagagcgccaggttgtgccatgtcgggccccacaggcagggggagaaggaacagtccagggactgccactcacgctccagcctcaatgtctctaagggtgcagacaccatgctggccacagcgtggagcacgggagcccccaggctcttgcgcttcttggcttttttgtgctgtttggcagatggtgagggctcactctggctgtcctctggctcctcctcctgcagcggcagcttgggtggcagctcagcttcagccttaagatgggcacgaaggcccgggaggctgagagacctgagccagggacaagagacttgagccaggctccagccctggctcccattccctggcccagggaatagcccagcctgcccacagccccagggctcgacgcctgtcccgttcctggtcaatgagaccccaggcccaagaggcttagaggccagtgagcccaggcccctacaagccctgaagctcccactctcctgctgctccctacacgggggctcttgaggaacgggaggagagtgatggtagtggctggggacgagaatcctccctgcaggagtgcaggatttaggaatcctactgtggtgtgtgccccaaccccggggctgcagctccttccccccgagagccccctcacttgacaggctttctctttggaccatgacggggcctcacaatggagaccacgggcctggggcctctctcctctagcgccccggcatgcggcttgggccgctcctcccccagcttgggtccttcctcctggagctccgactccgaagctgcgcctgctgggcgctggtcttcactctgggttccgcgggcctcatgggcaggcaccaggaactggtctcccgccactggacactagagatgacacacaggccatcggtcaccatggccgggcaaaggacatagggatccgtcactgaacacctaacgttagacaccgaaacgggaataaggacaccagcctgtgcccctccccgcctggagggcccagcctggcagttagcgggtcggggcgctcagttccacctctcagagcgctgcggccctgtgtttgaaggttaaacagcctgacggtcacctcggaggtctgagcgctgccgggctcctccgtgagctgtccctgccccacgaccgtcgcctcctggacccccggccgcctctccgcccctgccgaggccatggctgcgcaggctgagtgcgtcctcgacagctgcttggggcgggccccaaggg

SEQ ID NO: 16321 - DNA, 2300 bp, Homo sapien
gttttgctcttgtcgcccaggctggagtgcaatggtacgatctcagctcactgcaacctctgcctcctgggttcaagtgactttcctgcctcagcctcctgagctagctgggattacaggagcctgccaccatgcccagctaagttttttgtatttttagtagagatggggtttcactatgttggccaggctggtcttgaactcctgacctcaggtggtccacccactttggcctcccgaagtgctggggcgtgagccaccgcgtcggccccaggtaaataatttctatgttctgtactttgaaaatctgatttagtttcttcttcctttttttaagagacggggtcttggccgggcgcagtggctcaggcctgtaatcccagcactttgggaggccgaggcgggtggatcacgaggtcaggggttcgagaccaccctgaccaacatgatgaaaccctatctctactaaaaatacaagaattagctgggcggggtggcaggcgcctgtaatcccagctactcaggaggctgaggcaggagaattgcttgaaccccggaggcggaggttgcagtgagctgagatagtgccattgccctccagcctgggcgacagagcgagacttcgtctcaaaaaaaaaaaaacaacaacaacaacaaaaaaaaacagggtcttgctttgtcacttagctggagtgcagtagcgggattctggttcactgcagtcttggtctgagctcaaacagagccttcctcccagctttccaagtagcaaggaccatagatgagtgacagcacgcccagctgatttttaaactttttgtaaatacagggtcttgctacattgcccaggctggtctcaaactcctggcctcaggtgatcctcctgccttggcctcccaaagtgccaggataacagtcatgagccaccatgcccaacccatgttgattttataatgtctttttagaaaatctaattttcaggctgggtgaggtggctcacaggtgtggcagtgcacagctgtagtcccagatacacaagaggctagggtggaagaatcacttgagtccaggagttagaggctgcggtgagctatgatcaagccactgtactccagcgtggatgacacagcaagactctgtctcaaaaaataaataaaatcaaaacgaatacagaggagttgttttatcatacgtactgtttattaggcctctccgagagtcaggcccagcctggccccctggtagctcacatactgaccaagcccacaggagacaaattggtgcctctggtcaacccttccccctcctctcacttcctacccccacctctgccaccttgaccctgaagaaccccacagagcatctgtcatttgtacttatgggcatcttacgtaggtctaaactcccaggattacaaacctcagtgctgcagcaaggaacaaggcatgtggattggtagtctatgacatcattcaatctcttcaatttatttatttatttttttaatacatattttgttattatactttaagttctagggtacatgtgcacaacgtgcaggtttgttacatatgtatacatgtgccgtgttggtgtgaatctcttcaatttatgacacttcaatctcctgctcttctttaataaaagaagctttacaacaggtactagcaggacaataaagaacagccagccaagtgtcacatacctgggatagggtggccaggcccttgcacggggcccggcagggagagtagcccctgactgctagcactactgcttctggagggtctccagtgcttctccacacttgtgggccttccagattagggaagacaatcacagttctgggggtgaattttgccatttggctgctgaacacatatggctgaccagggagggatgtaatgaggaaatgaggttctcagacaccccacctgagagctgctgttctggccaattcagaagcctcctgctataatgcctcgctgctggcgacagagtggatactgcagtgtgaggcagagaggaggtgggtttagaggaaaaaggacttttatgactgctaggagtttggtggtgataaaactaggataaggaattcctgtttcatgcctcaagaggtgaggaaagagggaaagacctctcttcttgaatctgaaaaatagtctgtttttgtttttttagatggggactcgctttgttacccagtggtataatcttggctcattgcaacctccgcttcctgggctcaagctaacctcccacctcagcctcccaagtagctgggaccacaggtgcac

SEQ ID NO: 16322 - DNA, 2300 bp, Homo sapien
tttgctattctaggagccatgtctgaccaggacgtttggaagatcatatccatgccagaggctcttgtgaggagatgagttggtaaagagagaggctgggatgaagatgctgccaggagtgggcgtgtttgggactggcagctccgcccgagttctggtcccactgctgagggcagaagggttcactgttgaggccctgtgggggaagactgaggaggaggcgaagcagcttgctgaggagatgaacatcgccttctacaccagccggactgatgacatcttgctgcatcaagatgtggatctggtgtgcatcagcatcccccctccactcacccggcagatatccgtgaaggctctaggtacgcccggcaggccacagcaggggcagatcatgtctctccctctgggcagtcctctgagggtcactcctctcctctgagctctccttcctgggctcgcatctgcagggaggagaactctgggacatcacttgtccctgaagcagtgcttggggagggcatgaaaaaagacatagcctaacctacctcccatctgtaaatccctgaacagaaattaaggaaatactctaagagacagccatcaaggggctggagatggttgcatctcagtcaacataaagtttgcctctgtgaagttagaggtcagagccctgggtggcggggaattggttgtgactagtgtgtttgttctcccatttctggggcacacagcaccacaggaaggagaggctgtgtagcaaggctaccatttcccatgttttgtcagcgtttgactatagtgagcacacacccttcctgccaaactgcagtcttgtattgccggaggacaggaaggctctgccagcattgggcttccctgacaggatccgtcgacagcctgcttacatgacatctccactcccttgggaagttttgggcttggtaacctcttgcccctgactgggcatggcctgctgagctgttctcctacagttcccgttggtcttctatttccagtcaactggagtcaacttcttctctttatctaatataaatcagaacctagtttactaagtaaacaaaccagtaaacattcagccagcaatttttattttattttgagacagagtttccctcttgttgcccaggctggagttcaatggcgcaatcccggctcactgcaaccttcgcctcccaggttcaagtgattctcctgcctcagcctcccaagtagctgggattacaggtgcctgccaccacacccagctaatttttgtatttttagtagagacagggtttcaccacattggccaggctggtctcgaactcctgacctcaggtgatccatccgcctcggcctcccaaagtgctgggattacaggtgtgagccaccatgcccagcatttttttaaaattattattattattttattttatttttttagatggagtctcactctgttgcccaggctggagtgtgcattggtgcaatctcagctcactgcaacctccacctcccaggttcaagcgatactcctgcctcggctttgcaagtagccaggactacaggcatgtgccaccacgcccagctaatttttgtctttttagtacagatggggttttgttatgttggccaggctggtctcgggctcctgacctcaggtgatccacctgccttggccgcctcccaaagtgctgggattacaggcaggagccaccacacccagcctcaattatttttttaatgcctcctgtgtgccagtcactgtcctgatgtcattttggacattcaaagctgtgttagattggacccctccctgtcttcagattttatagtccaattgaggcaactagaaataacacacattacaaggtagatgacagaagacatagtcacaattcaactagcacatacttacttgactgagtaactgttttatgtgaggtaataggagccaagtgtctccttgatgcagccgaagatctctaggtcgaggaaccggtgccatgaggttgtcctccactcttcctgaccactgccatggtggcaaacctcagggtctgctacttatctcctccctcattctgaggaatgtcataggaaggtgtctgtcacctctggctcagtgggtagggaaggataaatgttctttgaagtgagaaagaacttcagtctgtccggttgtcaatttggagcaagtaagttttggccttattgtttgtttcttccagagagctctctctgaggatgtgtgacattggagttattcattcattggtcaccaaatgcttgggaggtca

SEQ ID NO: 16323 - DNA, 2300 bp, Homo sapien
ttggccccccaaattgctgagattgcagacatgagccaccacacccagcctaataaaatcttttttttttctttttttcttttttttttttttttttgagacggagtcttgctctgtcgcccaggctggagtgcattggcgcgatctcacctcactgcaggctccgcctcctgggttcacgccattctcctgcctcagcctcccgagtagctgggactacaggcacccaccaccacaactggctaattttttgtattttttagtagagacagggtttcactgtgttagtgaggatggtctctatctcctgacctcgtgatccgcccgcctcggcctcccaaagtgctgggattacaggcatgagccaccgcacccggcctaataaaatctctttaagcatactttttcttttagccagtttgatgaaaaaagttttttggtatttttttttctagtgagcattttcctatgtttgctaccatgaaaattttaattatacttaatctgtatagcaattagttctttcactttcctcttgaactggtttttgttttccattcttctttttcttttcttttttttttttttttgtgacggagtctcattctgtcacacacgctggagtgcagtggcacaatctcagatcactgcaactttcacctcccaggttcaagtgattctcctgcctcagcccctcgagtagctgagaatacaggcttgcaccaccacacctggctaactttttatatttttggtagagacggggtttcaccacgttggccaggctggtctcgaactcctgacctcaagcgatccacccacgtcagcctcccaaagtgctgagattacaggcatgagccaccacgcccggcctccagtctttctttctttctttcttttttggatagagtctcactcttgtcgcccaggctggagtgcagtggtgtgatcttggctcactgcaatctctgcctcctgggttcaaatgattctccttcctcagcttcctgaagagctgggattacaggcatctgccaccacacctggctagtttttttttttgtatttttagcagagatggggtttggccatgttgacccggctggttttgaactccttacctcaggtgatccgcccgccttggcctcccaaagtgctgggattacaggtgtgagccactgtgcctggcctccactcttcttttctttgtcatatatagaatcatgaacttttatagcaagaaggaaccttaaagatcaatcactccccttattatacatttaaggccctgaaagttgaatcttttgaccagggttacacagaaagttaagtagcagaacagagatttaaactcaactttattcattttccgtttttcctcttatccttcagtctccatggaagaagaagattctgcagtgtttcatcttggaacagtatttcttttttcttttgagacaaggtcttgcactgttgcccaggctggagtgcagtagcacaatcatagcttactatagttgtgaactcctaggttcatgtgatcctttcacctcagcctcccaggtagctaggactacaacaagcgcatgccaccacatctggctattttttaatatatatattttttaatagagatgacatctcgccgtgttgcccaggctactctcaaactcctggcctcaagtgatcttcccacctcggcctcctgaaatgctggggttacaggcatgcatgagccaccatgcctggcctcgagccctatttcatttgtgcttttctggcagagaacttgttacttccttatttgaaagtagccttcgcaccactgcactccagcttgggcaacagagcgagactccatctcaaaaaaaaaagaaagtagcctcagctgagtgtcctctccagtaataaccagtgtaatgtttgctattctaggagccatgtctgaccaggacgtttggaagatcatatccatgccagaggctcttgtgaggagatgagttggtaaagagagaggctgggatgaagatgctgccaggagtgggcgtgtttgggactggcagctccgcccgagttctggtcccactgctgagggcagaagggttcactgttgaggccctgtgggggaagactgaggaggaggcgaagcagcttgctgaggagatgaacatcgccttctacaccagccggactgatgacatcttgctgcatcaagatgtggatctggtgtgcatcagcatcccccctccactcacccggcagatatccgtgaaggctctaggtacgcccggcaggccaca

SEQ ID NO: 16324 - DNA, 2300 bp, Homo sapien
aggagcaagagcttgtttcaaaatcctcgcaccgtttactgtgttaacatggaaagttaacctctttctccgagactgtttccccatccttaaaacatggtaaatccttctgccccgtggaggtagaggattatggcagatatacagcagtgtttggcacacagggatacacacagtacacatgagcatccttcctccatgaggatgcccagtggtgtgactggcccactcctgcctgccctgtccccgaggcaccagggttttatgcagaggagggatacggtagatcatgctggtgtccacctgaaggtggtactggagacaaattggagcaaaagaacccaggtaggaggctgcaaagagggcaggtttgagaaagatttaggagagaattggaggtacaagatgaataactgaatgtgagggaaataggagaagcaagagacaaggcaaatgcagactttggttgggggtgatgggatggataatagtaccacaaaataacacagaacagaagggggcaggcagtggctaaaagtcactggaattgggaggtttgccagtaaattaggggaggtttgccagtaaaaaagtcactggaattgggaggtggtccagtaaattaggaaaactgtcttatggatgttcacagtgatcgccaccagctaattaaaagctcaatcctgtgttaaaatgtgttgcttaaccctgcactttccaaacttaagttactacagactgtgtcactcagcagaatcttacaggactattactctatagaatgctcttagggaagaggtagcataaaggggaaaatatgggttttagattaagcataaagtcctggttctatataagtaaagccagagtaggctcatttccccctagactagtggttctcaactgggaatgattttgctcccagggagacacttggcaatgtctggagatatttttggtagtcacaactgggcttggggtgctactggcatctactgggtagagccagggatgctgccaaacatcctacaatgcagacagctccccccacccctgcccaacaaagaattatcaggtccaaaatgtcaatagtgccactgttgagaaatcctactcaagaagagtggaactccgaacaatgactaagaaacagatcaaacaggcacattttgactctgccttccttctgcctggctctagaggatccaggagagaaaggataaaatcccatcagaagagggggggtttaggggttacaacttctcatcactttggaagccttccatgctcctcacagaggtggtaggagtcctgtctccgctcaaagcagggatagctctgctgctagttagcatatctcagtaggaactgcctcacgcttaggtcagctgacatattctgtcaccacaggctgctctggaatgatggctgggagatcatcctaatgccagctgagtggggatcttgatactcagcaggagggtcagacaagcagggacgggggctccccatgcagatacaaaccccaatcacatttcctacacaggcagttttattctaaggtctaacggcttccttactctagcggatagtttgctatttggtggggcataggcttcagtaaagaggccaaggggactgaggttacagtcttgaagagcactgatatttaaggaacaatcaaaaaacatccagaggaagaggagcccagacaggcacctgagaaaacggaaaaacgagtcactgggggtcagggagccaggaagtccgacgagttcgagagaactggccttctgcagatatgtccttgtccaacacgaaaccgtctttcattccaggacaactgaggctacccacagctaccaaaacctggtccctgacgccggtcagcggaccggagagaagccaagcttaggaaactgccgcctccgccgccggaaatgaataacctgagcctcctagccaggctgcttaagctccgcccccaaaaagcgagcatgcgcagctcccggctacggcccctcccagcgcaggcccatccccgttatggagcatgcgcagtcctcctgccgtcccgcccctccctttccagagcccccagttccttagaaaccaggcggcgcgttcccggtggcggcgccctggactcccgggcccgcgcatccccgccagccttccttaaggcggatgggtggcccccgagaccccgtcggacccatggtttccagtgcagcgcggagtgggcgatgccagcgtgccaggtgagaggcggccaccggtggcgggtgagggcgaaagag

SEQ ID NO: 16325 - DNA, 2300 bp, Homo sapien
gcaattcttctacctcagtctcctgagtagctgggactgtaggcatgcaccaccacacctggctaattttttgtattttttgtggggacagggtttcgccatgttgcccaggttggtctcaaacttctgggctcaagtgattttcctgcctcggcctcccaaagtgttgagattacaggcatgagccaccacacgcagccaataattttttttttttttttttttttttgagatggagtctcgctttgtcgcccaggctgtagtgcagtggcgcaatctcggctcactgcaagctccgcctcctgggttcaagccattctcctgcctcagcctcctgagtagctgggactacaggtgcccgccactacgcccgggcgtaatttttttttgtatttttttagtagagatggcattccaccgcattagccaggatggtcttgatctcctgaccttgtgatccgcccgcctcagcctcccaaagtgctgggattacaggcatgagccaccacgcctggccatatttttaaagtagagatgagatcttgcaatgttggccaggctggtcttgaactcctggcctcaagtgatcctcccgccttgtcctcccaaagttctgggatgacagtcatgagccatcacgcccagctgataattattatttatactataatattatgtaatatatcatttcataataagaagtcttatttatggacttcttcctgccaggtactttatgtgtattatctcatttaccccttaaagcttgagggaacacacacccaaacttctgtgccttccacctgacaacccttcagacatttgtgtttagagttacagtaatgacatcagacacatgtacacaccaaggtattcactcctgtacacatcagatttgagggttcagcctctgctttatatgtgtacacacatgtgccactgttcagccagcttctgctggggttaaatggctacagggagtcagacttctccagaccatttcccaatgactgtgttcccattggccctgctgctgcctatctctgcctggcaaaatcagcctgattgcttggcttcttgggcccctgatttgtggtgtatcatggtgtaactctgggttgtgagttagcttcccatcactcactcactagagctggaactgctgagggcaggttcacctggagggctgaaatgcttctctcaggtacatggcacagcctgcagaggggctcctgtgtctgtagaaggtgtgcatgtggcatgcatcctgtctggaaatctgccagattacctggctagctgcagtttcgggaagctatcagtgagactattggcctcttaggcttgctgcatttcccaaagaggcagccacctgtgaggagtgtgcctgtgtgtgtacttctgttatcatactcgcttacttgtgggcagcatgtctcagataaactgcagccactcctctgaactgtgggcacagatgtggtgaccagcccctccgaagcctgacttcatgaccgtggggcaccatgggggaagttttcattttgtttcagcccctttattctcattctgtggaggttacacctccaggacgtgtttagggagacctctgggggaggtaatctgtcctgagtccattgggtagtcagtgagaagtgcagttcttgagtgtcacctgaagctcttcctttcttctagcatggtttcatcttacctcgtgcatcatgggtattgtgccacagccacggcttttgctcgaatgactgaaaccccgattcaggaagaacaggcgtccataaagaacagacaaagtaaggtttattctactttcccctttcccttcctcacctgtccctaactctgctctctggctcatgtcaaccctggttaacctgtcaggagtccattcagctctggtcctcatgaccagcttgcagctcgaggccatgttcctgtcccaccttcaagatggcactgcccagatggacagttggcaggatggagacgtctcagggcagcctccctaatgcacattctgaaggctgggcgcaggccaggccctggcatggctggttccattcctccatttcctccctgcttgtttccttccccctgaatcctggattcctctcaacctcctgttcatggtcttccaggaaggctgtttgcctgccttagtagttctgcttattcctagccagagaggggactgaagtggtcagatagggcaaagccagtgctcaatggctgctgtgggggcactaccctctgctccccaccactggtcctgccctttgcag

SEQ ID NO: 16326 - DNA, 2300 bp, Homo sapien
cttagcctcccaaattgctgggattacaggcgtgagccaccgtgcctggctcctaatgctgactttaatgaggaccttcctaaagttgatccaactagtagtgttcaagtccttggactgaaaaacaagtttatgagcagcaaggtcacctgattctgatcatgtgtatgctgtttaccctgagatgacaggccggtggccacagaagctttcatgaatgctgcaaagactctactatctctttgaaggctaccagggcctccacatgactaaatgccataaaaaagaacctcatgaatacagcaagaatgtgaaaggaaggaagtcacaaaaacaccacatgctcatgagggaaactccattctggacactaaatttttaaagtaaacttgttacttgtttgcctaaccttctaggtatcaaattacatcatcactaaaaataatccctgctttacccccaacacacccactggccatcaagatctgctgcttagaccagaccatgcccacagtcaggaaataatggcagcccagacccatgcggctccccagctcacatcagcaacaagtgccagccaaaggacctgaactctgaccacagggatcagctccatgatcagggaaagagggtggtcatgaagggcttacccatctcttcctttgctgacaatcttcacttcaaagtaataaatgccacaggcagcaggtatggggtgggtggcacgcactgaggccgcatctttgtgatttttgccatgacctaacaggagagggcaagtaagaaatttcagcagaaggaaatgcaaatggaagcctcatttttctctgcaactcctccatgacaactccactcctctgtggccagaggacgcacttacacaggccgaggaatcattagacaactgaataaacacttaaaccttccacctttgcctcacctcctcctgagaacagcagtcctgcctgagacactgcccatacaaacaaaacaagggtagaggcaatgtgagagatactcaagtgctgctggcagcctctctagaatccaggcagcccacctgggaggccaggggaagaaggatgaggccgacctggaagacaccccccaaactctagcacggaaccccaggctcagtctaggatgcctggcaggtggggaagcccatgagtctcacgctaatggtaggtatgtgaccacccctttcttctaagcagtggcgaaaggtcccgctgccgttggcgccagcctaggataagcacggaggccctggagtggaaggtccggcccagcactgggtttggacacctgttgcggttctcttgacggcaggtgtctcaggacagagaacaggcagtcagccctcggcctgttcagcctcaccaccctggacatcctgaaagggccaagccctaacttggagcacctaggcagggaaagggaggtgatagggcgggggcctggcagcagagccaccccacggacgctctagccttaattccccccagcctgacgggccgatacctttgtagtggacgcggaggttgccctgggagagaccaatgtagttgtatttgtccttggggctccaggagcgcggcagcggagtctcttgctggttgaccgcgggatacaggcgctgcaagcgccggctcagctcctgctccccaggggacggcagcccgcccccagcgcccccgccggaggagtccccaggctgcgggttcccagctcccgggtctgccgtcgctgccgccatcttggagggagctactattgtgtcactgggggcggggaggagcgggaccagatccgccccgctcagccaatggcccgtgagcctccctgggccgcagggaaaccgagtccgagtccggcacccctctttggacactgacacgccttaccacatttcgaactccataccccacaatgcagagctctcgagaggcggagcaactcgggctggtagagaattctgggagatgtagtataaccgtcctcagccataagcctgtcccatcgagacgtcgggacaccgaaaactaccattcccgccggcaaagcggctccggcctctcagcacacttccctccccatggcctctgttcatccccctgcctcagttctggtacctggggtcaaatcggctgtagtggttgactctcagggcacccgctgccgggtcccagtccacctttgctactttgtcctactcccagcccgcgggcgctaggctcgggggcgtggcgcatccctgactccgcccccgccgcgggggggcctctggggcctggtcg

SEQ ID NO: 16327 - DNA, 2300 bp, Homo sapien
ctttttttgagacggagtctcactctgtcgcccaggctagagtgcagtggcgtgatcttggctcactgcaacctctgccctctgcctccctggttcaagcgattctcctgcctcagcctcccaagtagctgggaatacaggtgcctgccaccatgcccggctaaattttttttttttttgagacgtagtctcgctctgttgcccaggctggagtgcagtggcaggatctcggctcactgcaagctctgcctcccaggttcatgccattctcctgcctcagcctcccgagtagctgggactacaggtgcccacccccatgcctggctaattttttgtattttgtagagaccgggtttcaccacgttagccaggatggtctcgatctcctgacctagtgatccccccgcctcggcctcccaaagtgctgggattataggcgtgagccaccgtgcctggcctcttaggggcttttgtaggcttttctctgtcaaggcagcagaccctgaagagtttaggtgggattgggtggtgtttttttttttttcccccactgggaatgagtagaaggggggacactacattcattcaacacttactgggtgcctattacatacaagagctgtgtcaagagcttcacatattctgcctaaatgttcccaacaatgtttgtggggtgggctgtatcattcccatgtttgagatatataagctgaggcctggaacttgaagggccctgtctgaagtcccaaaactagaaaacgatttagccaaaatttttgttttaatccgtatgtatggctctccaggctgatggagctggtcatattttgcagtacccagaggctatacacctgagtacaggcagaagctacccagaggatgatctctccaggcttctaaagtatttctttacttgttcaatggtaatattactactttatacagttgttgtgaggattaaatatggtacgtaggccgggtgtgggggttcacgcttgtaatcccagtttgagaggtcgaagtgggagggtcgcttgagtctaggagttcgaaaccagcctgggcaacgtggtgaaacctcgtctctacaaaaaacaaacgaacaaagaaacacccaaaaattagccaagcgtagtggcgcatgcctgtagtcccagctactcgggaggctgaggtagaaggatcgcttgagcccgggaggtcgaggctgcagtgagccgtagtagtgccactgcactccagcctgggcgacagaacgagatcttgtctcaaaaataaaatatttaaaaatgtggtatataaagcatttggcatatagtacattcaatacaagctggttgttactagtaatgataaagtgcgcctaccgttttgctagcacgtaacgtcttcactgggctaaatcagcccgattctaaccattgactctgtggtgctggagccctagatcaatggtcagaggccagcaggaggtgcagaggtccggatcaagtgccatttccctctctagaagtactcaaaccctcatctctgccctcatccctgccagcgcctacctcgacgcggacgagaagctgtggtaccgcgactgctggcaggccatgacccacgggcaggcgggcaatcagcacccgcggcctgggaagctgtggtagcgtacagccggtcgccatggcgaccaggccccagaggcccccccgcggcgggggcggagtcagggatgcgccacgcccccgagcctagcgcccgcgggctgggagtaggacaaagtagcaaaggtggactgggacccggcagcgggtgccctgagagtcaaccactacagccgatttgaccccaggtaccagaactgaggcagggggatgaacagaggccatggggagggaagtgtgctgagaggccggagccgctttgccggcgggaatggtagttttcggtgtcccgacgtctcgatgggacaggcttatggctgaggacggttatactacatctcccagaattctctaccagcccgagttgctccgcctctcgagagctctgcattgtggggtatggagttcgaaatgtggtaaggcgtgtcagtgtccaaagaggggtgccggactcggactcggtttccctgcggcccagggaggctcacgggccattggctgagcggggcggatctggtcccgctcctccccgcccccagtgacacaatagtagctccctccaagatggcggcagcgacggcagacccgggagctgggaacccgcagcctggggactcctccggcgggggcgctgggggcgggctgccg

SEQ ID NO: 16328 - DNA, 2300 bp, Homo sapien
gtagagatgggatttcaccatgttggccaggctggtcttgaacacctgacctcaaatgatccacccacgtccacctcccaaactgctgggattacaggcgtaagccaccgcgaccggcctgaagtttaaataagaatgagctgagtgtggtggcgggtgcctctaattccagctactcaggaggctgaggcagaagaatcacttgaatctgggaggcggaggttgcagtgagccgagattgcaccactgcactccagcctgggtgacagagtaaaactctgtctgaaagcaaaacaaaaaaaattagatgtgcatctgggcgtggtagctcatgcctgtaatcccagcactttgggaagccaaggcgggcagatcgcttgagcccaggagttcgagatgagcctgagcaacatagtgagactttgcctctatttttatttatttatttatttctggtttcaaactcctgacctcaggtgatctgcctgcctcagcctcccaaagtgctgggattacaggcgtgagccactgtacctagccaatttttttttttttcttgagacagagtctgactctgttgcccaggctggagtgcaatggcatgatctcggctcactgcagcctccgactcccaggttcaagcaattctcttgcctcagcctcctgagtagctgggactacaggtgcacgctaccgtgcctggctaatttttgtatttttagtagagatagagtttcaccatgttggccaggatggtctcgatctcctgacctcgtgatctgcccgcctcagccttccaaagtgctgggattacgggtgtgagccaccgtgcccggcctatttttttttaaataaataaaaaaaaatgagatatgcaaaataccatgtaaactgcaatgaactgcatagatgttcattatgacagtagaacaggaaaagcctcttagaacagccatcctaggaaggcatttggggaccaacaggaagggctactgtgggcaggcaggctcaggtggaacaaaaggaagaagtaattccaacaatccatggggtgggggtgtgtgatttatgttgccagatagatcttgtgttcactcctcttgcttgctggtgattttgggcatgccgcttaacatctctgaacctcagtgtctttgcttataaaagtaggattaggactacccaaactccagggaagttgagagccctaatgtgaacccagttgagaaactctgccctgtaatgctgctcagctatagtccatggagcagtaatattccaaaccctagtcctctattgcttctcaacattggacaagtgtgagcaaaacatatggattaagcagtcggtgaggagaaggaagagtgtctgcccagatgagcttgggtgtgagacagtcttggagaccaacaagatacaacagatcaaccccaagtgctcactgggttaaatcaataccttcttatcaagactaatatattattcgccgtgcagtggctcaagcctgtaatcccagcactttgggagggagaggtgggcaaatcacgaggtcaggagttcaagaccagcctggccaacatagtgaaaccctgtctctactaaaaaaatacaaaaattagccgggtgtggtggcgggcacctgtagtcccagctactcgggaggctgaggcaggagaatctcttgaacctgggagtgggaggttgcagtgagccgagatggagccactgcactacagcttgggcaacacagagagactctgtctcaaaaaaaaaaaaaaaaaaaaaaagactaatcaattctccaaactctgttcttgctcatgctggaagcaccaggaaaggcaaggtaagcaagaaaattggggaattctataaattctgagaagctgttgaatggaaaagttcagtaggtaacagatgttgttagttttgaatatcaaaggagacaacattataaaacagacttaaaacaaggcaaaccaaacacctgctagggcctgtacacttatccaaaaagcttgggcttgggcgtgatggctcacacctgtaatcccagcactttgggaggccgaggtgagcagatcatgaggtcaggagatcggccgggcgcggtggctcacgcctgtaatcccagctctcagggaggctaagaggcgggaggatagcttgagcccaggagttcgagacctgcctgggcaatatagcgagaccccgttctccagaaaaaggaaaaaaaaaaaacaaaagacatgaggtcaggagatcgagaccatcctggctaacacggtgaaaccctgtct

SEQ ID NO: 16329 - DNA, 2300 bp, Homo sapien
aatacaaaagaactgggcatggtggcaggccagctactcgggagtctgaggcaggagaattgcttgaactcaagaggcagagctgcagtgagcagagatcgtgctactgtactgcactccagcttgggcaactccagcttggcaactccatctcaaataaataaataaatacatacatataaacatacatacataaataattacatccattttgatagtcttttttttttttttttgagatggagtttcactcttgtccccgtggctggagtgcaaggggtcgatcccagctcactgcaacctctgcctcccgagttcaagcgattctcctgcctcagcctcccgagtaactgggaatacaggcgtgtgccaccatgcccggctaatttttgtatttttagtagagatggagtttcaccatgttggccaggctggtctcaaattcctgacctcaagtgatctgcccaccttggcctcaaagtgctaaaagtcgcacatcttggcctcccaaactgctgggattacgggcatgagccactgtgcccggccagaatagctaatctttactgagttcctagcaagtaccagggtccatgtgaagcacacattatgctttccctctttttttttttttttttttgagacagagttttgttcttgttgtccaggctggagtgcaatggtgcaatctcagctcaccgcaacctccgcttcccgggttcaagggattctcctgcctcagcctcctgagtagctgggactataagcacatgccaccacacctggctaaattttttttttttttttttttttgagactgagtctcgctctgtcgccaggctggagtgcagtggcgcaatcttggctcactgcaaactccgcctcctgggttcatgccattctcctgcctcagcctccagagtagctgggactacaggtgtccgacaccacgcccggctaattttttgtatttttagtagagacggggtttcactgtgttaaccaggatggtctcgatctcctgacctcgtgatccatccgccttggccttgcaaagtgctgggattacaggcgtgagccaccatgcccggcctaatttttttttgtatttttagtagagacggggtttcaccgtgttagccaggatagtctcgatctcctgacctcgtgatccacccacctcagcctccgaaagtgctgggaattacaggcgtgagccaccgcgcccgactatgctttctcactgcatcctcacatcaatacactgtgacaaagactaccatcatccctattttacagacgtgagaactaaggctcagagaagttgtgacatagctaataagggacatttgagacttaacccgagtcttctctaactcaagaacccacagtcttaattatgaaccatgttgagagatgtttgtaaaacacatcagggctggccaggcacagtggttcacgcctgtaatcccagcactttgggaggccaaagtgggtggatcacgaggttaagagttcaagaccagcctggccaagatggtgaaaccacgtctctactaaaaatacaaaaattagatgggtgtggtggtgggtgcttgtaatctcaactattcgggaggctgaggcagagaacagcttgaacctgggaggcgaaggttgcagtgagccaagatcgtgccaccacactccagcctgggcaacagagcaagactgtctcaaaaaaaaaaagtcaggactgggggaggagagatggagagaaacattaggaaggggagcaatgttgccatggcaaccccacctgtacctccctgcagactggtcagttctccatgggtgggcacctgtccccatggcccacatacaccagtggccagaccattttgcaaaatcgaaaaccctgttcagatgactaccggaagcgagtagggtaagccagggtcagtcccatggtgggtgagctggcatgggccaggctttgggccaggagacagggcaggggcgtgtgttgccccagactgagggcacaagggccccgtgggggtgctggccacatatcagccactgtcccctgcaggagctgccagcagcacccctttcgcactgccaagccccagtacttggaggaactggaaaactacctacgcaaggagctcctcctgctggacctgggcacagattccacccaggaactaaggctgcaggtcagagccacagaagaaacttggggagggcgggggaagggtgggaagaagcttcacctaccggccgggcacagtggctcacgcctgtaatctcagcac

SEQ ID NO: 16330 - DNA, 2300 bp, Homo sapien
atgctgatgcctcttccctcaccaggtgctgctctgggtgtttcctgttctgggagtgggtggaggagagacttggggagggaggtgctgcctgggatggaatctgcccatactacttcctaccagttttagcctcacagcatctgttctaagagatgagagccccagggcagatggagggatctgtgggcaaactgggtctcaggtacctgactttcctctgtgcctccccacctcaccagatccctcaacctgacctttgccacacctcttcagccacagtcagtgcagaggcctggcttggcccgcagacctccagcccgccgagctgtagacgtgggtgcctttttgcgggatctgcgagatacttccctggctcctccaagtaaggttgggttttcccctgctggcctttggggaaagctctccccgctatgacagataggaggtgatgctgagtcagggttgcacccctctcggtggggtcaaggacagcgagcaactctggtcagtgggtctacaaggaatttctgcttgctttctacagggggcctctttccttggtccctcggtgtctcccagggccccatatccttagactatagggctggaggttgtaaaggggtgtggtgtggtggccaaaacttgttgagaggggccaggtttcaggatcagctggccaattcaaactgacctgggagcctgattgcagaaaacaagttcaccagagtaagaagagggtttgggaagacggagcagaacaagcagcgaagaggtattttaagtgggcagctggtgggcgggcagctataggggcctgggactgccaggcagaggaacaggaaggtaagcaaggagggctgtaggcgataaggcctcgcgtgctaggtcgtcttctttctctgaaggccactcagggtggacccatgcagcccactgtccaggccctggcaacgctgagtagcagccggtgggcctggaatacgctgagagccagctggcccctgatctccaggtgacagcctcagaacctgttactactctgcccacagacattgtgttggaggacacccagccgttctctcagcccatggttggctcccccaacgtgtatcactccctgccctgcacgcctcacactggggctgaagacgctgagcaggctgccggtcgcaagacacagagcagtgggcctgggctgcagaagaatagtgagtgtgtggcactggtggcctggagccaaatttagcttgggtgagagttgacaatggtagttttccttcctcaagcccctctgtgcccctagagcaccctggctgtggctgcctccttcatccaagagcagagtccatgttgggccaggagacttcagatccatgtcctggtgctgcctctggctttgtctttcctcagtgggcaggactgggtctgctggtccatctttacccttctctgagctatgcagccttggcctgctgcgtctccggcctgtattctctccccttcactcaggccctgggaaaccagcccagtttctggcaggagaggcagaggaggtcaatgcctttgctctgggcttcctgagcaccagcagtggtgtctctggagaagatgaagtagagcccttacacgatggagttgaagaggcagagaaaaagatggaagaagaaggtgtgagtgtgagtgaaatggaggcaacaggagcacaaggacccagcagggtagaagaggctgagggacacacagaggtgacagaagcagagggatcccaggggactgctgaggctgacgggccaggagcatcttcaggggatgaggatgcctctggcagggcaggtaagaggcccagtgcagggagtgactggtgacagctgtgttcaggccctagcacacagaaaggccttgtctgggttgtgtttccgggcactggtggtggtagggggtcagggagacactgaggggcacctgcttggctggagctaggtggggcccaccagaaacaggacagaaatactgtggctgtgctggcctgggtgagatggtcaggcctggaatccctgtgaccccacccttcttctttgtagcaagtccagagtcggcctccagcacccctgagtctctccaggccaggcgacatcatcagtttcttgagccagccccagcgcctggtgctgcagtgtaagatcccacaaccccattcctcatgggcctcttgggaagggagcattgggtatgctgtgtacatagggtcctcccccttcctacgggtatgcagatgattacccagcagggcagcttca

SEQ ID NO: 16331 - DNA, 2300 bp, Homo sapien
tcacgcctgtaatcccagcactttgggaggctgaggcaggcggatcatgaggagttcgagaccagcatgaccaaaatggtgaaaccccgtctctatacaaaaattagctgggcgtggtggtgccagcctgtaatcccagctgctcaggaggctgaggcaggagaacatctcaaaaaaaaaacaaaaacaaaaaaaaaactgcatttaggtagtaaccatggaaatatgtctgcaaaaggatagcaaattgagtcagataacacagatatcagatctaaatgacaaggaatatcgatagctttttctctacagttctcttattttgagaagcaagaatctaattttttgcttaattttttttttccgagatggagtcttgcttagtcgcccaagctggagtagtgtggctcgatctcagctctgcaacctctgcctcccagggttcaagcaattctcctgcctcagtttccagagtagctggaattataggtgagtgccactacacccagctaatttttgtgtttttagtagagacaggtttaaccatgttggccagactggtcttgaactcctgacctcaagtgatccgcccgcctcagcctcccaaagtgctgggattacaggcatgagccaccatgcctggacttcttggctcagcttttttaacacaagcacaaatatgcccatgcttgtctcaggtatctgataatttacacttgatctcagtgcagattctgggaaagtgaactccacggaagactcagaaaccaagttctaattcagttgccatgaaaacttaaggtgagaggattgtcaaccagtgaaaaatacggaggaaaacactaacagaatatggtaagcatctctagcattaaaaatttttaatggccgggcgcagtggctcacacctgtaatcccagcactttgggaggccgaggcaggcggatcacttgaggtcaggagtttgacaccagcctgaccaacatggagaaaccctgtctctacttaaaatacaaaattagccgggtgtggtggtgcatgcctgtaatcccagctactcgggaggctgaggcaggagaatcgcttgaacccaggaggtggaggttgcggtgagccgagattgtgccattgcactccagcctgggcaacaagagcaaaactctgtctcaaaaaaaaccccaatttttatttatttattttgctagatgtggtggtaatggggaaaacattaatagaacttttgagagccggaattcatctcaaaattgctcgtgtttggagatcataataacatcagtgctggatcacaaacagcctattagccttggagcctgcttcctggtctcttctgatagagataggccctatagacagatttgcaaagcagatcttttaaaaatgcttttattattttttgatacagggtctctctctgttgcccaggctggagtgcgatcacgactcacttaagtcttgaactcctgggctcaagcaatgctcctgcctcagcctccccattatctgggactacaggcgcgcaccaccatgactgaataatttatttttattttttgtagagaccagggggcaggggtctcactgtgttgcccaggctgctctcgaactcctgagctcaagctatcctcccgcctcggtgtcctaaagtattggaattacaggcgtgaaccaccgcctagcctgcaaatgcaaatctaaccaggtcatatgtaggataaaaatctttttcctggcccaagtgtctctcctcatcttcggagagggagatgggaatgagagagccttctaataatagcaattgctagttaccagtgccctggcttatcgtgtgttagactctgagttaaacatcaactccttgaatcattacaagctccttatcaggtgggtatcaacctcaatttacagatgaagaagccaagacttgggctgcttgcattacattaaccgaggtttacccgcagcgaggctgcctccaaagcatccggagtttgcaaccatcactgtccaccccgcgagctgcgatagtgcgagaactacaattcccgtggggctgtgcgggagcatcgcgagagttacattaactgtggcggcgggaaggcggagcctgcagctggctgggcggttaggagggcccggggccgagacgatggctgaccacaaccctgacagcgactccacgccgcgcacgctgctgcgacgcgtgctggatacagcggacccgcgcaccccgcggcgaccccggagtgctcgggctgggtatgtgagggggctccccgagt

SEQ ID NO: 16332 - DNA, 2300 bp, Homo sapien
tgggaggctgaggcaggagaatggcatgaacccgggaggcagagcttgcagtgagctgagatcgcgccactgccctccagcctgggcaacagagcgagactccgtctcaaaataaaaaaagaaaaaaaagaaataatatatattaggtttctatttcatgcctgtgatctgctatcaggagagaaaaaaggacaagaaaaattgggaggtgaccacgatcatgtcttttgtgggaatatgcatggagctgggggccattatccttagcaaactaatgcaggaacagaaaaccaaataccacatattctcacaagtgtgagttaaatgatgagaactcatgaacacaaagaagacaacaacagacactggggtctaattgcggggggcgggaggagggagaggaacagaaaagataactattgggtactgggcttaatacctgggtgatgaaataatctgtacaacaaatcgcggtgacacgagttcacctatgtagtaaaccttcacacgtacccccgaacctaaagtaaaagtttaaaaaaaattgggagaaggaagaactcggcaaaggagggctagtttgcaggtaattcacctggagaactgcctggcccctccctggctttccacaacattttgtgttctttaaaacattttcccccagccaggcgccgtgatcctagctcacgcctgtaatcctagcactttgggaggccgaggcgagcagattgcctgagctcacgagttcgagaccagcctgagaaacatggcgaaaccccgtctctactaaatacaaaatacatatatatatatatatatatatatatatatatatattagccgggcatggtggcatgcgcctgtagtcccagctactccggaggctgaggcaggagaattgcttgaacccaggaggcggaggttgcggtgagccgagatctcaccattgcactccagtctggcgacacagtgagactcctttacaaaaaaaaaaaaaaaaaaaaaaaaaaaagattccctcaaataagttgaggtggggggaggtgtattgttacaatgcaaatcctttcccataaaatcctttaatagctctcagtggcctgcagaataaaaccccaaatccttaacatgtcccagtttggtattttcctacgcttggccctacccgggccacccctttccaggctctttaatggcggagcctagctcttttctgccatgtggccttacagactggttcctgggacaagaattggctacttctccctacccaagctttcgttcgtttttttattcctggcccccaccacctcccccccatttctctgctctcctgttaattcctttggagcgattactatttgtgagtagacatccattcgcgtgcattcagatctattatccaaaagacagacgcttatccgtctaggtagtcaggctccaagagaggagcccagtcggtctgactcccgcaaactcccggcaccgtgtcagccacatagtaggcgtctactggagactttgtttagatcagttagtcaacgcaggcagcagctgaatcaggagagagtccccaacgcaaagaaaggggctcctgagacccttcggggcgccgaggcccaggtttcgtctccctctgctgcagcaatgccgtcgactcaaaggggctcggggctggggaactggttctggcaaacagcacaacctcgcccgaatcctggtccgcagtaactcgatctttcccttaggcggcgcttcggagggaaggcgcctagttcagcgcgaggcatcacgggatttgtagtctccgtgggcatatacccaccgcgcttgcgcaccggtgaggcgcgcaccgccccgctccacgcccctatcaggattcgggtcctcgtgaggagcagtccaggcgacagcgttccaacctaatacgcctctctcgcccgccggggacaagacgggctggggaaagaatctgctcttcggaggctatcgcagtgccttggaaggcggcaggaatccgcacacacccgccccggaagtgagccgcttctggcgcggggcattgtggggggcgtagtctctttctcaggcggtccttcgcggcgtccccggggcccactcccgagcgcaggcgggcagccaggcgggcggcgcggcgcgggccggcaggaagcgtattctgggcacggggcgccgggcgggccggctgcgccgagcggcagtggtgggataccacccaaggcctcgcgcggcgccgcccgtcgaggggcgggcggcggcgtagccactgggccgtcgaa

SEQ ID NO: 16333 - DNA, 2300 bp, Homo sapien
ctttgctcttgtcacccaggctggagtgcaatggtgtgatctcagctcactgcaacctctgcctcccaggttcaagcaattcttctgcctcaccctcctgagtagctgggattataggcacccgccaccacgtcgggctgatttttgtattttcagtagagacaggatttcaccatgttggccaggctggtctcgagctcctgatctcaggtgatccgcctgctctgcctcccaaagtactgagattacaggtgtgagctaccccgcccagcctctattttttcttagattgaatattgaaggggcaaggattacattgcttttgtctatagctccaagtaatttagctcaaagccaatgtctaaaagtaaatgcctttaaagctctgggtttactgtgggtggtggggcacaaacggagactttcagaccccataaaatatgactcccttctctttcttacttatggacaaagccatctgcctggggacttgtctgtggcaacatgctgggatggtcctaaaactcaagtctctgtttcccttctagtcccttagcactgagttgggaaagtggtggggaaggagtgagacataggttgtgtaggtggctggttgggggatggactggacctctgtcttcctagggttagatctggctggtaatcaggtggtggaagcactgcagtgccctttgttgctcctattgggccagtctcacatcttcccggtcggagcaaggccttttccaggatccagccatgctcttcagtgtatccttgagctcctatttattgaagggacttctgctgtttctgcattggctcccttgaggctctcagcagtactccctggaccctccctggtgtctggaggttatgggcagtgttttggcttcttagggagaagaagacagttcacagagcaagggagatcccagatgcagatgtataagcggggcaatgcagagttctcactagctgagtaataagcatctagtcaggcaaagtgtagtgttgacagacctgagatttaaaaaacagaagtgtggtccggtcttaccagccatctcttggaggggtagcctgtgggtgggggaaggtgcaaaactcttgtggaagaacaggagtactgagagacctccggccaggaaggaaggctaggagttgcctggagaggccttgtagccatttcccttacctgtggtaccccaagttggctgcagatctctttgccaagcacaggtctgacctagagactggccttaccacaaatgtttgtgttaccaagaaaacaaatgggcgttgaaaggaaagggcaatgggtaggaagagaactatttacaatctggtcacttaaatcacagcgaaattttgggtaagtcagtcatttctctttcctcattaataaaaatgaaacacttagctgctctatctgctgcaaaaaaaccttacagaatgttttggggggacccctgactgtagaagtttgagggtaacctctccaaccaagccccacctgagggacatttgagtctccggcccaagaatagcctagcctgctcgaaaccagctttgggcccgactcgccgaggtgcaggcgcacgaatgttgggattgcaggagctgtgcgttccgcccgggctggttaaggccacacagctcggaagagtaacagcggcagccatagccccaaggggagggggtttcgtgagcggaaacggcccaggggcccagggaggggcagctgggccagcttggggccgggctgggctcccacggaggcggggccaacccccaccccagtgcacagactgggcggggccgagccagctgagaccaggagacaactgagccctgaccctagcctggcgccaacctctagtgttccagaggcttccgctagaccacaattctcaggggcttgccccggcagcctccctccctggcttagcctcacctcccgcgctgcgggccgtgtctgggcctccgcgcatagcacgccgggaattgtagttttctctcggcgcgctcatgccggaaagggggggcggtgggactgcgtctcccagagtgcagcggggcgggcgaaggaaggcaggggggaagggacagtcggccgcagaccgcgctgggttgccgctgccgctgccgccatcgtgccagcccctcgggtgagtgtcggggccagcacgccggggcgggggctgggccgcaggagccgctctctgggctgccgggaggctccgctgagagtccccgggcggcccctcccctcccccccccccggcggcccgaagccg

SEQ ID NO: 16334 - DNA, 2300 bp, Homo sapien
accagcctgacaaatatggtgaaaccccttctctactaaaaatacagaaattagccaggcatggtggcgtgcgcctgtagtcccagctaccagggaggctgaggcaggagaatcgtttgaacccaggaggcggaggttgcagtgagccgacatcgcaccacagcactccagcctgggtgacagagagagactccgtctcgagagaaaaacaaaaactctcctggtcaagtcacccagggccatgaaatacgcaaactacgccatagccgtaagccagctcacctgaaatctgtgtcctagaaagtacccacgcagacaatctacagggtcttgaaataactgcttctagttctagatttcacctcattgtcctgtgggtagtccctccttattgcccagctccactggcaaagttggcctctcctgagcctcttggatgaacctgatttccatgtcctcatgggccaggatatggactaggaaagttacatccagagagaaggcagggcttggtaaaatctgagcagcattcttgcctattcttcctgaccagggagaataactaggcagagcaattcatatgcaagaaaacttctaggtcaagagtacttggaagaagtgaccagaaatgaacagaaaaacattacctgggaaaatattcaaggaggaagaaaaaaatatgcagggtcagtggctttcttcaccttgggtctcaatcagcccttctaagagacctgatattctgcttgctcctgaggccagagctgcagagattgagctgctgctgctttttttttttttctttttctttttttttgagacagagtcttgctctgtcgcccaggctggagtgcagtggcatgatctctgcccactgcaacctctgcctcccggattcaagcgattctcctgcctcagcctcccaagtagctgggattacaggtgcacgccaccacacccagctttttttattttggagacagagtcttgccctgtcacccaggctggagtacagtggcatgatctcagttcactgcgacctccacctcccgggttcaagcaattctcctgcctcagtctcctgagtagctaggattacagaagtgcacctccacgttcagctaatttttgtatttttagtagagatgcgcttttgccatgttggccatgctagtctggaaccccggacctcaggtgatccgctggccttggcctcccaaagtgctgggattgcaggcgtgagccaccgcgccaggcctgagctacttctttagtctctggaaagactgcggctcagagaaatcaacgctttacatgccatctctcccctagtcccaaggtcttctctggactggttccttaatttaccatctctcaatcagaagcgcctttacaaaggatatcaggatagtattttttggtcaaagataactcttcccccagaactcagtagggtctctgatggcatcagtaagggcaatttcataaagcaaccaggttcctgcctgtttacaggcagctccagttgttgggaagtgagcaagcaagtgaggggaagccagactttctggagcttccagccctagttctgccacccaggcttcgggagggccccacaaagtctgaaatctacgtgccccaccccccaaagccccttccagcccaggttctggtttagcactaggctcaagaacctcaggcctgaattctacttcccgtgcattaagtcccaccttaacatcccattcttatgaagtcatcctgtcctgcggggcaattctgtgttgctgctggggcctggtcactgatagagaagggcgtgggctgggcctacccggcaggagccgcctcaccccatcaggcccagatcctctaagacaagacagggataaagtctcccgtggaatcccctcccgcctcatattccctgaccctgccctccctgcgagaactccagtccgggctccacaaagggcgcggtaagaaacgtacacttccgaggggcagacaaggagggggcgttcacctacaccccggccgggctatggtcgggaacagggtgaggggcccaagccccggctgcggcaggcgggcgcccttacccatgctgactctggagcgggccgggtggcgctgcccatccccggatccttcgtaggtgggtagcaggacgtggggctggggtctgcccgctagccagcctgcagagcttgcggggctcgcgcaggccgggccaggctagacggggcggggccctaaggccccatccggacggtcctgactagagaaaaaggcctggc

SEQ ID NO: 16335 - DNA, 2300 bp, Homo sapien
ctcctcttcccaatactattcccactcctccagatgctccaaatatcatgcacaaatgagcagggccgcggtgggagtgggcgcagtgcgctgctgccactgaggtgttgtgcatgatgtttggatgctagactagttgcatctgacgggagaagtttgtgttgtaccagcgcatgccttggaaagacttaagtaatgcaaaaggttgtccttttttttttttttttttttttaatctactgacaagttgctctagtaacccaaagaagtgaaggagaaagcagctgcctcaccgcccagacattgatttgttcagatgtttcaatgcctcatgatacaataaaaccacaaaaattttcttaacagtttaaattgttttaattagtttactagttggctgggcatcagaagctacccagacccgttgtctctctcatgtttcaccctcccacttctgccccaactctgaatacctgttgcagggagaaactgctgaagcagcactcccagctagcctctcagaagccgtgtagggcagttctctcccactccacagggcgactggtctttggaaagcaggcaggaagagctcaggtctggcctgaagcttctctcactgaagcctgtgcagtcagttctgatacctcctgtgacttctgctctgggtaggttcagggccctagtagcaggagagatgatcctgaatcctgttgaagctggagaggccttggcaaaatggctcatcacgttcaggccctccgggctgagttgtcagcagtatcaagggaggggcctgctctatccccagaaggatcaggatcatatccaggatgccccacatacaccaagccaggcagagggcagctcagctcctgtcccatctgctttggatatctttacccaaaggcaggtaacccgaagagccagcctccactgcccacagagccaggcccagttgtgttggagtataggtcaggagctgtggaaggaggcagtctgtgagggactcatgctttaggagtcctcacccctcagactgctgcaggacattgccaggcctctctccacttccttcctcagcatacagacttcatgctatcttccaattccggggagtcttagctattagggcagtttctgcttctccattttggggacaaaggccttgcccagtacaaatctagccccttgtcccacagacttctggatggtataaacctagtggcaatgtagcaaccataggctagaaccaaacccaagatttgggtcagtgccctgttaagggttttaggattggtaaggacaccacagctaaatctgacatgtaaaaggatacccttcccctgtcccactacgggtggaggctaaggacctcctcagatcccacagattgcctggtgacattgggcacagggctggatggtgtgctgtttgagaggacagcatgctcaggagatttcagtgggaatgatctctaggctgatgtgtatttggggaagtgggggtggggaagaggtaggtgcctgctgcctcaaaccaccttgtgtaaaatctgcaatacggcttcttccatgtacctgtgcctgaactgtctgcaataaagaagaatttgtaaactgtggtttctttcttccaacctgagggtgccaggtgggacaaggggatgctgggggacagtagggaacaatgactggtcattgtagtgggatcatctcccctgctcttgcaattcctgagttttatgacctcgagggtagcctcaggccttgagttattccgacccattcccaaagggaacctgaggcacctgccaattcagcatattctgggggtctgagggaccttagcatgggcggctaagttgaccccgtcccaggaccatcggagtccatgctctgggagtgggcagggacctggcgccttctgagtcgagtagggctttaggtggcccagtgcgtggacgcttacttcagccccgtgggactttcctgacctcgcggacacaggggcggggccgccgagggggactggctgcgggaggggtttaggcttccgcccccagcccggaacctttcttctccggccctggcaggttccgggagcctcggctcgtgggtgccggaagtggaggcggttggtggggttggcggggctcagcgacgctgcgcgggtggcggtttgcgaactgcgggtggactgtgtagtgaccggcgtcccgctgtctcgccccgtggcgggtgagcgagggtgcgtggtgcgcggcggcggcggaacgaacgcggtgcgggcggggcgcccgc

SEQ ID NO: 16336 - DNA, 2300 bp, Homo sapien
aggccttgatctctctcacccagattctcaaccattctgcatgctatcttagagtaatcttcccactggccagaactgaccacatcaccttcccttttgaaactctttatggttctcatggcccacagggagagtctaagtgccacggcatcatacctgatgcctctgtagctttgttttcactccatccttcctgtgtttgtgtgttctggtcacactaactgctgtataaagtctttcctgacccctcctatgccctcactcagtccacagagttcttctgtagtgacccagacctgagtattcactgccctcaaagggtccttgatggcttgtacccctcccccaggtagaagagcctcatgctcatccttggtcctgcctacatcagtgtttatggaacgagagatgaacacagggccctcctcctcatggacatgctttgctcagttgagtgttcctagagcacctcatagttcttgaaggaaactctgaaaggggagaggcttgtgggcaggtcgagcaaccttatcagaatgaccctctttgtccccaggccccagtgcagagagcccacggccatccagtgcctacaatggggacctcaatggacttctggtcccagacccgctctgctcaggtgatagtacctcagcaaacaagactggtcttcggaccatgccacccattaacctgcaagagaagcaggtcatgtgagtacctaggagacgacaatagtggtgatggtgtatttggggtgtctgctagctgaaggcatgagatggggagtgagcggggccagcagcctctgctgcttcctctctagatgacctggggtggagcttgagcttgcactaggatgagaggcaaggacaagctcaggggtttggcctggatacctggtttagaatgaaagtaggctcattcccaaggaaggagatgagcaagcagagctgtgggtctggggccagtggaccaggcgaagctgacattggactagataccttccccagtctggctatgtcctcgcttcctcccaaccctgcccgctgagcctttgggtgaacaagaggcaaagtttttgcactcttccccacagctgtctctcaggagatgatagctccacctgcattgggattttggccaaggaggtggagattgtggctagcagtgactctagcatttcaagcaaggcccggggaagcaacaaggtaggtactgggatgctgtggcatatataatgtacgggggcacacccagcctttccagtctccctcatgctgccagttcctatggggaccaccttgacactttcccagtttcaggaagccagggctgggtgccaagcctctgtgggagtctggctccaggaggtaacagtgggtagctggacttgcatctgtgtcctctcccatccccagggatgttgggggccacctaggctctggggaagttccatgacttttctcaccctgggttctcaggtgaaaattcagcctgtcgccaagtatgactgggaacagaagtactactatggcaacctgattgctgtgtctaactccttcttggcctatgccattcggggtgagtaaagacagtgaggaggaaggaatgttctgctggatgtcccacagagccagttccaacatcaggccactcaggccttaggggtacaatggaaggtttgtccatgctgcctcttggggagctgggtgggaaaaccaagcttgagactctggtggtggcagggagacaggtggggcagcgcttctctgctactgcctgagcctggatacgtattcatggtccactgctctcctgattccagctgccaacaatggctctgccatggtgcgggtgatcagcgtcagcacttcggagcggaccttgctcaagggcttcacaggcagtgtggctgatctggctttcgcgcacctcaactctccacagctggcctgcctggatgaggcaggcaacctgttcgtgtggcgcttggctctggttaatggcaaaattcagtatccattccttcctgtgggtggtgggactgaagaagggtgggcggagctggggtgtcacgcctcttcattcatctatctagcccttaacaccctgctcagagaagagatcttggtccatattcggcagccagagggcacgccactgaaccactttcgcaggatcatctggtgccccttcatccctgaggagagcgaagactgctgtgaggagagcagcccaacagtggccctgctgcatgaagaccgggtgagggggctgacatggcgaagaggcgccag

SEQ ID NO: 16337 - DNA, 2300 bp, Homo sapien
tgcagagtgccactgagcagatggcagccaccgtggccggcagtgttcgtgctgaggtgcagcaccagctgcatgtggctgtgggcaggtgtgtgggcagagtactgggcaaggtggtgggcttgagaaaggccagactaggctccctgtccacttcacctcactcacttccctttgcagcctgcaggagtccattttagcacaggtacagcgcatcgttaagggtgaggtgagtgtggcgctcaaggagcagcaggccgccgtcacctccagcatcatgcaggccatgcgctcagctgctggcacacctgtcccctctgcccaccttgactgccaggcccagcaagcccatatcctgcagctgctgcagcagggccacctcaatcaggccttccagcaggtacgataggcattaggccctgctaagggtcacgtgtctcttgacaaggcccacataccatacattctactccacccaccacctttgcaccttctggccccagcagactgttcttggttccctttggcctccaggccattgtccctgctgcttcctcttcctggacccctttcttcccacctagcccaccttgctttacaactacccttctcaggaacccatttcccaatcccctagggtaactacacagccctacaggctctctctgagtccctctggagctctcactagcccaccctgtggtcatcctcccccaggccacacagttcagacaagcagacattccatcctgatatttgctataaacactgctgcttttttctcctccaggcgctgacagctgctgacctgaacctggtgctgtatgtgtgtgaaactgtggacccagcccaggtttttgggcagccaccctgcccgctctcccagcctgtgctcctttccctcatccagcagctggcatctgaccttggcactcgaactgacctcaagctcaggtaagtggggacagccagggatggggagatgagctggggagtggggcagtgggagggagcagtttgaagctgacgcccacttctgcctgaatcctctccctaattttctccaccagtcctttctgccttcacccagagggttccctctgggcctcggtgccaccagggggcgctcccgtctgctggcacccacctgtagcctgtcctttcccccccatccccagctacctggaagaggccgtgatgcacctggaccacagtgaccccatcactcgggaccacatgggctccgttatggcccaggtgcgccaaaagctttttcagttcctgcaggctgagccacacaactcacttggcaaagcagctcggcgtctcagcctcatgctgcatggcctcgtgacccccagcctcccttagctgctaagcctgccttgcccaggggtgggatggcactgaaggccagcagacaggcctaggctggggcagggtcacggctggcctttacctgctcaggcccccatctctggggtgtttgggggtcagggagcagggagcactggccgtggtctacagcgtgtggtagtcagaaggtttagctgggcccagggcaggtattgcgcctgcttgggttctgccatgcctggagcatgaccctgagatcgtgacaccacttgagtggaattttccatgttcctttttacctctaatttggatctttttgtttttgaaaaacattgagaaattcaattaaatgcttttggaataaaatggagtatgtgtgtgcttttggtttgtctttggtgtgactctcataactgccgtctgttcgttctctgcccatctcttgcccgtggagctctgtcgaggccaacccagccaaggggccgggttacccactcatctgctccaactgccttcccagatctcccttctccctccttctatggagtgagggtccaggggcctgcccagcaccagcctgtgctcctgcgaatttctgctctctgaggtctcctcgctccttttcccatctgggtgttggaggcggagccgccggctgggttcggagccccacccccagctcccatccaatcaccgtccctccctccgggggctgggcggacgggctgcactccaagcagctagctcctgcactaggctctcagccagggatgatgcgctgctgccgccgccgctgctgctgccggcaaccaccccatgccctgaggccgttgctgttgctgcccctcggtgagtgcgggcatccggggcccgggccacacccccttctcgcccagccaagccaggctgggcatagggtgtgtgggaacgctgggtgccagggt

SEQ ID NO: 16338 - DNA, 2300 bp, Homo sapien
cccttaattattgcactagacttttggaaacaattttttaacttttttttttttttgagatggagttttactcttctcgcccaggctggagtgcaatggcgtgatctcggcttactgcaacctctgcctcccaggttcaagcaattctcctgcctcagcctcccaagtagctgggattacaggcgcctgccaccacgcctagctaatttttgtatttttggtagcaatggggtttcaccatgttggccaggctggtctccaactcctgacctcaggtggtctgctcacctgggcctcccaaagtgctgggattacaggcgcgtgaggcaccgcgctgggccaccattgttctttttaaatgaaatcttgtaagaaaccttactacggctgggcatggtggctcacgcctgtaatcccagcactttgggaggccgaggcgggcggatcacgaggtcaggagatcgagaccatcctgactaacatggtgaaaccccgtctctactaaaaatacaaaaaattagctgggcacagtggtgggcgccaatagtcccagctactcgggaggctgaggcaggagaatggcgtgaacccaggaggcggagcttgcagtgagccgagactgcgccactgcactctagcctgggtgacaaagcgagactctttctcaaaaaaaataaaaataaaaataaaaataaaaataaaaataaaaataaagaaaattaaccgggcatggtggcaggcgcctgtaatcccagctactcggggaggctgaggcaggagaattgcttgaacttgggaggcagaggttgcagtgagccgagattgtgccattgcactccagcctgacaacaagagcgaaactccatctcaggaaaaaagaaaagaaagaaaccttactacataaaatagacaacaattttttttttttttttgagacggagtctcactccatcgccaaggctggagtgcagtggtgcaatctcagctcattgcaacctctgtctcccaggttgtagctattctcctgtctcagcctcccgagtagctgggactacaggagcctgccaccaagcctggctaatttttgtatttttagtagagacagggtttcaccttgttggtcagactggtctcaaactcctgacttcaggtgatccacctgccttggcctcccaaagtgctgggattacaagtgtgagcagtggcgcccagccgacgacaatgttttattggtgttaatttatttttaggtttaaagtataacattagcttatacagtcaatcaaagacagttccatgtgcaaagtacatactcaataaagatttgaatacagagctactgaaatggggaagatggatggaggttacaatgcacttaccatctgcagcacctattttaacccctccaagttgggttgactgtaaagtgaaccagttctgatcctatagagaagtcattgtgaatggtaacaattttttaaaaatccgcttgcttttcagactcggcatataaattaaattaacaacaacaaataaccatgagtccagaagttggcccaagattgacttcacctatctacaaattaaccctttgcatctcttctttgatggaggccaaattcaacacatggagtgttgaaattattctaagtgcagttttaaaaaatagattttgttaatgaaaattaagtctatcctttgcggagttccagaggcacttccagaaacctctgttggaaagcattgtttacccaagctcgcattacagagtcccctttcccccaaccagaaacttgaaactttctccctatttcccgcgatccttcctttttctatcaccgacccgtctcgcaggcagcggtcaagttactttgagcgacaaatagacccaccccttcaggagagtgcccgtccccgccccgaagaggttgattggcaggccacgctcggagatccgccagccgcgtagcccagtttcgggagagtccgcccccgacccgcccccgacccgccccgtaggcttgttttggcgtcagctgcgcgctgtgatgacgccacgacgctaacgcccgagaatggcggcggcggcggcggcggcggcggccgctgccattgcccggagatggccggcagagccgccgagacgccgaagagcccgccgcccgcgcgaggtgaggcggcccggcccaggacgacggcccgacgggcgggaggggcagccgaactgtggtcgtggtcgctttctggcgctccggggcctgcccctggtcagcctgcagcgtcggcccgtgccccgtgcg

SEQ ID NO: 16339 - DNA, 2300 bp, Homo sapien
ctgcacatgctgggcttgtgactccaagttttccaggctaataagggtcacaggactcacatggggagagatgacacgtttctccaacaaacctttgctgggcccctgctgagtctcaggcctggctgctgggtgccagcaagagcatcctgtcctcagcgagaacggctgaactccgctggagcttcagaaatgtcagggagagtctacccagggcccagggagggtctatgccgggctgcacatccccaggccgctgagtgtgctccctgcaccccaacattctattaatgaacatttgtaaatgtaacagaaaagtagaaagagttgtatattgaatacccttatactgtcaggtcaccacagacctgacagtattttgttatatttgttttatcatctattcatccctctatccattaattcatcgctcctttttttttttttttttttttttttgagacggcgtctcgctctgtcacccaggctctggagtgcaaatattttgttatatttgttttatcatctattcatccctctatccattaattcatcgctccttttttttttttttttttttgagacggagtctcgctctgtcacccaggctctggagtgcagtggcgcaatctcagctcactggaagctccgcctcccaggttcacgccattctcctgcctcagcctcccgagtagctgggactacaggtgcccgccaccacgcccggctaattttttttttttttgtatttttagtagagacgaggtttctactgaacctgttagccaggatggtcttgatctcctgacctcatgatccgcccgcgtcggcctcccaaagtgctgggattacaggcgtgagccaccgtgcccagccaattcatctcattttttggctgatgctgtttctttgagatggggtctagctccatcgcccaggccggaatgcagtggtgcactcatggctcactgcagccttgaacttaagggctcaagtgatccctcctgcctcagccttctgagttgctgggactacaggtgtgtaccatcatacccagctcatttcttaatttaaaaaaattttttttgtagagacagggtttcatgatgttgctcaggctggtctcgaactcctggaatcaagcctcctacgtctgcctcccaaagttttgggattacaggtgtgagccaccacacccagccctgatctgttcttgaatcagttaaagccctcacactcccagaaggccgccagccaatgcacctgttggaactttgcacacagggtgtcttctcccttcaagcttggtctgcagctcagtaacaaatgggctacagacaccaggggcttgcccatgggagccccaaggcctaaagagggtggcagagatttgatgtctgtcactctccacctgcagcctcagtccacggtcggccaggcaccaagagctcacactttgccctcctaaatgccaggcccttcataagtatcatctcattgttaagagcggaggcttcagcgccagacaaatgcgagtttgtgtacaactcaaccacgtgctggtgggagagtcaccatctctgagcagacctgtgactcctgttccaaatggacgaggaaccactgcgatgatgtgttaggactcccagcctgccagaacctcacagcccctggcccttcacagcaaagttgaccgcagtgagcattccatccaccagtcagaacaccctggacgctgagcggccttctctgaaagcctggtgcctttgttagccctgggtgactcctgtgatcccagccaccaggttgtcactatagacctaatttaaccatctgtcctcagtaccgagggctcaacatttggaatgggaggtggttctgggagccaattagaggccaggctttgggaggtggcagaggtgagtctcacacctgggctctgtctgataagtctaggtctcggtcaggggaccttggcctaaagggcctgtcttgcctggagcgtgggagggggctgagtctacacagctggcctggcctcaggcctggagctttagctcaaggacgagaagacccataaagccagacccagctcccaacctcacatctgccacgatgttgctgctcagcctgaccctaagcctggttctcctcggctcctcctggggtgagtgggccaggaccagccctgattcagccctgggagcaactcagctcccagcaacagcccagggaaggagctaggctggctggaagggacgaaggtggacagagtgggcaaaagaaacaggatatgccag

SEQ ID NO: 16340 - DNA, 2300 bp, Homo sapien
aaccgtaaaataggccaggcacagtggttcatggttataagcctagcactttggaaggctgaggagggtggatcgcctgagctcaggagttcaagaccagcctgggcaacacggtgaaaccccatctctaccaaaaaaaaaaaaaaaaaaaaaaattagccaggcatggtggtgtgtgcctgtggtcccagctactcaggaggctgaggtggaagagtgcttgtgcctgggaggcagaggttccagtgaaccgagatcacaccattgtactccagcctgggcaacagagtaagaccccatctcaaaaaaaaaaaaaaaaaattaagataaaccctttggcagctgcgtgctgctcttagcctcaaacccaagtcttttttttccccctttgagacggggtctattgcccaggctggagtgcaatggtatgatccatactcactgcagccccgaactcctgggcttccaaagtgctgggattacaggtgtgagccaccaggcccagactgctgaagggtttaaaccagagaaagaatgtgaccagatttccaatttagaaagacccgctctctgcagggtaaggagtagcctgggggtcggggggcggggggcaagaattgcaaggtaaccagggaggccagtgcaatgtccaggtgggagaggatgctagctgagactagaagtgctaggaaaaggatgtgtgcagacaagaggtcactggggaggtgaaataacaaggcttggccatgagtggaacccaacacccatggtgccctcttgagagagggaagatggcacctgagatggaagatggaaagaccagggtccctgtgactgaggactgagcctctgtttgaggtttttgcagaggagtaaaggcaacaaaagaggcaagagttggaagaaaggtgacaaggaacaaaagtcagctatgcctgatgctactgggtggccagcaacaatgctgacttggccaaggctctgagagctttactatgctgggactggaggtcagagttgaggctagggtaagagcaaggggctcagatggagggggaggaggacctgaacaagtccagaagggaagagatttgtccctctatccaacagagtacccagtgagcagcacagagggcacagcaagggacatcacccggttccccaaatgctcagagccacaagtgaagccaaaagtgaaagacaagatgcagaaaaccgccacgggcctttgaggaagggtaaaggcgaaagcgaaagcaggaagtacagacgtgaagcctagcagaggactttttagctgctcactggccccgcttgtctggccgactcatccgcccgcgacccctaatcccctctgcctgccccaagatgctgaagccagccctggagccccgagggggcttctccttcgagaactgccaaaggtgaagcgggggcgcggggggcggtcactcctgagccgcctctgcttgctcgtggccttttttcctggctgggggtgggggagggtgtgttggtcgacttgggttccaggcttaccccggaagatgagggagacggggaccaggttaggggaagcaacaggggtcttgaaagcagagccgaaacatgggcgccctcctccgtttccagaaatgcatcattggaacgcgtcctcccggggctcaaggtccctcacgcacgcaagaccgggaccaccatcgcgggcctggtgttccaagtgagcagcggggagggacggggagctggaggggagccgagagtatcgagcaggcactgaagctgcggtccctccctctcctcaggacggggtcattctgggcgccgatacgcgagccactaacgattcggtcgtggcggacaagagctgcgagaagatccacttcatcgcccccaaaatctagtgagactcccgagcccagttcccgtacgcaaaaaagaacggccccctcgttcccactccggtccccgcacgtcccagccctgcccacaccgatcctcccttttgcctcagctgctgtggggctggagtagccgcggacgccgagatgaccacacggatggtggcgtccaagatggagctacacgcgttatctacgggccgcgagccccgcgtggccacggtcactcgcatcctgcgccagacgctcttcaggtgcgggggcagggctaacaggaccccggcaggggtagttacggggttggggccattggaaggcgggacagaaagaagggcgggaccgcgacgggccaggtgaccggaagaggccggcccaagagaacctgggctacaggaaaag

SEQ ID NO: 16341 - DNA, 2300 bp, Homo sapien
gtaatcccagcactttgggaggccgaggcgggtggatcatgaggtcaggagatcgagaccatcctggctaacaaggtgaaaccccgtctctactaaaaatacagaaaattagccgggcgcggtggcgggcgcctgtggtcccagctactcgggaggctgaggcaggagaatggcgtgaacccgggaagcggagcttgcagtgagccgagattgcgccactgcagtccgcagtccggcctgggcgacagagcgagactccgtctcaaaaaaaaaaaaagacttgggtttgacttgattgagcccaggagttcgagacaagcctgggcaatatagtgagacctcatctctacaaaaattttaaaaattagcctggtgcggtggctcatgcctgtaatcccagcactctgggaggccgaggtgggcggatcacttgaggtcagaagtttgagaccaccctgaccaacatggagaaaccccgtctctactaaaaatacaaaattagccgggcatggtggcgcatgcctgtaatcccagctactcgggaggctgaggcaggagaattgtttgaacctgggaggtggacgttgcggtgagccaagatcacactattgcactccagcctgggcaacaagagcaaaactccgtctcaaaaaaaaaaatttatttttaaattagccaggtgtagccacagctgtagtcaaatctactaggcaggctgaggtgggaggattgcttgaacctgggaggcagaggttgcagtgagccaagatggtgccacggcattccagcctgagcaacagcaagaccctgtgtccaaaaaaaaaaaaaaaaaaaaccgtaaaataggccaggcacagtggttcatggttataagcctagcactttggaaggctgaggagggtggatcgcctgagctcaggagttcaagaccagcctgggcaacacggtgaaaccccatctctaccaaaaaaaaaaaaaaaaaaaaaaattagccaggcatggtggtgtgtgcctgtggtcccagctactcaggaggctgaggtggaagagtgcttgtgcctgggaggcagaggttccagtgaaccgagatcacaccattgtactccagcctgggcaacagagtaagaccccatctcaaaaaaaaaaaaaaaaaattaagataaaccctttggcagctgcgtgctgctcttagcctcaaacccaagtcttttttttccccctttgagacggggtctattgcccaggctggagtgcaatggtatgatccatactcactgcagccccgaactcctgggcttccaaagtgctgggattacaggtgtgagccaccaggcccagactgctgaagggtttaaaccagagaaagaatgtgaccagatttccaatttagaaagacccgctctctgcagggtaaggagtagcctgggggtcggggggcggggggcaagaattgcaaggtaaccagggaggccagtgcaatgtccaggtgggagaggatgctagctgagactagaagtgctaggaaaaggatgtgtgcagacaagaggtcactggggaggtgaaataacaaggcttggccatgagtggaacccaacacccatggtgccctcttgagagagggaagatggcacctgagatggaagatggaaagaccagggtccctgtgactgaggactgagcctctgtttgaggtttttgcagaggagtaaaggcaacaaaagaggcaagagttggaagaaaggtgacaaggaacaaaagtcagctatgcctgatgctactgggtggccagcaacaatgctgacttggccaaggctctgagagctttactatgctgggactggaggtcagagttgaggctagggtaagagcaaggggctcagatggagggggaggaggacctgaacaagtccagaagggaagagatttgtccctctatccaacagagtacccagtgagcagcacagagggcacagcaagggacatcacccggttccccaaatgctcagagccacaagtgaagccaaaagtgaaagacaagatgcagaaaaccgccacgggcctttgaggaagggtaaaggcgaaagcgaaagcaggaagtacagacgtgaagcctagcagaggactttttagctgctcactggccccgcttgtctggccgactcatccgcccgcgacccctaatcccctctgcctgccccaagatgctgaagccagccctggagccccgagggggcttctccttcgagaactgccaaaggtgaagcgggggcgcggggggcggtcactcctgagccgcctct

SEQ ID NO: 16342 - DNA, 2300 bp, Homo sapien
ggcatgctcatgcttctgcccttcctgctgcgccagcataaggtagaccagggggtgggtgcagatgagaggggctaggcccttggaggagcagctgtgaccaaaccgcccacctggtcccttgcctcaggtctggaggaagtgccggatgcgcatcttcacagtggcccagatggatgacaacagcatccagatgaagaaggacctggctgtctttctgtaccatctgcgccttgaggccgaggtggaggtggtggagatggtgagccctctgccctgccctggccccgtggataccatgtcccgtgcagctgggtcctcacggccaaccctgtccccagcataacagtgacatctctgcatacacctacgagcggacgctgatgatggagcagcggtcgcagatgctgcggcagatgagactgaccaagactgagcgggagcgagaagtcagtgccctttgtggttcacgccagggcgggtggcagggtcaggcctttggagaccgcatcggtgggtgcggaggaatcagaatgactcaccgcagccctacccaagctagtgctcatttcccggaggcaaggtggtcacattgggccagacaggccccatcccccttttcctatgggaccaaggctatctcctgcaattgtcctcaggcccagctggtcaaggatcggcactcggccctgcggctggagagcctgtactcggacgaggaagatgagtctgcagtgggggctgacaagatccagatgacgtggaccagggacaagtacatgactgagacctgggaccccagccatgcccctgacaatttccgggagctggtgcacattaagccgtgagtgcagcaaaaacagccccagcggcactggaatctaggggtggaggtggggtggggcagacaagtagtgttagatgggccaggggtggggaccctccttgcaggatggctcatggcgacctgtgactggctacactacgtgtagggaccaatccaatgtgcggcgcatgcacactgctgtgaagctcaatgaagtcattgtcacgcgctcccacgacgcccgcctggttctcctaaacatgcctggcccacccaggaacagtgagggcgacgagaactgtatccctttgtggagaggcaggcagttgggaggtggatagcatgggaggtcaagccagcggcttctctcctgggcacccctgggtgggcatggcccaggtggcccgggttgcccgttgattctgttgttgcctccttgacttgaggccctgcagacatggagttcctcgaggtgctgaccgagggccttgagcgggtgctgttggtgcgcggtggtggccgtgaagtcatcaccatctactcctgagcccagtgtcatcttgtggcctggagtcgaggtcttggccaggacataacaagctgtggtctggggtaacagcctcttcccagcacccacctgccagccctgcttgcctggccctgtcctggacccagctttgctaggtctccttggaaaccaggcctgggcctcaaaatggagatggatcccaggtcttgtgggaccctgggatgtttggggactttactatctagcaccccagtaggcctgtcctggccagagaagactggtaggggccgagtggggtttgaaggcagccggcccggcccagcccaggagcgctatttattgcatatttattgtttggatgtcaccatcagagacgaagggaagggtagccagggagggagtccagcccagctgcctgcaggaagatctggctcagtctactatgggcagggccccccaccaagctgagccgaatggagacagctgagctgaggcctgactttttcaataaaacattgtgtagttctgggcctcctgctgccccggctctgtttcccctggcgccaagagaagaaggcggaactgaacccaggcccagagccggctccctgaggctgtgcccctttccggcaatctctggccacaacccccactggccaggccgtccctcccactggccctagggcccctcccactcccacaccagataaggacagcccagtgccgctttctctggcagtaggcaccagggctggaatggggccgcccggctccccatggcagtgggtgacgctgctgctggggctgctgctccctcctgccgcccccttctggctcctcaatgtgctcttccccccgcacaccacgcccaaggctgagctcagtaaccacacacggcccgtcatcctcggtaagcccccaccaggcccctgatgcaccacgcca

SEQ ID NO: 16343 - DNA, 2300 bp, Homo sapien
tcctgggttcaagtgattctcctgcctcagcctcccgagtagctgggattacaggctcatgccaccacgcccagctaattttttgtattttagtagagatgaggtttcaccaagttgcctggggttgtctcgaactcttgagctcaggcagtcggcctcccagagtgctgggattataggcatgagccattgcgcccggcctattcatttatttttttgagacaaggtctcactctgtcacccagactggagtgccgtggtgtggtctctactcactgcaaccaccacctccgagactgaagtgattctcctgcctcagcctcccgagtagctgggattacaggcgtgtgccactactaccagtttttgcaccactaatttttgtatttttagtagagatgaggtttcaccatgttggccaggctggtctcaaactcctgacctcaagtgatccaccgcctcagcctcccaaagtgctgggattacaggcgtgagccacggcgctgacctattttttatttttttttgagacggagtccccctctgtcacccaggctggagtgcagtggtgcgatctctgctcactgcaacctctgcttcctggattcaggcgatcctcctgcctcagcctccagttgctgggattacaggcacgtgccaccacgcccggctaatttttagtagagatggcgtttccccatgttggccaggctagtcatgatctcctgacctcaagtgatcccccacctcagcctcccaaagtgctgggattacaggcgtgagccactgcgcccggcctcttttaggtactcgtaaaaagaaaaccaaaacgacaagtttcactttccaaataagaaataaaaccctccttatccatcttcttgtttcagacctacattgccccaccagctgccattttttacccatcgggtgctcatgacacgtcgaatgccactttgaacaatatgcgtgtgtatgggaccattttcctgaccttcatgaccctggtggtgtttgtgggggtcaagtatgtgaacaaatttgcctcgctcttcctggcctgtgtgatcatctccatcctctccatctatgctgggggcataaagtctatatttgaccctcccgtgtttccgtaagtaacccaggaatttatctgggcattgcatggacatccctcccatgtagccagcctttgatgccccagatcccagagactgcagggtgggcacaggcaggggctttgacctgagcaggtgccggtgcttctgtccctcacagggtatgcatgctgggcaacaggaccctgtcccgggaccagtttgacatctgtgccaagacagctgtagtggacaatgagacagtggccacccagctatggagtttcttctgccacagccccaaccttacgaccgactcctgtgacccctacttcatgctcaacaatgtgaccgagatccctggcatccccggggcagctgctggtgtgctccagggtgggtcctccctcccgtcgtcttgctcttgagcccacaggctgagcaggggcacagagcacagagctgtccttgtgtggccagcttgggaacgggggcaggactggccgccttcccagccccccagtgtcctcccagcctggctcctggcagccgagtttggagtgagtggagcctgtctggccagcgtccaaggcctgcagcagcctgtcttccccagccaccagcccctgacactgcctggggatgttcccacaggatccataaaggcctctgtggaaggcgggcagtggcgggctctgggtgacggtggttcagccacctttgtctgtcgacttctagctgggcagctccttctctgtggtcagggtagccctgtggctgacgctgcagtcattgggctgaagctgttccctgagtccccaaagttgccctgcatctgcgcctctggctaggctgccccaaactacctggggtagtggggggcagctgtggtggtgacacagctacccctgcagaaaacctgtggagcgcctacctggagaagggtgacatcgtggagaagcatgggctgccctccgcagatgccccgagcctgaaggagagcctgcctctgtacgtggtcgctgacatcgccacatccttcaccgtgctggtcggcatcttcttcccttctgtaacaggtgagccctgcctgcctacccacccagccctgtccccaatcccggggagcccctgagggagtctcatctgtttttggaggcatcatggctggctcaaaccgctctggggaccttcgtgacgccc

SEQ ID NO: 16344 - DNA, 2300 bp, Homo sapien
catagaagaggaaaccaaggccgcacagggagtaagcatgtctccctgggtcacacgggggaaggtctgggaatccaagccagtctgccgcagtctgaatgcccagaggcctaggtatgcgtaccctggccaaattgcagcactcttctctatttttaaagattgtgctgcatagatggactggagtctgtagtaggaacggaacctgcagctccgcccctacagggctctgatggaccctgggacccagatgtggccttctccctgggtgaccttgcctctgaacatctttgagcttcactctccttgtccctaaaaggtagtaaatgctctctactggaatgttgctgtgagaactagagacaacttttggaagggccccgagccatcctagagtgatagctgaagggacaagggataggctaggtcttagaggaccatttacaggcatttgtggggagctgctgtgtgctcagctgtatattttctggatagcaatacagtctacccagaaagaccaggcaacagtgatggggcaggctgtagtacatgagtttagaataaattataattgatttccagcctacttccacaaaagaatcagaagaaatagccaacaaaagtgtctccccaagtgattgttactctcaggaagattgaaaaccatgcagaggaagggggcaagcactcaggtgagacagatggtgactttatctaaagagtaaatttagcttggagattcctggcagccaaagcagaaagagaagtaagacgagctgtataactggcattttctgacaaaatgaagcacctgatttatcaaagggagacactttttttgtcacaaaaatccaaaagtaattttcaaaggcttttcactgaagagccattaatgtcattaatgtaagaggcagagtgttactgggttttcagatttttcttgggactccttctgatcctgaacaagcatggagggtacagcagatatcatagagtgtccgacatgaccccgcctggctttaacatgacacggtggactgtcttgacctctggctgcctttgtccactgtgccattggcattgacctatgtgaatgtggggctgagctgcttggctcacttagctagtccaggttgctgggtgtagcaggtgtgccactttcacatgctgtgggaaggaagaactgactttgccccagaaactgtcatgggcacacttgatttgttagtttccttgggggataaagaatccacagcacagcacctgctgagtggttgttggctcagagaaagcaattgaagcctcatgctgatagcaagagatgtatcagatacaggaggatgcctcaatcagcattctcagctgcagtcaagaaaaatgaattgtggcctatgtaaacagaaaaggttggcgggcatggccagtgcatggcccaatcacaccactagcctgggctggtggtgacagttctgttgccatctccatcactggacaccatgccagtccttctcatgtcagaactacatactgctgccatccaacaccaagatgtgtgctttccatttgctgtgaggccttgagccagggccggggctgcgagggtagctggggtggagggaacactcagcacctagaaaacgagtgcttggcgttctgcttggtgggaagctgggaatggcacccaccgagactcataagggacaagagttggaaaacagggaagaatgaatgataggaggccagaaaaaacagtcgagctttgggagttgaggcaggcttattgaaaaggagcatttcactccttttggcgagatttctcagagctggggcactggctcatcagcctagggctgtaggcggaggtttgcctggggcaagcggcgggatctgcgggcaagggggccattgtgttgctcctgccagcagtcccagctcccatttttctccctgctcagtccgacacccacccgtccgactttcttaggcaaccctagaaggctcctggaatccacttccgctctccacggcctggggcttgccccacctcccggcatgccccgggctgccctgcaggacgccccccgcgcagtgcatggtggggtagccagccggccacctttgggccatggcagccgaaggtgctgtgtgcggcttcgtctatctggagggcactgcctgggcggtccctgaggacaccgaacccttggcatcctgcacattgggtactccggaaagaccgggaaagggactggggcgtggaggcgatctgggggcgggtcaaacgctggccccgcccctct

SEQ ID NO: 16345 - DNA, 2300 bp, Homo sapien
tcttaatcagtgatttccaccaatccatttctgcctgcaatgggaactatgaagggaaaggctcagggcagcccagtccagatgaggggtggggtggggtggcagggcatgtgtctgagaaatctgaggggaggtggtgctccccaccaagacctcctggatcaggaggttttttgtttgtttgtttgtttttgagatagagtcttgctctgttgcccaggctggagtgcaatggcactatctcggctcactgcaacctctgcctccgtggttcaagtgattctcctgcctcagcctcccgagtagctgggattacaggcacctgccaccacacccagctaatttttgtatttttattagagacggggtttcaccatgctggccaggctggtctcgaactcccagcctcaggcgatccacccgccttggcctcccaaagttctgggattacaggcttgagccaccaggccggccttggaggttttttgtctgtttgagacagtgtttcgctcttgctggagtgcaatggcgccatctcggttcactgaaacctctgcctcccgggttcaagtgattctcctgcctcagcctcccaactagctgggattacaagcacccgccaccacgcccagctaatttttttgtatttttagtagagacggggtttcactatttgaccacgctggtctcaaactcctgacctcaggtgatcctcccgcctcagcctcccaaagtgttgggattaccggcgtgagccaccgcgccaggcctggatcaggaatttgataagtgagggtagggacagaggctaggtagatgtcccccagagtgaacagtgggtgatgcccagaaactataggtctcaggtgagagagagagatttgaagggctgaggctgcgaggtgggtggcgagggatgcgcctgcagaggtcggggtccggccgcattgggcagggccttatgggcccggagctagtaggattttccttcagaagaggcggctctacgtgagcaggggcgagggcagggagtccagtaggaaggccgctactgtgggcggccgaaggtggcgtgaggggcgggggggtcaggtcggcgggcccgctgcgggggccctgggggaggggtcagagggtggtaagctcgggggtcgtcttgcggggcccagcggctctgattccgtaccccccaccccaagggctggaggctggcagtaggcgtagtcagaggacgccacccgagccacgcgagggagaagagtggagatagacaagtaagatgggctctggggttttctgatagagaaaaaaatagtaaagccagctagataagtaatctgaagcagtggagaagaaagtgaaagaaacgttaaaagcaaataagtaaacggcttggatagaggaacacccaggaggcgagatagagaaagttaaaatgaagggacttggctacagcacccagtgcactgtcccaaaaaggcaagcgaggcaagcggggcggggaagggtgggtgtgcgtgttcttcctgcggaggacgcagcagcccctggggagggaccgagaatccccagctgcctccaacaggagaggctgcagctagagggcccagggctgggacgggaccttcgcgggggtctggttcccagggtcgcggagaaatgggatgcagacgctggaaatgggaaggaggtatacggggttggtgggaggccctgggcaggtggcttctgcagtcctgggccggtccggcctaccctgccccgtccctaagtaacagagcgcttcgtaagcccagggcgcagagccaggacactccgcgacccatctcacggagccctaaaacaaccccgaggtggaagtgtgtttcccccattttacaaatgttgcatctggggctcagagagggcggcctctcacccgaggtcacacaggaatcgggcccgcccccaggccgtggagccactaggagtgctcccgcccaggggtcttcccgccaccagggcccccgctctgggaggagccggccgagcccctcccgctctccgcccccgaggggcggcccggggggcgggcggaggaagtgagcgcagcggggaggaatgcgagcgggcggggcgtgtcggcccggggcggcggggacagcggcggggacagcggcgggcggctgggacggcgggtgcggcggggccgagcccgcacgatgcctcacttcaccgtggtgccagtggacgggccgaggcgcggcgactatgacaacctcgaggggctcagttgggtggactacggggagcgcgccgag

SEQ ID NO: 16346 - DNA, 2300 bp, Homo sapien
ggggccgcaggtggagctgcctgccagtccggcgccgtgtgcccgcactcctcagcccttgggcagtcgatgggactgggcgccgtggaacaggggttggcgctcgtcggggaggcttgggctgcacaggagcgcacggcgggggtggaggctcaggcatggagggctgcaggtcccgagccctgcccggcggggaggcagctaaggcccagcgagaagtcgagcacagcagctgctggcccaggtgctaagctcctcactgcccgggccggctggccgctccgagtgcggggcttgccaagcccacgcccacccggaactcgagctggcccgcaagcgcagcctgcagccacggttcccgcccacgcctctctctccacacctacccgcaagctgagggagccggctccagccttgtccagcccagaaaggggctcccacagtgcagcgacgggctgaagggctcctcaaacgcggccagagtgggcgccaaggccgaggaggtgccgagagggagcgagggctgtgagggctgccagcacgctgtcacctctcatttttgtgtctgtatactaacatatatatagaaaaaaatattcggcccggtgcggtggctcacgcctgtaatcccggaactttgggaggccaaggtgggcggatcacgaggtcaggagatcaagaccatcctggctaacacggtgaaacccggtctctactaaaaatacaaaaaattagctgggcatggtggtgggcgcctgtagtcccagctactcgggaggctgaggcaggagactggcatgaacccgggaggcggagcttgcagtgagcagagatggagccactgcactccagcctgggtggcacagtgagactccgtctcaaaaaaaaaaccacgtctctaaaaaagaaataaggccggacgtggtggctcatgcctgtaatcctagcactttgggagacctaggtgggcagatcgcttgagctcaggagttcaagaccagtctgggcaacatggtaaaaccctgtctctaaaaaaaaatgcaaatatacaaaaattagctgggcatggtggtgcatgcctgtagtccctcccagctacttagggagctgaagcaggaggatcacttttacctgggaggtcgaggctacagtgagctgagatggtgccactgcactccagtgagaccctgtctcaaaaaaaaatttgttttaataaaataaaaaataacaattagccatgcatggtggcactgcacctatagtctcagctacttgggaggtggaggaaggaggatcgcttgagctcagaagttcaaggctgcagcaagctatgatcaaggctgcagcaagctatgatcaccccactgcaactccagcctgggtgacagatactctgtctcttggagaaggaaaaaaagctaaaataatgatccccaacaaaaattgttcttaaatttcattttcggggccgggcacggtggctcacgcctgtaatcccagcactttgggaggtcgaggcaggaggatcacttgaggtcaggagttcaaggccagcctggccaacatggtaaaaccccatctctactgaaaatacaaaaattagctgggcatggtggcgggcacctgtaatcccagctactcgggaggctgaggcaggaaaatggcttgaacccgggacgtggaggttgcagtgagccgagactgcatcattgcactccagcctgggcaacaagacccaaactccgtctcaaaactgaaatgagatgaaatgaaataatgaaatgaaatgaaatgaaatgaaatgaaatgaaatacctatagggaatctttctgtccatcaaaccagacagaccgaattaactcttctgagtcgcagcttagaatatttgacctgcctaggagctgggcacaagccggcagctaaccgccacgtgggcctgggtaggaggtgagatcaggaagatccctgggcccctactagttccctgcctggcctcctcccccactcgtgtgggggtctacggagccagcgctgggggtggaagggcgaggagtcctcgacgctgcagcggcggttccggcccatgggggcgctctcctgcttgggggcggaaaagccgtggcgcccccttgcgtggcgcgtcggtctcagagtcgcgtgacttcaaccccctcttcgggaggctgggtcgtcatgatccggaccccattgtcggcctctgcccatcgcctgctcctcccaggctcccgcggccgacccccgcgcaacatgcagcccacgggccgcgagggttcccgcg

SEQ ID NO: 16347 - DNA, 2300 bp, Homo sapien
acatgggatagcatgcagccttctgtcccagatcctctgtactgtctgaaatcaggcagaacccagctgcaagaggaactcaatggtacacatgggacccaagtcatcaatcgtctccatcagaaagcaacccagggccaggcacagtggctcaggcctgtaatcccagcactttgggagtccaaggcgggtggatcacctgaggccgggagttcaaggccaatgtagtgaaatcccgtctctactaaaaatacaaaaatttgctggacatggtggtgcatgcctgtagccccagctactagggaggctgaggttggagaattgcttgaacctgggaggcggaggttgcagtgagccaaagtggcaccactgcactccagcctgggcaacagagcaagatcctgtctcaaaaaaaaaaaaaaaaagaaaagaaaaaaggccgggcgcagtggctcatgcctgtaatcccagcactttcagaggccaaggctggtggatcacccgaggtcaggagttcgagacaatccagcctcatcaacatggtgaaaccccatctctactaaaaaaaatacaaaaattagccagcctggtggtgcatgcctgtaatcccacgtacttgggaggctgaggcaggagaatcgcttgaacctggaaggtggaggttgcagtgagccgagatcgtgccctcgcactccaaaaaaaaaaaaaaaaagcaccccaggaatgttggacagagaggctggcggggtaggggttggttggtaaggcttgagcagaaggttctagatgcattcaggagataaagatgcatttggggttattgcacttctcctagaaacataaacattgacttccttttgtggaagaaaaatgttatgttagctatttgacgtttcaggaagggtggcttcagcttggtgattggaggatgtttgtctacagtggccaggctgctttctggcttggaagactattgtttcttgggaattgtctgtatcagacatcatgggagcagatccagggcgacatcaaagggaagcatgagtctccaggaccagaggggcttggatgcagatgatcatcatctgggcactgctggatactgagtaagccccagctgcaccccacctctgcgctctgagcatgggaggcagcctgtgcagctataactcagcctgactttttccttccctgcatactcttgaaatacactggagatgagtaggggcgagtgagctgcacaccagaataagtttggtccttggagcaaactgtttctactgctgcctcctctgcaggtcttgatttatgcaaacactgcatagaagaggaagtagagggaaaagctgttcacccacctactccttcctggtagcaagatttcctatcctggccttgcctcaacagccctaccaattggaggctgaggttgtgccaaggctctatggggggacgtagcatcactgaggtggccagattttggaggacaggaaagtttgtgctatttgctgagactggagaggctggtgagagcagactctccatgagttgaaagccaaagaaagaaattcggtagatttctgcaatgagaagccacggaagaacttcaggcaggaggatgcattggatcttgttttcgttttgttagagatggggtctcactctgtcgcccaggctagggagcagtggtgccatcgtctctcactgcaaccttaaactcctgggctcaggcgaacctcccacctcagcctcgtaagtacctggaaccacaggcatgcaccacttttttttttcctttttcttagagttctcattatgttgcctagactggtctcaaacctccggcttcaagagatcctctcacctcgaccttcaaattactgggattacaggcatgagccaccatgtcctaccagactttgttaaaagaggaacaggccaggcatcgtgggctcacatgaacactcatgccccagaagtaaacaagtgttagccaaccaggaggcctatcctccccctaacctcacccaaagccatctctgtgccctcccccttgcaggggaaacagcacacactagtgaaatcttgtcttagtgtgtccggaattggtgggttcttggtctcactgagttctagaatgaagctgcagaccctcgcagtgagtgttacagctcttaaggtagcgcgtctggagtttgtttcttttgatgtttggatgtttggagtttcttccttctggtgggtttgtggtcttgttggctcaggagtgaagctgcagaccttcgtggtgagtgttacag

SEQ ID NO: 16348 - DNA, 2300 bp, Homo sapien
aaatggcactactcaaaaggtctgacccagcgctttaagctatttgtcataaagaaagcgataagcaatgcctacactgatctaaatgatcctatgcagcagtggcagctttttgaagaacaggctaaggccgcaggtgatgatgaggccctgtccgtagatgaaaactttgttgccgccatggaatacaggctgtcccccacaactgcctggggcatggttattgaccgagtcaccatgtttctcacagattccaccagcaactcggaaggctgaggcaggaggattgcctgagcccaggagtttgaagtttcagtgaacaacacagtgagaccctgtctctaaaaggaaattttttttttttgagacagagtttcgctcttgttgcccaggctggagtgcagtggcacgatctcagctcactgcaacctccgcctcccgggttcaagcgattctcctgcttcagcctcccaagcagctgggattacaggtgtgcactgccacacctggctaatttttgtattttttataaagacggggcttcatcatgttgcccaggctgctctcgaactcctgagctcaagcaattcacctgccttggtctcccaaagtgctaggattacaggcgtgagccaccatacccaaccttttaaaatttttttcttttcttttctttattccttccttccttccttcttttctctttttttaatcttacaaaaaatgtttcggaaaaggtattttatttttaagacagggtcttgctctttcccagaggctggaatgcagtggagcgaccatagctcactgtggcctctaacttctgggctcaagcaattctcccacctcagcctcctgagtagctgagactacagacatgtgccaccatgaccagctactttttaaaaaatttttttgtagagaaggggtctcaccatgtttcccaggctggtcttgaactcctggcctcaagcaatcctcatgccttggcctcccaaagtgctaggattacaggcatgagccaccatctcttgtcccctgagatacttttaatggccttgctggatccagctcctgcaccccagggccctcctgcctcctccccaccctcggctgatggcactacctcaaggacatgggatagcatgcagccttctgtcccagatcctctgtactgtctgaaatcaggcagaacccagctgcaagaggaactcaatggtacacatgggacccaagtcatcaatcgtctccatcagaaagcaacccagggccaggcacagtggctcaggcctgtaatcccagcactttgggagtccaaggcgggtggatcacctgaggccgggagttcaaggccaatgtagtgaaatcccgtctctactaaaaatacaaaaatttgctggacatggtggtgcatgcctgtagccccagctactagggaggctgaggttggagaattgcttgaacctgggaggcggaggttgcagtgagccaaagtggcaccactgcactccagcctgggcaacagagcaagatcctgtctcaaaaaaaaaaaaaaaaagaaaagaaaaaaggccgggcgcagtggctcatgcctgtaatcccagcactttcagaggccaaggctggtggatcacccgaggtcaggagttcgagacaatccagcctcatcaacatggtgaaaccccatctctactaaaaaaaatacaaaaattagccagcctggtggtgcatgcctgtaatcccacgtacttgggaggctgaggcaggagaatcgcttgaacctggaaggtggaggttgcagtgagccgagatcgtgccctcgcactccaaaaaaaaaaaaaaaaagcaccccaggaatgttggacagagaggctggcggggtaggggttggttggtaaggcttgagcagaaggttctagatgcattcaggagataaagatgcatttggggttattgcacttctcctagaaacataaacattgacttccttttgtggaagaaaaatgttatgttagctatttgacgtttcaggaagggtggcttcagcttggtgattggaggatgtttgtctacagtggccaggctgctttctggcttggaagactattgtttcttgggaattgtctgtatcagacatcatgggagcagatccagggcgacatcaaagggaagcatgagtctccaggaccagaggggcttggatgcagatgatcatcatctgggcactgctggatactgagtaagccccagctgcaccccacctctgcgctctgagcatgggaggcagcctgtgcagctat

SEQ ID NO: 16349 - DNA, 2300 bp, Homo sapien
ataaatgaaaacatcaactgaaagagcctttgtcctagatgtggaggtttggtgtatgaatcctcagaaactactgaattccgccccggtgctaattattcttaggggaggcacataaaaacatcatttattgttagaaatcatgacatgatacaaagtcaaaatccacttgtgtcttgctaaagactacagaaagccatgctcagcagcttcttctccaatgctggccagcagcgtacctttccaagtcacaaagcagttcatcccgccctcaaggagccgacagggcagcccagagcctcccactgacaagtgtggtcacccactcaagatactgggaaagatccctgttctagcatcacattttaatcagatttgtcaaaatcaggttgcttggggcaaaggctctttcaccgaggatgctagtcctggaagacttctccttcggcgagccgccagctcaatcttctgaaccaggctcacatcccagggatgggtcacaaaactgatgacggtgcctggcacctcgctccccacacggcccactctccctgctctgtggatgtaatcttgcagcgttggggggaaatcataattgacaaccagctccacaccagtgctgtccaggccccgagaggctatgtctgtgcagagaagtatgtctcgggagctcttctggaaggactggaagattcctaccctcatcaaggctggcatttgcccctgcaaccttaggtgttggattttgtggtcatccagaatatatcccagccagttcacagtgctggagctattacagaacaccagaacagttcctgagggaccagtcctttctgctctgtcacgatgcttgaggatgtgcaccagctcggccaccttatctgctcccttcagtctcagaaatgtctgtttcacatgaggcatgatacagtggagcttggagctggtgatggtggtgacagcatctgggctggcgactttattcagcaactggcctacaccttcgggaaatgtggctcctaccagcactaactgagctttgggattgaaggggtcttccaagtcagctgggccttctgctatgtggctcttctctaagatgtagtccaccagttccaggaagctttcatccagcagtgtgtctgcctcatccaacaccaagaaggagagttgctccagactgatcagtcgacttttcagggccttccacagagcccctggagtggccacaagcacatctgctgaaggctgtctggacagctgcagcctgatcctacgcatgccgtggcctccctccaggtcccgcaccagcaggcccaaggagcggcccaagggttgggccacagcccgcacctgttgggccaattctcgggaaggaacaaggaccaggcctcggggcgcggggataggaagggagtccaggcttggctggcccaagagccgttgaagcagcggcaggaggtagctgagagtcttgccactgccggtttctgcggcgcaaacgacatggcggccgcgaagtagtgaggggatggtgctagactgcacggttgtgggctgaacgacttcaggcgcagcctcctgtagtgcgtgcagcacacggggctccaggcccaggtcagcaaagctgcccttagacgagagctttcgcaccgctggcgcctcctgttgcgcgcgctcgatggagaagtggtcccgacgcgcgcgtcgactcttccagccttgagaggctagcggcgcgcgctcccaacggcccagtgtgaggcgcgccggctggttcaactccggccgccgcgccgaaaccagcagcggtccgggtcgaaccagcaccggcctcgggaggttccgccgcctgctctgccgctgttccaactgccgctgtagagccactgggatgcgcaccaccggcaggggttcgtcgggactgcggaccgtgaggccccgtcgcggcgccaggagcaaccgagtcacgagggaaaagagccgcaccggccgcgttagagccatgtttcccttagtgcgggagaagcgcacatcagtgacgtcacggacgcgccgcgacctcgcgtacggtggctggcgaggctcagtacggtgtgtggagctggagcaccgtgaggaagaagcgaggttctttttaagagttcagctgcgaggtctgtagctccgaataggggatggcgacatccagacccggccagccttggggaagggcgcgtcgtggaggcaggactggaggctggcgatacgaggcggcagtggggccttgacccaatggaccatgagggcggagggcttct

SEQ ID NO: 16350 - DNA, 2300 bp, Homo sapien
tagccgggtttggtagcacgtgcctgtaatcccacctactggggtggctgaggcagaagaatcacttgaacctgggaggcagaggttacagtgagtcgagatggcaccactgaagtctagcctgggtgacagagcaagaccttgtctaggccttaacccaaatcaattaaatcagaatgtaaactccacaagggcagggattttggctgttttcctcactaccaatgcctggcacatgcgtggtgctcaggaagtatttgttgaatgaatgattgaatgaatgaatgaatataccattattaactgagatccaaggaacacaccaagctcctgatctcaggagcttagattttttttcacaataaggatacctttcctatttctaaagcactacttataaaaatatctcagaaaacatttagaagttaatcaatgtcctctgtgagtgagggggaaaaaaggtaggcagtgtctagtgatgtgacaagaagaaattagtggccacggacacagacaggcttaggcaagctctaactcctgtgaaattttgaggtaatcatattgtaaggactcaagcataatgagaaaacaactatatattaaccagctaccctaccctggatatttgaacaaaacccaaaaacccaaatgcatatacatacctattattttgttctgatacttcaggattactttgatatatgtgttctggctttgtacagagtaattctttgtttgatatctgaaaaacagtggcacatggaaatggatgaaacctgttgggacaaacatccaagggaccttttttttttttttttgagacagagtctcgccctgtcgcccaggctggagtgcaatggtgcgatctcggctcactgcaacaacctccgcctcccgggttcaaacgattatcctgcctcagcctcccgagtagctgggattacaggcatgagcctggccccaaggaactatttggataaggagaagccctgagtttggaaagaatcataaaagtagcatagaattgggccgggcacagcggctcacacctgtaatctcagcactttgggagaccaaggtgggcaaatcatgaggtcaggagtttgagaccagcctgcccaacgtagtgaaaccctgtctctattaaaaatacaaaaattagctgggagtggtagcgcacacctctaatcccagctactcagatggctgatgcaggagaatcccttgaacccagaaggcagagactgcagtgagctgacatcgcaccactgtactccagcctgggcaacacagtgagactgtctataaaaaaaaaaaaaaaaaaagtatccagccattgtcaaatatggtgggagggaaagggcaaaatcacccttgttttagaaccactaccctatccaatgactgttcattcacccatcactactcaaaactttctcttcctacttccagatattttcttgtggagaaaaaaagcctctcttcctctgatttatctggtaactctccagaaagtctaattgtgtagcacaagggtagagtgtacttaaaattgtgaaagtttttcctcatactattccaaaaaaagcaaagtttttatcttttcattggtatttgatgaaactaaaacgttttctccagatgttacgaacctcccagagagttaatccataaatatttaccttatctcccaccccaggcactgcaaattacagaaaagatctgacacccattttccagatctgttcaagaagtatctgttgggcatggtggctcacgcttataatcccatcactttgggaggccgaggtgggaagatcgcttgaggccaggagttcgagaccagccaggcctacatagtgaaaccctgtctctactaaaaacagaaaaaattagccgggcgtgggtggtgtacggctgtagtctcagctacttgggaggcagaggcaggagaatcacctgaacccaggaggtggaggttgcagtgagccgagattgcgccactgcactccagcctgggtgacagaacgagactgtgtctcagaaaaaaaaaaaaaaaaagtgactcgtatagttcttgtttttacaacccgaatatctgaattcaggtaaaatattctgcctgaccagggctacatgataagccacgtacttgatcactttgtagggtcgcagcacccttcttactactattttaggtaattcaggtttctgacggggaagccagtggagctgagcgggctgcaagaggggtgggttctggatgagaagttgggacgcgtgacgagggagtagagagt

SEQ ID NO: 16351 - DNA, 2300 bp, Homo sapien
ttccacactcaggccctcaaggttggagatttgcaggcaggacaggttattgggaaggatagtccacccgtctaatgccagttgttccctctccttgaccacattatcttctccctctgacttcattcacccctgtcccagttgaatctagtgatccatccagaattctgaccatgtaaatcccctgctctaagtccttccactgctccctactgccgtcaggataaagtccagacactttgcagtggcctgcagcattctgcccactcatccggccccaccttaggcttctgcccactgcaggttactttatggttatcaagtctttggaaatctgttctctgcctggaatgaaacttgctcacttcttgtctgtcactccggttcctactaacccctgtcaaggccctgcagctagcaggcttatgaactgtctctgagctcctggcacaaccctcatctctttgtacagtaattatagatttgctggtcccctctcccctacccctgaagggagactttatctctgaatccccaggaacagcacaggtaccggtacaaaacactgggcagaaatgaagcaatacaagatgaacgtcttggatgccctggacattccctgtcttcctgacccaaggtctagtttggctccctctagggctccctggtagctcaagtgtcagtccagacattgagacctcggcaaagagcttccctttaccctctcttcccactggcctttgtgggcggtgtggaatgtgctgtaggccttgcgagagcggcatttcttttttttttttctctctttttttttaacctattgtagcctctgagagggcagcatttttgggcgcacctgcacccaagcctctgacagtgccctgggttcctccagcaacgcgcatctagggatgctatgccctgtgggccctatgcccggggcacggagctaggggaggcggtcaccctacttctctcacgtccctgtccaccttgcgcctcagcggagccttaggtaaacaagccaggctcccagtccccaaggacggccttcaccccagaccccaggaggaggcgtcttgggccatctcgggaaggctagcttgctcgggaggggcagatcacgaaaacggttctttaggcagtgtcacttcctctccactgccagccacccaatttaggcggctccatccctcccgctttcatggatatgcagcaggatgcagagagcacagagctgtgattggcacgagctcacaacgggctttcccgctcaatctactcaacttccagcaagggacaggccctgcccattggggttcgctgaggcctcaaacgcgcatgctgtcaagggagcagctgcgggggcccgctagtggggacaaaggcgcagccaccggggcgaaagctccgccccgcagagggtgggcctgcggcgaccgcgagctcagagtccggacttgtcgcgcaatctgtctccttcggttccaccccaacctagctggactctcggtccggtccctgccctctggagactcagccattaaagttgaggtggggggatgaggatgtgggcggcgtccaggtaactctgaggggccctgatgccttccctagagccagccatcaggagtaacacgatgcgcccccacatcaccgaacccagaacctcagtgcttcagcaccccttcctcgacatgagctccgcccaatgaggagaagggtcttctgcattggccggtggtggtcccctatccaattagagaggctaacggccttctctcgtctggtttagaaggaatcgccgggggaatacaggccaaactacaattcccgagaggtagctgggctctgcgggggggggggggggggcgcctgcgtgttcacgtgacttccttccttctcgcggagaccgagttacgcgataggcctgtgagggggcggggcccggcgcctgttcgccgtgttagtggccaatcggcagccaggcagggtgggcgcgcgtagggggcggggccgggcgcgcggcagggcgcgagagcgcacccgcggcggcggtggcggcgactgtgggggggcggcggggaacattggctaagccgacagtggaggcttaggcaccggtggcgggcggctgcggttcctggtgctgctcggcgcgcggccagctttcggaacggaacgctcggcgtcgcgggccccgcccggaaagtttgccgtggagtcgcgacctcttggcccgcgcggcccggcatgaagcggcgttgaggagctgctgccgccgcttgccgctgccgccg

SEQ ID NO: 16352 - DNA, 2300 bp, Homo sapien
atttttagtagagatggtgtttctccatattggtcaggctggtctcaaactcccgacctcaggtgatccgcctgcctcagcctcccaaaatgctgagattacaggcatgagccactgcgcctggctactaatatctaattttataactccattactctgaaaagaaactccatactcattagtaattcctccctgtttctccctctctacaacctgtaatctattttctgtctctatggattggcctgttctggacatttcatataaatggaatcatatatgaccttttattgtctggcctatttcacttagcagactgttttcaaggctcatccatgttgtagcatgtatcagaacttcattacatctcaaggctgtatattccattttatggatagagacaacttacgtttatccattcatcacttggtagacatttggattgtttccactttttggctattattaataatgctgctgtgaacatttgaaagtttttcatgtggacatatgttttcacttctcttgtaaatatgcctaggagtggaattagcatagactctttagttgataaggcaaggaatgaaatgatgtgagaactaaaggttcttatttgggggatttgggatgttcccttctatgttagttctgtaagatggaaattctttgctctggacctcacagagcactgtacctccctgagatgcttaggacatcagagaaattaacagaaaagctagagcctccaatcagaaaagatcacaaacaacagaaatgcccccacataataaagagtgcttgtattaggatacagtagcaaaatcacccccacatcacagtggtttattctgaccaaagcatttattttcattccatttacataggaggtggcattgtagaaaataaaaactttctcaaagagatatgaattaaagaaaagttagagtaaggtgaatacttatttaaacatacctttagagtgagggtaagcccccttcccaacccaaaatgaactgaatgagagagaaaaagaggtccagagtagtttgtggagcgatgtttccatctctaatgccactcagctcaggagcaggcttcagacactgcctttatctttacagaaagccatgggaagggaaatgtctgaggtagagctcagcgttgggcatcatatggctaatcactcagaggtcactaatcactctcccttttcttgtttttcagtgaacgagataattgggagagacatgtcccagatttctgtttcccaaggagcaggggtgagcaggcaggctcccctcccgagtcctgagtccctggatttaggaagatctgatgggctctaacagtgcttactgcagccttgtgtccaccaccaacttctcagcatgtttctctccttggaccttgggtttccaactctgcagccttcaggtctggggccaggagtgggacccaccatttgtggggaaagtagcattcctccacctcaggccttgggtagatttggcaaaagaacaggagcagcataggctgtttgagctttggggaaatgaactttgctttttatatttaactaggatacttttatatgatgggtgctttgagtgtgaatgcagcaggctctcttgtttccgaggtgctgcttttgcaggtgacctggttacttagctaggattggtgatttgtactgctttatggtcatttgaagggccctttagtttttatgataatttttaaaataggaacttttgataagaccttctagaagcaaaaaaaaaaaaaaaaaaaaaaaaaagaaaaaaaaagaaaagaaaaaaagaaaaagaaaaaaatatcccaagcccacacctatgcctcagaaagtcagcatgtgtcctgaagacgttcatagatttataggaaataaagccaaatgtagctcatacctctttataaaactaaactgttgttagataaaatgagaagagaccattccatcattgaagtgttggaatataaaaagacattccagagcatagccttttggtaactttctaggtaatcttgcaatctctccatactggctccatgttgaaattgctttttccctcaggaccctgggtaagatggctacatttaaggtgactctgaatggtggggttctagcttggtcactttcatttcttgccatcataaaaactagtaggctgtggagtgcgcttcctgtttgtgtcatctggtcgtagaaccttttccaaacagaagcatctgcctttggctgttctgtgacctttgaagccagtctcagtggtttaggc

SEQ ID NO: 16353 - DNA, 2300 bp, Homo sapien
acttctctgcccataggtttaggactggagacagatgccacagaggatgactttggggtctgggaagtcaagacaatggtagctgttatcctccatctactcaaagagcccagcagtaaggtttccctcactgcctgtcacctgttctcagggatgacaaatgcctattgctcctccccactgtgaccttctctaagagaccacgggggaatcctctttgtcatttcttttttttttttttttttgagacagtctccctctgtagcctaggctagagtgcagtggcacaatctcagctcactgcaacctccactttccgggttcaagcgattctcctgtctaagcctccagagtagctgggattataggcgcctgccaccatgcccacctaatttttgtatttttagtagagatggggtttcaccatgttggccaggctggtctggaactcctgacctcaaatgatccacccaccttggcctcccaaagtgctgggattataggcgtgagccactgtgctcggcctgtcatttcttcatctctctcaattgtccactttttgcagaacttggtggggacacccctctccaccagaccctgctgacccccaggccatcttttctcaggtcaattgttttcgaagcccgaggtgataaagcagaaatacgagacggggccttggtgagtgtgggagcaggggctgggggtgacaacagctgaatagctctgacagcactgtgccctgcccctacagcagcaaggctgatgtggtggacagtgagactgtggtacgggctcgtgggttgccgtggcagtcatcagaccaggacgtggctcgcttcttcaaagggctcaacgtggccaggtgggtgtggcagggtgggtgggcccaattggacaggcctacccaggaggcactaacagcactggctccacaggggtggtgtagcactctgcctcaacgcccagggccgcagaaatggcgaggccctcatccgctttgtggacagcgagcagcgggacctagcgctgcagagacacaagcaccacatgggcgtccgctatattgaggtggggctttgggctgggagcggagcagggccaatctgagtcaggcctgagacccatgggctgctgctctctgtacccacaggtgtataaagcgacaggggaggagtttgtaaagattgcagggggtgagtatactgcaaacagggcctggctcccctggttcttgatccatttcacttccccaccaccccttgcctgcctgctcccctgcatgggtgagtgtctggaggagcatgagtgaagtcagcaggcgactctcatacacaggcacatcactagaggtggctcgtttcttgtcacgggaagaccaagtgatcctgcggctgcggggactgcccttctcggctgggccaacggacgtgcttggcttcctggggccagagtgcccagtgactgggggtaccgaggggctgctctttgtgcgccatcctgatggccggccgactggtgatgccttcgccctctttgcttgtgaggagctggcacaggctgcactgcgcaggcacaagggcatgctgggtaagcgatacattgaactcttccggagcactgcagccgaagtgcagcaggtgagcgcccagggctccccacccccagatgtactgttactccagggcggccctctgtgtccctgccctacttggcatgaccagcctgttgctgccttccttactaggtcttgaaccgctatgcatccggcccactccttcctacactgactgccccactgctgcccatccccttcccactggcacctgggactgggagggactgtgtacgcctccgaggcctgccctacacggccaccattgaagacatcctgagctttctgggggaggcagcagctgacattcggccccacggtgtacacatggtgctcaaccagcaggtgaagccactgcttggtagggggaacacataaataggaaggggtgtgtgttaggggtaaggcactcttacacatgacaaactgctcacaagatggtgtgcacagggccggccatcgggcgatgccttcattcagatgacatcagcagagcgagccctagctgctgctcagcgttgccataagaaggtgatgaaggagcgctacgtggaggtggtcccctgttccacagaggagatgagccgagtgctgatggggggcaccttgggccgcagtggcatgtcccctccaccctgcaagctgccctgtgagtgccctaggggctaggggaggaggaggcctg

SEQ ID NO: 16354 - DNA, 2300 bp, Homo sapien
agcggcgacttggacacgcataagcgcgtcttccgtgggaaagcgctcaggactgccagagacgccacaatggagcagtcacctcgcgaaggtggcttccgggaagagcgggcgtcgagactcaggctgaagaggaaaaagggcctagaggctgcacagatgaggtcgccaggaggggcgagaaggagaccgagtagcgcccagaccttcgggcggggacgctgtgaccctgtgctgtaagagtggaacccagacaggagccaaggaggaagcgacgtgcttctgtggagctttaggaatgcggcggttagggccactggtttaggggagttggctggaagggcgtggccggaggaagggccgcctccaccaagcgcaggcgccctaccgggcgggagggggaggagcgttactcgcggttgcgccccgccccgcgaacaaatatttgacattccaggcttatcgggaggaggggcccgaggagcaacgttctcccttcccccgcgcctgattcgcttaccgcttccgggggaggagacgcatgggccagtgcccgggtgggcggtccggagatggacagccgcgcaccaaggcccgcctccacctgtagggaaagtaaagtgctactcgctcgaacccgccgggcgaaggaagcacttcccatgctctccctgtcgccgtgtccgggcgcgagtcatttccgtcccgggcgcctgtttctttagctgccaagtggagctacgctgagctctctccccccgggcctcgcccctttcccgggcatgagctctggtgatgcgcccgggtgccccgctctctccattgtccaggggccgggccgcagcaccctccttgtccgaaagcgcgtggtgcggctcccgtctcagtctcgagtcgggctaggcaaccgcgtgactcagttcccgccacgctggagccccctccttcctgctggattattcagtttctcagtcacttattcagtttctcagtcacctccctgggagagtttgggaaagtaaggaacggccgggaaacgcgccataaaggagcctcaccaagctccactgggcaaagggaggaatgggagccccaaatgcggggctgtcaattgggttgtaggtgcgggatggaaaagggaggatctgcagcccgcatgcgcgcacacacgctcaacgctagccccccatcggccagagcgctcgcaatctccaggcagcttctccaccgtccagaaagggacgaaagcaggcaggcccccacacgtggggtaggagtgaggctccaggcccgttctacccctctcagcctcgtctagggtgcagctctctgcgatttggggggttcctttccccagcattgaggcctgcccactcccaacccacaacgaccgcgctctggcacttctcagtgccaggctagcgctcggccctagcatctgcgtggacaagcccttccctgtgatccctggtgaccaccccacagctctaacaacgctgatgttcccgccgccctcccctttcccaggtgacttctggtgatccccctacagggtgatacccggcaactctcaccgcccccttgaccctttgacttccatcaaccccagacctgccgtgttgacccccacagcccctagactgcctcctggtgacttccatactggagaaggcctctgtcttgcacgctcctttgcagaggcctgacgacccctggggaagagtggggggagagcggaagaatgggttagcccccaaaatcaggcaggaccagccctggaagtaggaatccggatcctaagcgtgcgcccaggccgggagcgtgagctcttgcgtcctgggttgagttctggcggccctcccccaaggttcccggagccgccccggtcacgtggccggcggggccggcaggtaactcgcctggagagggcgtgggccggtagccgccccgccccgcggggcgccacgggcgggtcttggcagcgcccactgagccagccgggccgcaggtgccgcccccgatacacggtgtcccgcccaagctgatccgcgtctgcggtcggtcggtgcgtgcgtgcgcctcgtcggtccgcgtgtctggccgagagcccccttcctctgcggccatgactccgccgccgccgccgccccctcccccgggccctgaccccgcggccgaccccgccgcggacccctgcccctggcccggatcactggtcgtcctcttcggggctacggcgggtgcgctgggacgggacctgggctcggacgagaccgacttaatcctcctagtttggcaag

SEQ ID NO: 16355 - DNA, 2300 bp, Homo sapien
ccttcgggaggccgaggtgggcggagttcgagaccagcctggtcaacatggcgagaccccgtctctgcaaaaaatacaaaaattagccaggcgtggtggctcacgcccgtaatcccagcactgggagaccgaggcgggtggatcacctgaggtcaggagttcgagaccatccagcctgatcaacatggtgaaaccccgtctctactaaaaaaatacaggcgtggtggtgcacgcctgtaatcccagctacttgggaggctgaggcaggagaatcgcttgaacccaggaggcggaggttgcagtaagccgagatcgcgccattgcactccagtctgggcaacaagagcaaaactccgtctcaaagaaaagaataataaaaattaaaaaaataaaataaaataaaaagaatctaagttgcaggagttgtcttgctatgggggcagccggatgggcatccggggtagtttaggggagccgcactgtgctaccagcccgtgcctcaggttcacgacccagcggcgacttggacacgcataagcgcgtcttccgtgggaaagcgctcaggactgccagagacgccacaatggagcagtcacctcgcgaaggtggcttccgggaagagcgggcgtcgagactcaggctgaagaggaaaaagggcctagaggctgcacagatgaggtcgccaggaggggcgagaaggagaccgagtagcgcccagaccttcgggcggggacgctgtgaccctgtgctgtaagagtggaacccagacaggagccaaggaggaagcgacgtgcttctgtggagctttaggaatgcggcggttagggccactggtttaggggagttggctggaagggcgtggccggaggaagggccgcctccaccaagcgcaggcgccctaccgggcgggagggggaggagcgttactcgcggttgcgccccgccccgcgaacaaatatttgacattccaggcttatcgggaggaggggcccgaggagcaacgttctcccttcccccgcgcctgattcgcttaccgcttccgggggaggagacgcatgggccagtgcccgggtgggcggtccggagatggacagccgcgcaccaaggcccgcctccacctgtagggaaagtaaagtgctactcgctcgaacccgccgggcgaaggaagcacttcccatgctctccctgtcgccgtgtccgggcgcgagtcatttccgtcccgggcgcctgtttctttagctgccaagtggagctacgctgagctctctccccccgggcctcgcccctttcccgggcatgagctctggtgatgcgcccgggtgccccgctctctccattgtccaggggccgggccgcagcaccctccttgtccgaaagcgcgtggtgcggctcccgtctcagtctcgagtcgggctaggcaaccgcgtgactcagttcccgccacgctggagccccctccttcctgctggattattcagtttctcagtcacttattcagtttctcagtcacctccctgggagagtttgggaaagtaaggaacggccgggaaacgcgccataaaggagcctcaccaagctccactgggcaaagggaggaatgggagccccaaatgcggggctgtcaattgggttgtaggtgcgggatggaaaagggaggatctgcagcccgcatgcgcgcacacacgctcaacgctagccccccatcggccagagcgctcgcaatctccaggcagcttctccaccgtccagaaagggacgaaagcaggcaggcccccacacgtggggtaggagtgaggctccaggcccgttctacccctctcagcctcgtctagggtgcagctctctgcgatttggggggttcctttccccagcattgaggcctgcccactcccaacccacaacgaccgcgctctggcacttctcagtgccaggctagcgctcggccctagcatctgcgtggacaagcccttccctgtgatccctggtgaccaccccacagctctaacaacgctgatgttcccgccgccctcccctttcccaggtgacttctggtgatccccctacagggtgatacccggcaactctcaccgcccccttgaccctttgacttccatcaaccccagacctgccgtgttgacccccacagcccctagactgcctcctggtgacttccatactggagaaggcctctgtcttgcacgctcctttgcagaggcctgacgacccctggggaagagtggggggagagcggaagaatgggttagcccccaaaatcaggcaggaccagccctggaagtagg

SEQ ID NO: 16356 - DNA, 2300 bp, Homo sapien
ttgaagcaccaaggaacccctcttgaggacagggctacccttccaggggcccatggtcaccggatgctgctgggctggcaagacatttagactgtggccagagtccaaggtggcccagcacctcttgatccttctcttcctccacataacctttgactggacttctgcccgtccctaggcctgcagaagagtctctggtctcccacgctgggttttcaccagatgggtcttcactgatcttctgttgggtcacgggtgaaggtgggggaggcaggggctttgggagtgggagttctgagccagggccttagcgggagatggctggaccttaagagagggtggggctggtcacagtggcacacatctgtaatctcagcactttgggaggctgaggcaggtggatcacttaaggccaggagttcaagactggcctgggcaacatagtgagaccccaactctacaaaaaataaaaaactagctgagcttggaggtgtacacttgtagtcccagctactcaggaggctgaggtgggaaggattgcttgagcctgagaggtcaaggatgcagtgagccgtgattgtgctactgcacttgggtgacagagagaccctttctcaaaaaaaaaaaaaaaaaaaaaaaaaaaaggaaagaaaagaaaaaggggccgggcacagtagctcacgcctgtaatcccagcactttgggaggccgaggcaggtggatcacctgaggttgggagttcaagaccagcctgactaacatggagaaaccccgtctctactaaaaatacaaaattagccagggtggtggcgcatgcctgcaatcccagctactcgggaggctgaggcaggagaattgcttgaatccgggagacggaggttacggtgagccaagattgcaccattgcactccagcctgggcaacaagagcgaaactctgtctcaaaaaaaaaaaaaaaaagaaaaagaaaaagaaaaaagaaagagggagggtggtggtagcccagtcaccaacatgtttcactataagaactcgagaagggcagggcaagatagtggcttcatagccaggtcagctgcttaccaagaagaaggaaggaaggggcaggacaaatttcttgggaccaggtgggatgaccagggtgcagctgccccttcgaaggggtgggtgtgtggaggatcaagacctctatttcccaaatactctcgtccctctatcccacagtgacctatggtgctggcatataaccagctgtcaggtctttgcccactctgttcgcccctgcttcctggcgcagggagtccatgtcctctctggttccccaggtttgcgagagtggagggggaccacgagctcccgatgcctctcctgctctgcaggggaacttgcagatggcccatggcgcagggtcgagactcaagcccactcccaaccccgcgcccgaactgcccggactggcggggtgacgctgcactctgcgcccctaaaacgaacagattaacccctctcttgggaactgaacatgctgacctggcctctcccggttccccccgcatctgtaaccccggggcagagttacaggggctgactggccgcacccaggtgccctcggggcagggtgtgctaagaattggtgtgggggctgcacaaaggtcctggtcagctcctggtcacctgaggcccaagaactgtccgggactcacttcctctcttcttgctttaaccggggtcgctcagcagcggccagcgctgcaccccttatcctctcccggtcttgtccgttccagatcctccaggtcagggggtcgccaagtgagagctgcgcagcgtggatttcgggtacccagggctgggcggggtacagcagcggcgagctgggttcccgggtgggcgactgacagcccggagccaggcgatacctcgatccatcgatgcgctcggcgctcagcgtggtccaggaagcagggggttgggcaagggcggggcggcgacctccgactgggaggggcgtatatggcggcgagtccctattggccagccatttgcgggaggcgggccctgattggccggggggatgcgggggatgcgggcggcggggttaagcgcgtcgccaccgcccccgcctaggcgagagcccagagagctgaacctgcatcccggacctgcggcgaccgtcgtacaccatgggcctccacctccgcccctaccgtgtggggctgctcccggatggcctcctgttcctcttgctgctgctaatgctgctcgcggacccagcgctcccggccggacgtcacccccca

SEQ ID NO: 16357 - DNA, 2300 bp, Homo sapien
taataggctgggtgcagtggctcacacctataatcccagcactttgggaggctaaggcaggaggatcgcttgagcccaggagtttgagaccagcatgagcacatagtgtggccctgtccctacaaaataaataaacaaataaataaataaattagccagacctggtggtgcctgcctagctgttcaggagggtgaggtaagaggatcacttgagcccaggaggttatggctacagtgagctatgatctcctcactgtgctgcagcctgggcaacagagtgagaccctgtctcaaaaaagaagaagaaagaaaagtaagaaagggctgttagggatcttaagtcagtagctggtggtccatgtcctatgtcatggcgcttaggaatttgctgggcaagccctgagccttgtggctgcagtctgacagttgatacagccctggggtactgggaggtcataggagcatggttcattcccttcctccatggaggatgtgtttggaggttggctggctgctgtgtccaatgcgcagaggaagcgggacccaattatacctacctggggccacacaaggccttcctcctgtctctccccaccagctcccatcatttctctgggccttgctccttctcctacctgcctacccacccatacagcagccctgaggcatggtgcctttctagggtttgtttttgtttgtttgtttgtttttttgagacagagtttcgctcttattgcccaggctggagtgcagtggcgcaatctcggctcactacacctctgcctcccaggctcaagcacttctcctgcctcagactccggataactgggattacaggtacacgtcaccatgcctggttaatttttgtgtttttagtagagatggggtttcaccctgttggccaggctggtctcgaactcctaacctcaagtgatccacgtgcctcagccttccaaagtgctgagattataggcgtgagcccctgtgcctggcctagtgtgttttgttttgttttttttttttttttgagacagggtcttactttgctgcccaggctggtgtgcagtggcatgatcacggctcactgcagcctcaatatcccaggtgcaagtcatcctcctgcctcagccttccaagtagctgggaccacaggcctgcaccaccatgcctggctaattttttatttttagtagcaacaaggcctcactgtattgcccaggctggccttgaactcctggcctcaagcattcctcccaccttggccttgcaaattgttggaactacaggtgtcagccactgcacccggcccctgtctggttctgttgtgtactgcactcaccacctccttcacctgggatacgttgggctggcaggagctggatgcaaggagatggagcgatggaaagctgaaagagggtagactgcctcttggggtccagtgtgaagttcacggcagaatcaggactggtacttccttctcccaaccaggtccaagaccctcattctagagtagggtcacgggggagaggggaatgttgctttgacaggggtcctggggtcagtatttggagtaagtatgccttggtggggtcctcatttggatgtaattactctgatctgtgctttttatttttatttatttatttatttatttatttatttatttatttatttttttgagacagagtcttgctctgtcgcccaggctggagtgcagtggtgtgatctcagctcactacaacctccgtgtcacaggttcaagcgattctcctgcctcagcctcctgagtagctgggattacagtcgcctcccacgacacccggctgattttgtatctttagtagagatggggtttcgccatgtttgtcaggctggtctcaaactcctcactcaggtgacctgccagcctcagcctcccaaagtgctgggattaacaggcgtgagccactgcacctgggcaatttttgtatttttagtagagacagggtttcaccatattggccaggctggtttcaaactcctgacctcaagtgatcctcccacctcagcctccctaagtgctgggattacaggtgatctgtgctttatcaacctgctttgttacttttcggtctctcctatccatctgaccaaacctgggcatgagaagggagtatgactcaggacatgatgcactgttgggacacaccaagctcagtgtcccctccgggtcactggctcaatatcctctcacaacaggctggtttacaacaaaacatccagggccacccagtttcctgatggtgtggatgtacgtgtcc

SEQ ID NO: 16358 - DNA, 2300 bp, Homo sapien
ggttggctggctgctgtgtccaatgcgcagaggaagcgggacccaattatacctacctggggccacacaaggccttcctcctgtctctccccaccagctcccatcatttctctgggccttgctccttctcctacctgcctacccacccatacagcagccctgaggcatggtgcctttctagggtttgtttttgtttgtttgtttgtttttttgagacagagtttcgctcttattgcccaggctggagtgcagtggcgcaatctcggctcactacacctctgcctcccaggctcaagcacttctcctgcctcagactccggataactgggattacaggtacacgtcaccatgcctggttaatttttgtgtttttagtagagatggggtttcaccctgttggccaggctggtctcgaactcctaacctcaagtgatccacgtgcctcagccttccaaagtgctgagattataggcgtgagcccctgtgcctggcctagtgtgttttgttttgttttttttttttttttgagacagggtcttactttgctgcccaggctggtgtgcagtggcatgatcacggctcactgcagcctcaatatcccaggtgcaagtcatcctcctgcctcagccttccaagtagctgggaccacaggcctgcaccaccatgcctggctaattttttatttttagtagcaacaaggcctcactgtattgcccaggctggccttgaactcctggcctcaagcattcctcccaccttggccttgcaaattgttggaactacaggtgtcagccactgcacccggcccctgtctggttctgttgtgtactgcactcaccacctccttcacctgggatacgttgggctggcaggagctggatgcaaggagatggagcgatggaaagctgaaagagggtagactgcctcttggggtccagtgtgaagttcacggcagaatcaggactggtacttccttctcccaaccaggtccaagaccctcattctagagtagggtcacgggggagaggggaatgttgctttgacaggggtcctggggtcagtatttggagtaagtatgccttggtggggtcctcatttggatgtaattactctgatctgtgctttttatttttatttatttatttatttatttatttatttatttatttatttttttgagacagagtcttgctctgtcgcccaggctggagtgcagtggtgtgatctcagctcactacaacctccgtgtcacaggttcaagcgattctcctgcctcagcctcctgagtagctgggattacagtcgcctcccacgacacccggctgattttgtatctttagtagagatggggtttcgccatgtttgtcaggctggtctcaaactcctcactcaggtgacctgccagcctcagcctcccaaagtgctgggattaacaggcgtgagccactgcacctgggcaatttttgtatttttagtagagacagggtttcaccatattggccaggctggtttcaaactcctgacctcaagtgatcctcccacctcagcctccctaagtgctgggattacaggtgatctgtgctttatcaacctgctttgttacttttcggtctctcctatccatctgaccaaacctgggcatgagaagggagtatgactcaggacatgatgcactgttgggacacaccaagctcagtgtcccctccgggtcactggctcaatatcctctcacaacaggctggtttacaacaaaacatccagggccacccagtttcctgatggtgtggatgtacgtgtccctggctttgggaagaccttctcactggagttcctggaccccagcaaaagcagcgtgggtatgtagcccttactcaaggcctccgggagctgggatggggtttctgccggactggagctggagctggaggaactctgctggtttgtagggacagcctgtgagctgtctctgatcagcgtgggcacagagccctgtagcattcttccaaggacctgctagctgtcacagtctccatgctgggcatagtgtaggtggccggcactagctgtatcttttcttatcctctgtatttctgtctacaggttcctatttccacaccatggtggagagccttgtgggctggggctacacacggggtgaggatgtccgaggggctccctatgactggcgccgagccccaagtaagcaggcactctcattccctccctgacgtctcgggaggtaggggtgaggtgatcatgggcaccacagaccttgggctctccccttgtccttggctgtc

SEQ ID NO: 16359 - DNA, 2300 bp, Homo sapien
ttgtggtcctagctactctggaggccgagacaggagaatcactggaacctgggaggcggaggctgcagtgagccaagatggcaccactgcactccagcctgagcaagacagagcgagatacatctcaaaaaaaaaaaaaaagatgaaataaatctgtagtcccaagtaggaagctgaggcaggaagatcgcttgaaaccaggagttcgaggctgcagtgagctatgatcacacctgtgaatagccattgcactccagcctgggcaacagcaagatctctaaaagcaaaagaaaagaatggttacaaataaatgtatcctgcagggtggtcctgaggaacactgatggtgttggagaacatctgattcagggtgtggtgtacattgggctttcagctgatgggctacgtaactgggtatgagactgcaaagccagacggagctggcatatggtgtttttttttttttttttttgagatagactttcgctcttattgcccaggctggagtgcaatggcgcgatctcggcttactgcaacctctgcctcctgggttaaagcgattctcctgcctcagcctcctgagtagctgcgattacaggcatgtgccaccacactcggctaattttgtatttttagtagagacggggtttctccatgttggtcaggctggtctcgaactcctgacctcaaggtgatctgcctgcctcagcctcccaaagttgtaggattacaggcgtgagccaccaggcccggctgagccggcataccttatatgaagctgtggcagggacacgtgggctgggtgctgacacaagtgtccagagctgtccttctgctcagccagggaggccggaggaactgatctgggaggcaaagggtgcaactcgattgatccaaatatatacgtccactcactgacacttaggggaggggttccaagcagagggcaggagggcagcaccagcgaggattcctcaagtattgtcatcccaggcctgcagagaggagaatggaagggttttaggcaggggagatacaaagtcatcgcaatctgtattctaggagcatcccctactctgtggagatggggtaaggggagcaggatagggattgagaagccgttgtggctggggagaagaaaacgaggtataggccgtgggaggagtggggaggaagggtctgaggtgctacccatctctggctgggtccctgtcactgggtggcagggagcagggtcttgggtatggtctggaaccagaggacgtgtacttgtggtcataaggctgggggaaaagattccagggccctggagaaagtcagtgcttgaggtgtggacaggaaatttcggaggagggctcaggcgcccatgaggtcaggaggctctagacagagagccccagagccaccagaggaaaaggaactcgagagaaagatggaggagcaaacagagggaggggaagggggcaggaggtgcagctcccccaagagggggggcaggaggtgcagctcccccaagaggggtggcagccctcttgggaagatgaggacagagccccagggaggcctggggttggcaaagggagcctgcagtttctttgtgggtgcgggggcctcaagggctacgagtctgagctgtgcgtgtgtttggacaagtccccagagtgtgtgtcttcctggggttcctagactgcgagtggcagtggcccggcggcggaggccgtttggatccctgtgtgagctgtagggggcgccctgggcgtcgggcccaggtcaagtgcgagataggaacggggtgcgggggccgatgagagctccccgcgggaatgtccgctgtggacgccctcggaggccccatctaactccagggcggcgagcgtggccgggcccagttcacgggctgctcgagccctgacgaggcagctgggggctgtctggcgtccacgctcacgttctgggccggcggaccccgtaccggccaggccgtggcggccacgggggcccggaagcgccgccgccagctggccccgcacggaactgtgtcccgacgcggcgcgcgctgtcgcgatccggcggcgggtgacgtggcggggcggggcctgagctgccgcggcggcggcggcgcgaccgagcatcctggcggcgccgggccactgggaggtaacgggctgggccatgggcgggcgcgccgggagcggggccggggctgggccgcgttctgtgggagccgaaccctgtgggtcttcgctgccgccgtcgggagcgggatgcggcccagaaacagcgcggggctggccgatcgg

SEQ ID NO: 16360 - DNA, 2300 bp, Homo sapien
tttgggaggctgaggtaggagaattgcttgaacccgggagttggaggttgcagtgagccagcatcatgccaatgcactctagcctgggcaacagagtgagactctgactcaaaaaaaaaaaaaaaaagagagggcacactttatgttgagaattttctggttttttttttagagacagtatcttgctctgttgctcaaaccagagggcagtgacttgatcacagctcactgcaatctctaattcctgagtttaagtgatcctcctgccccagcctccccagtagctaggactacaagcgcgtgccacaatgcccagctaatttcctcttcctttttgtagtgacaaggtcttgctttgttgcccaggctggcctcaagcgaccctcctgcctcagcctcccaaagcgctgggattacagggagtattttatttttttttgagacagggtctcactctgtcacctaggctgaaatgccactgccgcacaatcatggctcactgtagccttgacctccccaggctcaagtgatcctcccgcctgggcctccctacgtgctaggattaggcgtcagctactgtgcccagcctcaaggagaattttccatttctgtagttttgctgcatgtagtagactttttttggaagtgattgcaaatgaagttagcaaatgtaatataaagaaaagcactggattaaatgtgagaaaacttgcattctagacctaaatctacctcaaacttgatatgctatccaggactattcctttaacctctctttgatcaattttcctacctgctctatctctattttgctccagtgatccccatctcagtcagggtgaaaggcaatgtccttgcaagtacctagcaggcatcctcccctcaaattccttactgctctcctctagctcaccgggctccaggcaccttgcaaggagcaaagaaacggcttaagggcctctttactttcaggttctctgcctagaagtcctctcgatatgtggaataccctgccattcaccttctgcaagtcttcactcaaatgtcatttcctcagtgacactctcactgaagtggcaccactcttcctgctttgtctccccgcctccttacatcccttatcatcatctgacactgaatagacttgtttactgtttctgtctacctgcatgttaggtcctcactgctgtatccacagaatctaaaaaaatacctggcatatcgtaggcacgtagtaaacacatgttggatgaacaaccaaatctgtaaaatgaggccgtcacgccggatggatcatccatccccttaagatgaaactgtgctgcgactgggcccagtcttcttgcattaccatcctgagaagcccagcgaccaccttcaggggcatactcactttgcaggagcctgcagaggcggcttcaggttctccctcctcgtggacaaggtctaacaactgaaagcccgagttcccggcggcttctgggttccccggcgtgtactcggactcctggccgctcgaggtggtccccaaggatcggcggctggaaagcacccggtagcggccctcctgccggacctcccgagccgaggcgcggagattacggcggacacgctgctggctgtcccgtgacgggcgcagaacttcccgcaggagaggctggactggttcctcctagggggcaacaggggacggaggccagcgtaagcaggagttcgcgagcgggtcagggatcgggtttcgtaccggctgcacccgaagatgccctccacaccagctgcaccacgcccaatacctgggagcacacagtggccaccaagtggaagacattattctccgccgctctctccaaaccctccgacgtcttctgtgccgctgactcgaccgcgtcgctccggaggcgtttacaagcgagcacaagagcctccgccggctccgcactgcgcttccgcttcacccggagtacagcggtcctggcggcctccatagtggctgccgctgagcactgtgggagctcgcggggtgtgatgggatagctttccagttctgctttaggacccgccccccagcacgctcctcgacgctgcgaggtcccgccccgcgtgctggccgcggtaaaagtggtagcagcggaggcgagcggagggtttcccgcggcgggtgaggcgctgggtatgctgggaaggtggggtcgctttggggttctgtgtgcagcgagcatggtgtccttggcaccagggtttcggcagaggagcctagcgtgggcctacttggactcctccgcgtggggcagctcgggaca

SEQ ID NO: 16361 - DNA, 2300 bp, Homo sapien
ggagttcgagaccagcctggccaacatggcgaaaccccgtctctactaaaaatacaaaaaattagccagcatggtggcaggtgcctgtaatccctgctacttgggaggctgaggcaggagaattgcttgaacctgggaggcagaggttgcagtgagccaagatcgcgccactgcactccagcctgggcaacagagcaagactgtatctcaaacaaacaaacaaacctggaactatgtcttgtgttaacaattttatgaaggcatgaacctcttctggtgggcactacacaccttctctggctgaatgccctcatccattattatttgttctctcccagaagcagtctacactacagattcaggagatattctctgaacccctcctcattctccaagagttgtaaacttgcatggccatttacaaggaggaaatagaaaccaccatgccaagccctaattgtattagccgtcagactgcagagcagatggtccactacattcattcaaaatgtatttgctaggcggtggtggctcacacctgtgatcccagcactgtgaggggccgagacgcaaggatatcgagtctgggagttccagaccagcctgcgcaacatagtgagaccccgttctctacaaaaaatttttaaaaaaattagccgggcgcggtggcctgtgcctgtagtcccagttactcccagctactcgggaggctgaggtaggggaatcacttgagcccgggaggcagaggttgcagtgagcagagatggcgccactgaactccagcctgggtgacagagtgagaccctgtcttaaaaaaaaaaatatatatatatatatatatatataaatatacatatattaaaattaaaaattacccgagtgtagtggcgcgtgcctgtagtcccagctactcggtaggccgaggtgaggatcgcttgagcccaggaggtcaaggctgcagtgcgcctcgatcacaccactgcactcagcctaggcagcagagtgagactctgtctcgaaaaaataaaataacaaaatttattaaataccttctatgtgccaggcactatattagggactggagccaccaccacaagctagagaagacccttgccctccaagagcttagactctaatgagagagtaatacaaattacagactacatgaatgcaagaaatacacagagcgttgtagaaagagaaaaccaaggttacagaaggactctgaggaaactagcatttgagatctacaagacagaccgggataaaagttggggaagagtttttacaggtcaggaatccttaccccaactttcccaagaaaaggccctaaggtagaaagaactaggttgcataagcaaaatgtgccaaaagcctgagcgaccgaagcacttttgcagaagccccccgctcctcatctcctatcacatcttctgctcaatcaagctgggccttgtcgacttcggaaaggcgtttggattttgttctaaaagcactgggagccactcaagagttttaagcagaagcgtatctacactaggcttacgcttttacaggaccactctggttggcgtgtagtgaatacacgactctccaattactcagaacagtgagtggcaaagacaacaggtctggcaatcagagaactcgtggcccagttaggggtgcgatggttggagctactgcggtctctgtggctgaggggaggcgccaggcacgagtactgcgacagagccccgcgagtggcaggcacccggctgcactgcagagccggggccagcctagaaccccgctctcctgcaggcccgggtgtcccgagctgccccacgcggaggagtccaagtaggcccacgctaggctcctctgccgaaaccctggtgccaaggacaccatgctcgctgcacacagaaccccaaagcgaccccaccttcccagcatacccagcgcctcacccgccgcgggaaaccctccgctcgcctccgctgctaccacttttaccgcggccagcacgcggggcgggacctcgcagcgtcgaggagcgtgctggggggcgggtcctaaagcagaactggaaagctatcccatcacaccccgcgagctcccacagtgctcagcggcagccactatggaggccgccaggaccgctgtactccgggtgaagcggaagcgcagtgcggagccggcggaggctcttgtgctcgcttgtaaacgcctccggagcgacgcggtcgagtcagcggcacagaagacgtcggagggtttggagagagcggcggagaataatgtcttccacttggtgg

SEQ ID NO: 16362 - DNA, 2300 bp, Homo sapien
gattataggcgtgagtcaccgtgcctgggctgttccaggttttgaaaagacactgtggtcctggttttagactcagcaacatcacagacaagaaaggaatcctatggattaaagttcttcactataagttttttttttcctccagttcaaatgggtaacgtgccaatgtagtaaaggtttgagggaggcacgtctgacacaggcacatgaacacccagtcatcacgcttatgaactacaaaacgatgactcttaaccttgaagtgacttcagaattgattccacatggaccacaggattagtatttcaggactctaccatatggatcctattgatatgtttgacacctggtccagttttacttcactaaactgattgatataatgtgcatgattgtctaagcctttctaattggatgaaatgccttctccgtccacaaccccctccttctcctcctgcctcagctgaatccaccttttaagccttccttgaacattcagtcagatatggccatttctttctctactccaacatttgttggacacagttttctaatgcacattacagattctgacagttctagatattctgtctgtaaaataaatgttagtacatgagataaagtggattatagcaatgttgttaaactgctggttgcaacccattgatgggtcctgaccagcaagtaaaagtgcagctgggtgccgtggtgcatgccggtagtctagctacttgggaggctgacgtaggaggatcgcttgagtccaggagtttaaggctgtagagtgtaatgatcatgcctgtgaatagccactgtgatccaacctggacagcagggagatcccatctcttaaaaacaataaaaatgaaatagagcatatcagagggccttgttcgtaggaagtcagtattgttttgtggaacatttagttgtatgcgtacatgcaggtatgtgtattgagtctcattttaaagtatatttcttactggggttatcagaaagtttgaaaatcattagactaggggataggtatgctgagattttagtagtagagttttacctggacaaattgtctactttgaacctgactgccggcctgagtttgttcagggaagattgtttctaatctatttgctttttgtttgtttgttttggtgacggagtcttactctgttgcccaggctggagtgcagtggtgcggtctcagctcactgcaacctccgcctcctggattcaagtgattctcctgcctcagcctcctgagtagctgggaatacagacgtgcgccaccatgtctggctaatttttgtatttttagtagagacgagggtttcgccatgttggcaaggctggtcttgaactcctgacctcaggtgatccgcctgccttggcctcccaaagtgctgggattacaggtgtgagccaccgtgcccagcctgtttctcatctatttgtgtaagaattccatgtttacttactctagataacttcaaaagaaaaaaaactctggccaataaaatgccataggaatgtttagggatatgtggagtaggcattctttctaagttttcctgaagatgcaccaatgtttaacaagaaaggaagggcagtgtagaacacctattgctttctgcatggtaagagggatgggtattgggagagcccacacctgctgaggagtgcctttagactttgagcggtggtgtttctctccctcccagaaatagatctctttggggagacaggccatacaagacgtgaatctggtgacattttacttgtttgaagcaaaatttttttagatgatggagggtttttaaaaattgcttttaaaattaaaatttgaatagataagaagtaatcactataaaaaataatgaagcataaggaatgctagtattagctgggtgtggggcactcacttgtagtcccaactactggagaggctgaggcaggaagaatgcttgagcccaggagtttgagtccagcctgggcaacataacgagaccccatcttttaaaaaaaaaaaaaaagaaaaagaatgctaatatcgtgaacatttatgttcccaccacccaatttaagaaaaagaacaatacttttgaagtccactgcgtacccctccttgatcccatctctttcccttctcttttaggagttaactatcctgattccttgctatgctttttagtgtgatccctgaagaacgtatcactccattttgcatagctataaatttcatagaaatggaatcgtattgcatgtgttgtgtgatttgctgtttttgctcatcattatat

SEQ ID NO: 16363 - DNA, 2300 bp, Homo sapien
tgccgtggtgcatgccggtagtctagctacttgggaggctgacgtaggaggatcgcttgagtccaggagtttaaggctgtagagtgtaatgatcatgcctgtgaatagccactgtgatccaacctggacagcagggagatcccatctcttaaaaacaataaaaatgaaatagagcatatcagagggccttgttcgtaggaagtcagtattgttttgtggaacatttagttgtatgcgtacatgcaggtatgtgtattgagtctcattttaaagtatatttcttactggggttatcagaaagtttgaaaatcattagactaggggataggtatgctgagattttagtagtagagttttacctggacaaattgtctactttgaacctgactgccggcctgagtttgttcagggaagattgtttctaatctatttgctttttgtttgtttgttttggtgacggagtcttactctgttgcccaggctggagtgcagtggtgcggtctcagctcactgcaacctccgcctcctggattcaagtgattctcctgcctcagcctcctgagtagctgggaatacagacgtgcgccaccatgtctggctaatttttgtatttttagtagagacgagggtttcgccatgttggcaaggctggtcttgaactcctgacctcaggtgatccgcctgccttggcctcccaaagtgctgggattacaggtgtgagccaccgtgcccagcctgtttctcatctatttgtgtaagaattccatgtttacttactctagataacttcaaaagaaaaaaaactctggccaataaaatgccataggaatgtttagggatatgtggagtaggcattctttctaagttttcctgaagatgcaccaatgtttaacaagaaaggaagggcagtgtagaacacctattgctttctgcatggtaagagggatgggtattgggagagcccacacctgctgaggagtgcctttagactttgagcggtggtgtttctctccctcccagaaatagatctctttggggagacaggccatacaagacgtgaatctggtgacattttacttgtttgaagcaaaatttttttagatgatggagggtttttaaaaattgcttttaaaattaaaatttgaatagataagaagtaatcactataaaaaataatgaagcataaggaatgctagtattagctgggtgtggggcactcacttgtagtcccaactactggagaggctgaggcaggaagaatgcttgagcccaggagtttgagtccagcctgggcaacataacgagaccccatcttttaaaaaaaaaaaaaaagaaaaagaatgctaatatcgtgaacatttatgttcccaccacccaatttaagaaaaagaacaatacttttgaagtccactgcgtacccctccttgatcccatctctttcccttctcttttaggagttaactatcctgattccttgctatgctttttagtgtgatccctgaagaacgtatcactccattttgcatagctataaatttcatagaaatggaatcgtattgcatgtgttgtgtgatttgctgtttttgctcatcattatattcctgggattatccatttttaggtttatgtgtgactgtaatttattgtttagatgaaagttttcctggtttgacttgctctatcttcatatttttccttaagctaagggttcagcatacgaaggcagtattggtggcacttctttaacagtaccccatctcttctcctagccttgagggctgcacctagatgaacttgtgaggctcatttgaaccttttggaagcaccgaagcctgctgaagtttccagacatctgtatgaatctgttgtagttttttaatgttatatgctgaatataaaaccaagtaactcctgctggaaacatttacaatatcgattaacaaatactatcagtggctttgacatttttgtcagtttcttgatttttttccccgcttttgtctccccttcccccctccacattttggggcattgtgctgttaatagattttttttctgttcgtttgtttatatacctcctgtttccttctgatgttaatagatttctgacagtcagacttgtccacaagaactcaactggcaaggctgcttttctgtgctaaaactggggagctagtgggcaccatgaagatcttctgcagtcgggccaatccgaccacggggtctgtggagtggctggaggaggatgaacactatgattaccaccaggagattgcaaggtactgggttggtttacagca

SEQ ID NO: 16364 - DNA, 2300 bp, Homo sapien
gtgccatccctggtttacaattgaggacgctgttcatcaattttttttaacttaaaaaataaataaaacaaggccaggcacggtggctcatgcctgtaatcccagcactttgggaagccgaggcaggcagatcacggggtcaggagatcgagaccatcctggctaacatggtgaaaccccgtccctactaaaaatacaaaaaaaagccgagcgtggtggcgggcagggcctgtaatcccagctactcaggaggctgatgcgggagaatggcgtgaatctgggaggcggagcttgcagtgagccgagattgcaccactgcactccagcctgggcgacagggagactccgtctcaaaaaaaaaaattgtggtaaaaacacataacataaacggtcatactgattgtatctaagacataaatgcacttactttgacaatgaaatagttctatatttctgtgaaaaattatttcacccagactaaacatttttgtgctttacctcagaggcaacgtcatttcttttttttcttttttctttctttctttttttttttttaacaagaatgagtctccctctgttgccaggctttagtgcagtggtgtgatcttagctcactgcaacctccacctcccgagttcaagtgattctcctgccttagcctcccaagtagctggggttacaggcatgcgccaccatgcctggctaattttttgtatctttagtagagatggggtttcaccatgttggccaggttggtctccaactcctgacctcaagtgatccacccgcctcagcctcccaaagtgctgggattacagatgtgagtcactgcacccggcctggtaattctaaagaatattcagttctagatattttctaattccagtctgatttagtcttttgcctatcagtttagaagtgtgtttcttaatgtatgaaaaattttttttcttcagttgtgtttctgatattaagatttttgacttgttttgcattgtggtcagaggatatcacccttttgatgccagttctgtattagctgtctaatgttatttaacaaattaccttaaattttaatagcctcttaatatttcttactaacttggcaggtcatcagtctatttaaaagatttgcacatattttttccatcatctttagttattttcaacagaagggtcactgtgcctattgagtcagaccgttatagatgaaagatgtatgtgtttactaaagacagaagtaaaaatcttcaagatgcaaagaagttattttctgatggggaaaatactttttagtgaagctctctgagttagagtcggtaaaggaaaacaagccatacatattgcagcagagcggctttaacacaaggagctggctacccagctgtgggagggctagaaagcaaatgggaacgctgagtaacctaacagtagagattgcagggagcagttaccttgcctagggctgagaaactaaacgagaagattaggatttccagaagccacaagcattgaggagagatcctgtggaccactgtccaagtacggctgcagctctgaggggcccaaggagctggttatgggatcattgggaaaagttggagtctgcaatcaactgcccctaccgagaggaccctgatgagaacagcagcatgcagaaaggagcaagcctgctctgtcctcctaccttccagtcgccctcttggtcccccttttggctgtacctaacagttggaaaaaggagaacatggtttgcagggctctggcatcacttagtagaggatagaagagtgagtgtggagcagggacagtcgcttaataaagggcaaggggctgactcacaagacctgcccaactcagccagagctgttctgccaggggccagaaaggccatagggccctgacttgcactgccactgccagctgtgactctagaactttgcaaagcacctttccacttacttataataactggtagtaagtgacggccatgtcttccttagaatgtaaaatactaccaaggtatccgggctgccgtgagcagggtgaaggacagaggacagaaggccttggttctcgacattggcactggcacgggactcttgtcaatgatggcggtcacagcaggtgccgacttctgctatgccatcgaggtaagccattcccttcaggtgtgtgtcctgcatcttgcatgggaaatcccctatgctcttgcactttccccgtctgttccttcacaaacattcatggagtgctcactctgtgccaagcacagagccaggctctgagcgtatagagat

SEQ ID NO: 16365 - DNA, 2300 bp, Homo sapien
atcaaggctctttgcaaaggccactgttgtgggcacagcatgctcgggtcaggggctggggggtttattgcctgtgcgtgcaggcaggcgtcaggcctcagagctggtgttcaggctgccccagggagggaatgagggcagggagggttgttcaggtgtgtcctctgtcttaggatggtcttgtcgcattttaatctttaatttcttctctgttaagtgaatatcttacaactaatagcgtggtgttccctctaggtgtttacagtcgagagttcagcagcttctcacaaactgttgagaaaagtaagtgagaattgttgttgctgaaatagtgagaggacctgtggggtctgggttgatggctttgaagtggcattggccccaggggaacaaaggagtggtggctcgcttgcacccctgtgttgtcttggttgctgcctggagagcagccagaggccttgggagctgtcactgaaatagaggcaggcatttgcactctgctttgtttttttgtgtctgaagaagtttaggcttttttcctcacttcacataagctactgttgcggtagaattaaatgtaggatgtgtttctgggacatcagtgctgagggagccagtgctcacagcctgatgggagatggcatttctctccctggccagtaactggtttgatttcctctccaaaggggaactcccttcaccagaactgcaggctcgcactgagtcctggtgtgcacatgcgggagaaatttcttttgcttttatcacattgtgctcctgatctcatccgtggtctataggatgccccccaaggagaggatttttccacaaagcagataaaagtggtgttccagaaccatttgccggaaaattcaaagcggagaatgcaactttgagagatttttttttcctgacaaacacaatactttagtatgaatacagtaattttacggttttctttctaagatcttcaaggctaaccacttggaagataaaattaacatcatagagaaacggccggaattattaacaaatgaggacctacagggcagaaaggtgagtagcgggagccttttggccacgctgggctgtgttagggtggtcagcacggcactgaagtagcccaggccccaccctgtccctggagtctcacagtgggtcctccacatgcaaccttacctcctacgagctcccaccatcaagggtgtggtgaagctttcatggagctgcccggtgagcagatggttgcactgctcttttttttttttttttttttttttttttgaaaatggggtctcgcgctgtcgtccaggctggagtgcagtggcacgatcttggcttactgcagcctcgaccttccagcctcaagcgatcctcccacctctcccgagtagctgggactgtaggcatgtgccattatgcctggctaatttttgtattttttgtagagtcagcgtttcatcatgtggcccaggctggtcttgaactcctgggctcatgcgatctgccagtctcagcctcccaaagtgtcggggttacaggcatgagccaccacacctggctgtactgctcttagctcagcctcatctctgctccttcaggtcaggacagagcagctctcttggggttcctaggagcagagcatgtcctttcctctccaccgcactcctgtcttcattccccgtccacggcttcctgctgcagtcaggcttccgggccctgaaactgcttctgccagcaacctcgtcgttactcccacggtctccctgcaggcttcatctgctctacccgcttgtccttgtgacccgggacttctgcctgtgctggggaggtcgctttcccctcaccttcctggctgctccttaccttgcactgctccgtggcactctccccgtgtcccccgcttcccctactgcatcctctctggtaatcacgttccttctcatgtgtgaatcagtgaccatcagagccggccttcactctttactattttggattcaaatctcatgtccagctgccatcctgtcacctttccttgaatatgccacaaactggactcacccaacgcggagctatcatctttcatctttcctgccagtctttttttaaataacagctttattgagatgtagttgacataccacaaaattaatgcatttcaattgtacagttgagtgatttttttaagtaaatatatggagttagccgtcacccagtctcatttagaacatttccaggcccgacatggtggcacatgtctgtaatcccagaacttcggaaggccaaggtgggaggatcgc

SEQ ID NO: 16366 - DNA, 2300 bp, Homo sapien
cagctgacatacacaaaaaaacatctggagaaggtgataaaatgaaatgtgtagattaactaggccatctagccaacatcagaatgtttagtggagaaatattcaggaaagatgctacctagcaaggtgggacatcaccaatgaggcctaagatgctgagcagagggttgaaagaagagcaggaggccgggcacagtggctcacacctgtaatgccagcacttggggagaccaaggtgggcctaggtggcagaggctgcagtgagctgagatcgcgccattgcactccagccattgcactccaggcaacaagagcgaaactccgtcgaaaaaaaaaaaaaagagagagaaagaaagaaagaaaaaagaaagagcaggaatcttaggacatctttacttcataactgacagggcagaagatctttctcagaaaaggagtgggaggtagggcatttaggcacagaaacgagtagggccaacagctagaaatagcggaacatgaagaactgatgacatttcagggagaactgacaggaataataggcatgggtctatcaatctctagcatcataggattaaaagggtactcaaagcattcaggtaaaatcccaacccactgtacaaatgaaataaacatttcttcaagggggcggcatgcctctaactgaacacctccagcaatgagaaatgcccaactttaggaaatcagagttttggaggtgtatgtgaatgaggttcctttattttcttttttttaattttattctttttctctttttttttttttttttttgagacagggtctcactctgttgtccaggctggagtgtagtggtgcaatctcgactcactgcaacctccacctcccggggttcaagcgattctcccgcctcagcctcctgaatagctgggattacaggcacgtgccaccacgcccagctaatttttgtatttttagtagagactgggtttcaccattttggtcagacttgtctcgaactcctgacctagtgatccacctgcctcggcctcccaaagttctgggattacaggcgtgagccaccacgcccggcccaattcattttcaattcaacaaatatctatatttatatctcaatagctagtgagtgcctactacgtgccagatactagacactggactgtaagtatgaataatatagacatggcccctcccctgtggatcttataatgaggaagacgagcacataaacatgcaagtagaacaggggaagtagagggtgctgctcaaacacagggtggggcactcaacagacagcccagcatctagatgtcttcacaaaacaggcaatgtctaggctggggcttgccgacgagttagctgagggcagggtggagaggcccaagggagtaggaggcttcccagcttccaaagaagttaagagtgttgcaaaaaagtggagtccagatcttgaaggggagagtgggcttaggtccgggggcatgtgaagcgccctccgtctgctgcgctgggggagatgctgcggtatcctggagtggtgtgaaggaggccaggacctgcgatgggaagacggagacgggaaggccctggtggcccaagggatgaccaaaagtgaagcgctcctctatgacaagattgagacaaaaataaaggaataaagttctgaatgcggtgggagagtctcctccgtcctccctcacctttgctgggcaggaaccaaacctgcttgccctcggtttgccccatcaccgacgggtgtggtcgggggcacagctcttcgcccttcttctcagataggaaaactgaggcccagggtcctgaggcagaaatcaaggttttctcctcgaaatggcctcccaagaggctgcccggggtctcacacgatccttcgagggtcctgcggcctgccccacgcctccgccagccatcctcggctggtcgtctttgctatggaaacggtcctcccgccctgctccgcgcctccgtgtcttcagtgcactctgggaaatgcagtcccgctctgtttgcctacccgcggcgtgagcccactccgcgtccttaaagaactataagtcccagaaggctgtgcgaaactccgccggtctctgggggatgtggtcttgaaggagagacccaggaacctgcgggcggggccggagggagaggggaggacgcccccaatgggcagactcctgggcggggtccgggtcaccattggctccggcggcgcgagggaggcggggtcagaggaatgaagcgcggagctgttcgccgctccaggtgctgagtctgagggaggc

SEQ ID NO: 16367 - DNA, 2300 bp, Homo sapien
gctgtaacgttcactgcaaagacctgcagcttcattcctgagccagcgagacaacgaaaccaccagaaggaagaatctctgaacacatccgaccatcagaaggaacaaactccggacacaacactcactgtgagggtccacagcttcattcttgaagtcagtaagaccaagaacccaccaattctggacacaggaggggggagatccacattacaacatacaaaataggtaaatgtacatattgattaatagaaatgtacatattcattaatataaaattagttcctaaatctattgggtataaggaaacaactttctaatgtagttaaggtttcagtgtggtggcttgcacacacactgttggttatcagaccagcgccagccagtcttaaccacagaggggcatgataagctctggagaagagagatgctgagccttcagggtcagaggcaggccagaagggaccttggagggcccttgaagacaaaatcgccagaggctcaactgtgacatgggagggtatacagctctggggacagtggcttctgggatcctggatgacacttggtgtcagagtgggcttggcaagtttcttaaattctctgaacctgttaccccaggtgtcaaatggggatgagaatatctatctcacaggttgttaaattcagttgagatagtgtgaagtgcctcgcctggtcccctgctggtgttgctgcttggttggctttacagcagtagtgcgtcgcagaggacggcaggtggcgctcgagcccagcagttttgagatgcacgccccagaaggtcgaggcaaaacaggcgcctggtgtcagtagaggaaaggtagccgaggtgctgggacacgctttcgcgaggtcaaaagctagtgggcgcgcatttcggcctcaaacgctgcagagagggtcagaagctacccaggtcccacttagtggttcagccttgttttcttgtcaggggatcccggttccctgttgctctgggaatcgcaggttctccagcttaatagaagcggatctggctatattcgttgagtcccatctcttctcaccgttttcatggaaaccagagggtggggcactttattgaacgttttaagttactggaagttggatatccagaaggctggacccacgccgggtcgagtgaggaactggaggtccaatccacggggatgttaatgtgttttgttttgtttgtttttttgagacagggtctctgtcacccaggctggaatgctgtggcacgactatagctcactgcaacctcgatctcctggattcaagcaatactcctgcctcagcctcacaagtagctgggccaccacgcctggctaatttttgtttgcttctgtttttgttttgtttttgttgttgttttgttgttgtaaagacgggggtggggggtggtctcactgtgttccccaggctggtctcaaactcctgggctcaagcgatcccctggcctcggcctctcaaaaagtgttgggattacaggtgtgagccaccaagcccggtcccttgtagatgtttttctttttgttttttaatttttgtgggtatacagtaggtgtatatatttacggggtctatgagatgttttgatagacatgcaacgtgaaataagcacatcatggagaatgggatcctcgtggatatgaaagatagagcaggcaacaagaaaggcagttgacgttaacgacgggtccctgatgctctcccaggctgggttaggactaggtcccgctgaatgcctcatcctccgccctccaagcccaggagtgccttcttgcccaccggggcgcggggtttgaagaggctttgaggcaccacttgggcacgtggagacctctgccagtctctctcgtcccgcccctgcgttcccggtttccaggggacttgcgagtcggtcttttctgccttcgaactcttgagtagctagcagaacccggaggagctctcagaaccccaggccgttgtcatggagagagcgcgcgcccaactacgtggcttgtgattggctgggaggcacgcccccgccctccccttccagcccgtggctcggcgacttacagggagggagaacatggctgctggcttttagcacctggtgggtttcgcgccttgcaactcgacaactgccgggacggagtctggctgcgcgaccccctgcggcaggtgctgggcgaggcgcctcccctgcaactagcctgccgcttccctcccggcacccccgccgccagccccgagcgcggacctggagcggagaagagaggtcggtgcct

SEQ ID NO: 16368 - DNA, 2300 bp, Homo sapien
ggtgcaatcttggctcactgcaacccccacctcccaggttcaagcgattcccctgctacagcctcccaagtagctgtgagtacaggcgcacgccaccacaccctgctaatttttgtatgtttagtagagatggggttttactatgttggccaggctggtctcgaactcctgacctcaagtgatctgcccccctcagcctcccaaagtgctgggattacaggcgtgagccaccatgcccagcctgcagttgccttaagttgcagctactaagtcacttgcctcagagaggcctcccggtccactctaattcatacttgtgaattatgcattctgctaattccagaccactatattcacaaagcagtgatagaaagcattcattaatttttatatatattttttgagacagtctcgctttgtcgcccaggtcggagtgctgtggtgaaatcacagcccaccacaacctctgcttcccgggttcaaacgatcttcccacctcagcctcccaagtagctgggaccacaggcgcacactattgcaaccagttaatgtttgtattttttgtagagacagggttttgccatgttgcccaagctggtcttttaattcctgggctcctccctcctcagcctccctgtgctattgacgtgttatttcattacttgttagccccttgcgcaggattttgtgtttgggacaagccaacagtgatggaaattttctcccttttttgttttgttttttttgagatggagttttgctgttgttgcccaggttggagtgcaatggtgcaatctcggctcaccacaacctctgcctcccagattcaagcgattctcctgcctcagctttctgagtagctgggattacaggcatgcgccaccaagcctggctaattttgtatttttagtagagacgagctatctccatgttggtcaggctggtctcgaactcctgacctcaggtgatccgccagcctcagcctcccaaagtgctgggatcacaggcttgagccaccgcacccggcataaagcatttatttttgaatgttcatatttttgataaagcagtgtgacatcaggaacatttcgttgcagtcattttctaccatgttggtatgcaatgctctaatgttaagaaatcaagctgaaatctaggaaatgtagcctgaatgtctgtgatatataagacataattacataaacgtaatagctgtatctaaaagttgacctatctttgtgttgaaaatttccatcgggccgggcgcggttgcccatgcctgtaatcccagcactttgggaggccgaggcgagttcgagaccagcatgaccaacatggagaaaacctgtctctactaaatatacaaaattagacgggcctggtgacgcatcgcatgcctgtaatcccagctactcgggaggctgaggcgggagaatcgcttgaacccaggaggcggaggctgcggtgagccaaaatcgcgccattgcactccaacctaggcaacaagagcgaaactgtgtctcaaaaaaaaaaaagaaaatttccatcattgtttgcttgtcccaaacaaaatcctgcgtaaggggatacgaagtaatgaaataacacggcagtagatctgcctttgcacattgctcaggaggccacggatttgtccgaagtttcttttttctctaaaatgagaaatggaaaattgccttttgaagaagatgtaaatgccccaccctctgacgctgtctcactcccttcctgtgtcactcttaccgctgaagtcaggacctgacattatcttgttgacatgtttgcgtttttatcgtcagcctcgtcgaaaggggcgtacgattgctccccgaaaccagggtctttcccggccgattccccagctagcaacaagccccttgcaaagaggaggcggacagtgactggaatacagggacacgcacactcgagccacactggccgcctccctcggccctcgcaagggtccctaacgcgccttcggaagccgcctaggcggggcctgcgcgcgcgggcctctgggaagtgtagttcgcgcgcccggcgtggacccggggttgcaggagcgaggctccgagtgcgcaggcgcacttccagttctgccccaccgctgcggccattgtccgaccccggtgcggctgaggcccctttgggcagcccctccgcagatcagaattggagataaccgaggcttcggcgggggcgggaggagctgcccgaggctctgggtgggccggaggtcgcgaaatccggagccccccagaggcggtgattctgagtgc

SEQ ID NO: 16369 - DNA, 2300 bp, Homo sapien
tatcgtacttccagtattatccttctattcctgctaaaacagatccccttaggttgaacttctcttaatattctctgtatgcagcatatctttttcctcattaggcaatatattctgcctatccaaagccatttgttctttgagttcaaaatctatctaatccatgagatgtgatatatactaatatttatttcttcctttcctgacaacaaatatcatttatatcatctacactataaaaactcagatttaataatatgccatctgatggttttacccttttctagttgccaaaagattgtcttgtttctcttcaagctctgtttattatggtattttaatatattttatctgtgtggcagagcatatagaaagcaatcagaacatacttgactgatcagtaagaaatctggttagcaagaaaacttttctcatttaatcatttccacaagcattttttgcatgtcccactgagaacaattcttaaaaaaattacaaggcattctctgtcctcaggagttgagttgattcttattgcagggtaaggagtttggggatttagggtcttattgtgatttcctctctcaacattttattaggaacattttcaaataggaaagttgaaaaaaattttacagtcaataccacatacctaccaccaagattatcacatttgttgttgttaacatgttattttatttgctttgttaacatgtgttttatttgctttatcatgtatttctttagccatctatcaatccatcttactttttgatgcatttccaagtaagttgcaggcataattacatttcacccctacacttttagtatgtatgtcgttaactagaattcaatttttttcagtttttaaaagaaaatgttatatgcagtgaaatgtacaagtcttatatgtaccatccagttggttttgacaaatgcattcacttgcctaacccaaattcctattgacatagaacatttccatcactccaaaaagctctctgcccttagtttttaaaggttatcgttcttaaaccctaaaaatcaatttgcttgtatcagtgttctgaagtaaaaacagggacttaaagatcaatttattagccagattgaaataaattttttggtcaaaggaggtaattagtgtagaaccggagctcaaatagatgaaaaccacagtaccagttgtaaagacaaagatgatttgcctcctgatcaaggacctccttgatctccaagggttatactttacaaactgagaaaatgcagtatttcaaataatcttttcagttgtatcactgggtacagattttctctgcagcatttggagacctggaacctgagagttgacagtaaagaaattatgaaatggatatattaggaagacagattttgtggtggtttataaaaggataggaggcatggagagcatataggatcctaagatgggctgtgatcctgttccatttgtatctgtgcctaacacagtcctgctcacttatttccttattttctaaccaaccctcctagatgggctttcctcattctctggacttaccacatactctgaatctgcagtctttgctatcatttcttcacttttccttttctccattttgggtcgtcttctcaggatacaggagtaatttcaaaacagagtcatatgtaacttatatgtctttcttcattcctactctagcagtgtatttcaacaggaaggaataggggacttttgtactttggatttctttcagactggaagaccaggcctgaagtcaaatcatcacatttgcagcaggatgtatcagaagtatcccactgcacacatgatctcttacatgctacattagaagactcctgggatgttagcagccagttagacaggcaacaggaaaactggaagagacatctgggatcagaggcatccacccagaagaaaataattacaccacaagaaaattttgagcaaaataaatttggtgaaaattctagattgaacaccaatttggttacacaactgaacattcctgcaagaataaggcctagtgaatgtgagacccttggaagcaatttgggacataatgcagacttacttaatgagaataatattcttgcaaaaaagaaaccctataagtgtgataaatgtagaaaagcctttattcatagatcatcgcttactaaacatgagaaaacacataaaggagagggagctttccctaatggaacagatcaaggaatttatcctggaaagaaacaccatgaatgtaccgactgtgggaaaacctttctctggaagacac

SEQ ID NO: 16370 - DNA, 2300 bp, Homo sapien
gataatagcgttatatcaaggttgagctttttaagtgtgataatggcattgcggttgcctacagagatacaggctgaagtattcagggatgaagtgtcaggatgtctccaagtaactctcaaatggtgcagtcaagaaaataaaaatacaatgaaatgcgtggcaaaatgtgttgacaactgatgaatccaaatgggagaaataaaggtgtttgttgactgtacaattttaaagcatttctgtgggtatgaagtttttcaaaataattagctgcgaggaaaaactaatgctttgctcgtggggatgccggctgctcctgcatcccaccacgggcccctcggatgtgtggatttgcaggtctcgttgttttatttatttatttaatttatttatttagagatggagtttcactctttcggccagtctggagtgaagtggggattctcctgcctcagcctcctgagtagctgagattacacccacctgccaccacgcccagctaatttttgtattttttggcaaagacagggtttcgccatgttggccaggctagtctcaaactcctgacctcaggtgatccacccgcctcggcctccaaagtgttaggattacaggcgtgagccagcgtgcccagccaggtctcattatttctgatgctcaacctgatccctgctgttgccgggtgccccatatctcttcttcttgcatacaggacctgtgacctgtggatggacgtcgccaagagcaggtatctcatcagagaaggagaaattccagcgtcgtttaaaggagggaagggagaaaagaaggaagaaaaggagaggaagccaaacaagctcgcctcttgcaggcttcctgcggccgggcggctacgagctctgcagtcctgggagcccttcacggcgcatcaccgccccccggtggccaccaggcaagcacgcggcgcccagcagggaggtggaaggggtcctgcaaccctcgctcctggaggctcccgggagagctcctggcaggccagcgcccgcagaatcctagcctgttcaccttgggttagcacattgtaaaaagcaactactatgagctgagcacggtgcaggtgcaggtgctctgtagctattaactcacttaatcctcacatcagctttaataggtgagattatggtagcccccattttacagaaaaactcaggctcagaaagggaatgcagattgcccaggctggtcttgaactcctggcctcaagggatcctcctgccttggcctcccaaagtcctgggatcccacgtgtgagccacctcacctggcctggggcctgtgttttaactagcaaagactgcacagctagagttgcaccttctaactccaggtccaatgcatggcccacgacagtacacctgttttttgtttgtttactttccacatgtgatgatgataacaaaataatagcaagacacatctatagtgctgaccatgggccacacatagtgcaacatattaacccatttaatctgcaacagccctacaggttacattctattaagacggccattttaccgttgaggaaacttaagtacagagagcttaagaaatttgctggacatggtggctcgcatctatagtcctagctactcagaggctgaggcagaaggatggcttgagcccaaaagtttgagaccaacctgggcaatatagtgagaccctcgtctctataaaaaataaaaaattagccaggagtggtggcagtacctgtagtcccagctacttgggaggctgagctaggagaatcacttgagcctggggaggtcgaggctgcagtgagccgtgattacgccactgcaccccagcctgggtgacaagagtgagaccctgtctctaaaaaaagaaggttttgtcccaggtcactcagagagcaaggagtattgactggaatagtattgagcaatgctgggattgtctgtttattccgtttataaatgtttattgaacacctactaagtgcaagaccctgaactaagacctcagcgtgcagggagggagaaagacgacaaacaatgctgttgaattgaaaaatgaaaaatgcgagggaggagccaagatggccgaataggaacagctccggtctacagctcccagcgtgagtgacgcagaagacgggtgatttctgcatttccatctgaggtaccgggttcatctcactagggagtgccagacagtgggcgcaggccagtgtgtgtgcgcaccgtgcgcgagccgaagcagggcgaggcattgcctcacctgggaagcgcaaggggtcaggg

SEQ ID NO: 16371 - DNA, 2300 bp, Homo sapien
ggcttcgtctggctccgggcgggcgcgggggaacctgcgaggcgagcgtaggcctggccaccctgtcccgccgggggcccactccattgcgccgcgcgggtgcgcgtagacctgacctcccctcgggcataaaaagcgccctgcgggagatccaggccgggagggcgcggagctcagcgagcagccccaggctttcccaaccgcgtggtccacccccagcctcagtcccagccccagctgctgggctcacccgccggctaagggaatgctcccgagataccagatgccagttgctcgttgtaccctcagccatgaaattggaggattacaacgcttctcattctcttaattcaggggatgtggggatgctagaaagagagacggctcgccagacatctgagagcaataataccaggcagcatttgggcacttgctgtgtgccagatatgatgtttagcgttttaaaccttctaatttatttaatactcatctatgagagggtaaaatactaagatcataacagccccatttgacagatgcagaactgaggcccagggggtttattttacttccccgaggcttcagcgctactaaggggtgggacctggatttgaacccaggtggggccggccttaagggcccatgctaggcctgagagagcaagacccccaccctcgcaacgcaagcaatccatggcttagccacaggcctggcggggaggaggacggatagattaccaggttagccctggaaggtcaaagaatctgtcatttaaaactccaggctgggccccgtttctcacgcctgtaatcccagcactttaggaggccaagggaagcggatcacttgaggtcgggagttcgagaccagcctggccaatatagcgaaatcccgtctctactaaaaatacaaaaattagcctggtgtggtagtgggcgcctgtagtcccagctactcgggaggctgaggcaggagagtcgcttgaacctgggaggcggaggttgcagtgagcagagatgacgccaccgtactggacgacagtgagactccatctcaaaaaaacaaacaaaacaaaaaaacctctccagtctccagtccgttcctcaaacccctaaatctgagctggggacggggagggagaaggaccaggaggtggcatccagggcttctcaaggcagcagcagaaggtgaaggaggagtgaggggacaggtgagagagactgaccgggaaagctcagctccgtggggaagggcttgtggggtagtgattgagactcaggaccgttttcatggccagagcccacttgtgtgcagcaagaggaaagcacttcgtgtctaacgtagtggaatgagagtaacgtagaagaacaacgaatcccaggtctggcgtttatctcctaggaagggtgtgggagagctgttttccaagggagactctctggaggctgctttgcgcagcaagcagtttttacccagattatatacagtatttcagaccaatttcaaaacctctgcgttttaaaaattgtctttatttacattttacagaaagttgagaaagtgttatttatatggggggtaggggtgctggagattatgagactaataacaaccctcttagctcgcaccctttggcaccactacagcttccaaactctgggactttctcgactagcttccctttgtttagctgtgaaatggaagaagcggtccgggtgtggcggctcatgcctgtaacctgagcactctgggaggcggaggatcgcttgagtccagaagttcaagaccagcttgggcaacatagggtgaccctccaccctccccccgccccaccacatcgctacaaaaaatttttaaaaattagccgggtgtggtggcgcaagcctgtagtctcagcgggagctgagggaggagaatcgcttcagcccgggaggtcgaggctgtagtgagccgagatcgcgctactgcactcctgggcgacagagcgagaccctgtctccaaaaaaaaaaaaaaaagaaaaaagaggaagttgtatccaattcagaaacgcggtccttcgggacctgctagttttataccccggaggatcctccccggcgggctggcacgggaggtggagaaagaggcttgggcggccccgctgtagccgcgtgtgggaggacgcacgggcctgcttcaaagctttgggataacagcgcctccgggggataatgaatgcggagcctccgttttcagtcgacttcagatgtgtctccacttttttccgctgtagccgcaaggcaaggaaacatttctcttc

SEQ ID NO: 16372 - DNA, 2300 bp, Homo sapien
ctctaagcttcagttgcccatctatcatatgggaataataatacagctcttgggttgttttgaaatgagcttaaatgagctggtcagtggctgggcacggtggctcatgcctgtaatcccagcactttgggaggctgaggcaggtggatcatctgaggacaggagttcaagaccagcctggccaacatgatgaaaccctgtctctactaaaaatacaaaaattagccagtcgtggtggcgcatgcctgtaatcccagctactcaggaggctgatagaggagaaccgcttgaacccaagaggcgaaggttgcagtgagccaagaacacaccattgcactccagcctgggcgacagagcaggactccgtctcaaaaaaaaaagagctggtcagtgtcaaatgcttagcacagagactggcacagtaatcttcaatgtccagcacctattgttactattttttttttttttttttttttgagacagagtcttgctctgtcgcccaggctggagtacagtggcgcgatctcggctcactgcaagctccacctcccaggttcatgccattctcctgcctcagcctcccgagtagctgggactacaggcgcccaccaccacgcctggctaattttttgtatttttagtagagacggggtttcactgcgttagccaggatggtctcaatctcctgacctcgtgatctgcccgcctcggcctcccaaagtgctgggattacaggcgtgagccaccatgcctggccctattgttactatttttacccctcacttctgtacagagcatttatggctcaagaaacatttgtcattttaattgtatgggagtcccacaacagcatagggagacatttctgatcattattcccattaggagggtggagaaactgaggctttgggaggtggtcctgacctagggaatcaatttgctgactcactaacccatgaagctctacagttaaaaaagactagattaaaaaatgagaactcagtaaaggggctgaggcaggaggatcgcctgagttcagaaatttgagatcagcctcggcaacatagtgagatcccctctctagaaaaattttttaaaaaattaggccgctcgaggcagagtgcagtggctcacgcctgtaatccaacacttcaggaggctgaagagggtggatcacctgaggtcaggagttccagaccagcctggccaacatggtgaaaccccgtctgtactaaaaatacaaaattagccggtgtggtggcacacgcctgtagtcccagctactcaataggctgagacaggagagtctcttgaacccggcaggcggaggttgcagtgagccgagatcgtgccactgcactccagcctgggcaagacagagcgagactccgtctcaaaaaatacaaacaaaacaaacaaacaaaaaattaggctgctagctcagtggctcatggctcacacctgaaatcctagcactttgggaggccaaggcaggaggatcgcttcagcccaggagttcgagaccaggctgggcaatacagggagacacagcgcccccactgcccctgtccgccccgacttgtctctctacaaaaaggcaaaagaaaaaaaaattagcctggcgtggtggtgtgcacctgtactcccagctactagagaggctggggccagaggaccgcttgagcccaggagttcgaggctgcagtgagctgtgatcgcaccactgcactccagcttgggtgaaagagtgagaccccatctccaaaacgaacaaacaaaaaatcccaaaaaacaaaagaactcagccaagtgtaaaagccctttctgatcccaggtcttagtgagccaccggcggggctgggattcgaacccagtggaatcagaaccgtgcaggtcccataacccacctagaccctagcaactccaggctagagggtcaccgcgtctatgcgaggccgggtgggcgggccgtcagctccgccctggggaggggtccgcgctgctgattggctgtggccggcaggtgaaccctcagccaatcagcggtacggggggcggtgcctccggggctcacctggctgcagccacgcaccccctctcagtggcgtcggaactgcaaagcacctgtgagcttgcggaagtcagttcagactccagcccgctccagcccggcccgacccgaccgcacccggcgcctgccctcgctcggcgtccccggccagccatgggcccttggagccgcagcctctcggcgctgctgctgctgctgcaggtaccccggatcccctgacttgcgaggg

SEQ ID NO: 16373 - DNA, 2300 bp, Homo sapien
tttaggctggcggcgtgagggcctctacctgtacttttgcaccaaacccctcaagccttccccacacagtgctttacccccgtctcactaaatgtttaacatctcaaaatactcttaaaattttttatttcccaaatgaacctgtgcccatacacaatggagaaaacattgtctaatgacaaaacctggaaaggaatacacaaaataaaaagagcacagtggcaattttgtaggtgatttatttcccattcaaaaatatttttaaggccagaaccggtggctcacgcctgcaatttcagtattttggaaggtcgaaatgggcaaattgcttgagcccaggagtttgagaccagcctgggtgacatggtgaaacgccatctctacaaaaattagccgggtgtggtggcatgcatctgtagtcccagctacttgggaggctgaggcgggaggatcacttgagcaggggaggcagaagttggagtgagccaagatcacaccactgcacttcagcccgggtgacagtgagattctgtctcacacacacacacaagattttattcggaaggctgaggcaggaggatcacttgaggccaggagtttgagacaagtctgggcaacatagagactccatctctaaaaaaaaatttttagcgtttttccctctcaggccctgcattccaaaatgacaaagaaaagaagaaacaagagtcatgccaaaaagggtaatagctatgcgcagcttattctcgcccaaggaccggaccattaagaagtttgtcctttgggccgggcgcagtggctcacgcctgtaatcccagcactttgggaggcccaggtgggcaggtcacttgaggtgaggagctcaagaccagcctagccaagagggcgaaaccttgtctccacaaaaaatacaaaaattagccgggcatgctggggcactccagtaatcccagctactcggggggctgaggccagataattgtttcagcctgggaggcagaggttgcagtgagccgagatcacgccactgaactccagcctaggcgacagagcgagaccccatctcaaaaaataaaataaaaataaaggtcctgccctcaaaaacattgtcctgtgtctgcggcatgactttcagacaacatggtttttcaacgtcccaccaggatttatgtaggtgaaaacctgtttccgataatctgaatctcaaatccattctgttttacatataaaaacagtttggcggagggcatggttttgatagaccctgaattttcgaggaatgcatcaaccatgaaaacagaacacagatcgaacttttactgggaactttactaagttcactgaaaaaaaaaatcatattacccataacaacatttgtagctttacattcacgatggatatatatgcgtgtgtacgtctgtacttaggttttgtttgtttgtttgttttgagatggagtctcgctctgtcgcccaggctggagtgcagtggtgtgatctcggctcactgcaacctcgacctcccagcttcgagcgattctcctgcctcagcctcccgggtagctgggactacaggcgcccgccaccacgcctggctaatttttgtatgtttagtagagacggggtttcaccatatcggacaggttggtctcaaactcctgaccttgtgatctgcccgcctcggcctcccagagtgctgcgattacaggtgtgagccaccgcgcccagcctgaatattgtttttcttatccatacttcactgtaagcagatggaagcatctgtctgcttcattatgtctgccagtgttgagtacctgagtattttcatattgaaatatagctttaatgatacattacttctctcttccttctttacatagcggttaatcatattgagcttctgaaattgtgcgcgtgggcagattagccatttttgggttccctcttaccccccggactaagccgggacggaaaaaaaatgtgaagggggcgttcccgatcgatttggccccgccccatagtgtgcccagagccttctgccacacttaacatggcggcggcggcgccctgccgaggcgcctgagcgggtcgcgagcgtggtgttacactccagtcatggcggcccgacaggccgtgggcagcggggctcaggagacatgcggtctggatcggattttggaggcattgaagctgctgctgagcccgggaggtgagaggacgcatctccgcgccgggctggacccgggactctcagggccgcccggcttccggggctgccctgccttccgcagcgtgcgcccc

SEQ ID NO: 16374 - DNA, 2300 bp, Homo sapien
ttgctcactgcaacctctgcctcctgggttcaagcaattctcctgcctcagcctcctgagtggctggaattacaggcacctgccaccatgcccgattaatttttgtatttttggtagagatggggtttcaccatgttggccaggctggtctccaactcctgacctcaagtgttcctcccacctcagcctcccaaagtgctgggattataggcgtgagccaccgcgcccagcggaagatttttaggtaacaaatttaactatctaatacatatagggttatttagggtttttatttttgtcttgtgacagttttgataagttgtacttttcaaggaatattttcatttcacgtatattgtttggtttttggcataatgttcattaatttctcagttgtgctttaaaccttctttcttttctttcactgcagcctctatgtcccaggcttaagcagtccctctacctcagccccctgagtagctgagaccacaggtgtgcaccaccacacttggctattttttttttaatgtttttagagacgggctctccctacattgcccaggctgatctcaaactcctgggctcaagcgatcctcctgccttggcctcccaaagtactgagactacagatgtcagccactgtgcctggtcctttttacttttctgatataagctttacagctataaatgtctctataagcattgctttagttatatccaacaaatattgatgtttttcgttagcattcagttggaaatcttgtaatttcttttttgaccgtagattattttagaagtacattgtttaatttccaaacatttaaggctttttggatgttttgttgttaatactttctgtcttaatgccattgtagtcagagaacatacttgataggaaatagatatctgttgaaaatacatattctggggggaaacgatgtggttaaattaatgtttgagccctgtgtccatattttgtgatcttcctcactagaatgtaagttccatgaggaagagcctttgttctgtttttttgttgttattgttttttgtttttgagactgggtcttgctctgtcacccaggctagagtgcggtggcgcagtctcagctcactgcagcctcgacttcctgggctccagcgatcctcccacctcagcctcctgagtagctgggactacaggcactcaccaccatagccagctgattcttttagttgttttagaaatggggtctcactgtgtcgcccaggctggtcttgaactcctaggctcatgcaaccatcccactttggcctcccaaagtgctgggattacaggcatgagctgccgcacctggccagagcctttgttctgttcagtgctttatccccagcacctagaacagctggactgagtgcatgttctatggtaaatgttcagcttttatatttctgttctggctacaatttaagcccagtaagatgattaagacctggtctctgccctaaaaacatgtggggaatagaaacaaactagatgaactgtaacgttagtacactactccaattacatgcaaagtgctgtgggaaggcagaaaatgtggtcttaaattcttcataggctgggttggtacccctgggggaggctttccagagccagtgacagtggcgcccggcctgcgaggatgaactggagtaggcagggcattccacagggggaagtgcagcttgttttctatgtgtataaactctcctttttttcttcttcaaaaggctcgggctcaagttcactacaggtcacaaaacatgatgtcttgttggctactttaaaatctaacctgtctgctttggaggacaagtttctgaaggatcctcagtggaagaatctgaaactcctaagagatgaaattgctgataaggcagaatggccacaaaactctgtggatgtcacttggagttttacctctcaaaccttgttgttgcttttgtgcttgaaggaaaccatgatccgccttgcagctaatttcaatccaggtaaacccaaccctaggactccggaagttgctcctgccctgagccccgatgcacttagtatctcacaacagaagactgtccagttcgttttgcagtttgtagttaccttgggtatctgcccctatctcatgcctggtgttggagtccctttgagatatagaactgaatttggtgccgtcgttcaagacgtggtgtgttttgatgctgcccccgatgcaactcgaagactgtacaccagctgcaaggcccttctgaatgttgctcagcacacatctctggggagcttg

SEQ ID NO: 16375 - DNA, 2300 bp, Homo sapien
ttgaactacccatatacagatcacctagaccgaataactttacattttggccacatttattttatctttctctctttctatacatataaacatgtcttttctgaagcatttgagacttagttgcagacatcacaacacttcacccctaaatactacagtatgcatccccaaagaaaaatgtcagtctcctacataaccacaaggcgattaccacactcaggaaatttaacatttatacaatatgctttgatataatatacaaattccattcaaacttctctaattgtttcaataatttgttttagagctattttttttttaatccagaattcaatcaagaatcatggctgggcgtggtggctcatgcttgtaatctcagcactttgggaggcttaggcgggcagattgcttgagcccaggagttcgagaccactggggcaacatggcaaaaccccgtcttaaccaaaaaacagtataaaaattagccaggcatggtggcaagcacctgtagccccagctagttgggaggctgatgtgggaggatcgcttgagcctgggaggttgaggctgcagtgagccataatcacacctctgcactttagcctgggcaacagagtgcaacccttgctcaaaataataataataatatatgataaaactatgtctaaataaatagaaagacttattataaaactttaaaaacttttttttaaatttttatttctgtattgtccaggctggtctggaactcctgggctcaagcgatcttcctgcttcagcctcccaaagtgctgggattggtgaggtgggaggatcacttgagcccaggagtttgcaaccaggctgggtaacataatgagaccctgtctttagaaaaaattttaaaaattagctgggcgtggtggtgcacgcctgtattcccagctgctcgggaagctgaggtgggaggatcacttgacccaggaggttgaggttgcagtgagccatgatcacacagttccactccagagcctgggttacagagcaagaccctgtctcaaataaataaaaataaaatataactattttaaaactttttgaagggaaatttttaaacacatattatagagattatataatgaactcctatgtacctgtcacctagatacaactattaactctgccattttctttcttttttttttttttttagacagagtctcactctgtcacccaggctggagtgcagtggcatgatctcggctcactgcaagctctgcctcccaggttcatgccattctcctgcctcagcctcctgagtagctgggattacaggtgcccgtcaccacgcccagctaattttttgtatttttagtagagatggggtttcactgtgttagccaggatggtctcagtctcctgaccttgtgatccgcctgcctcggcctcctaaagtgctgggattacaggcgtgagccaccacacctggccaactctgccattttcatttcatccaatccccaatttttattcaattaagtttaaaatgaaaaaaaatttttttttgagacagagtctcactctgttgcccatgcttgagtgcagtggcacaatctcggctcactgcaacctccgcctcccgggttcaagcgattctcctgcctcagcctcgtgagtagctgggactacaggcctgccccaccacacccggctaacttcttatatttttagtagagatggggtttcaccatattggccaggttgatttcaaactcgtgactttgtgatccgcctgccttggcctcccaaaatactgggattacagttgtgagccaccacacctggcctaaaatgaaaattctaagtgataatgtgctataggtaattggcaacgttggtgttttttcttagtgatacataaaataacaatgcatgtttataatcagtggcatcatatattccatgaaatgtgtatgaattgtgtattgttcaatgataaccattttctgatcttaggtgttacttactgagccatctttctagtaaagcttccttccttagctttagtatgtcctattcagtgaggcactaaatatgggtaattttgtgtgtttattttctagagctttcagagagtgacatggtaccaggaactattttggtgacagaagaagaacttagtagatgcattgaggatgtgtttaaggttggtaatctgagtcactaatgtttttatttacttcttatttaaaattttttttaaattttttctttttttgtagagatggtggggtctcaccacgttgcccagtctggtcttg

SEQ ID NO: 16376 - DNA, 2300 bp, Homo sapien
ttttttccatttaaagcctttgctcctttgtcaaagttcagttgactctatttatctgggtctatttctggcctttctgttctgtcccattgatctatttgtcttggctggtttttttttttagaagaaattgttatatagaagagaaattaaaaaagaggccaaatagactgtaggtaaattattctcattttagatgctttaaaaaagtccatgatacaaccgaggcactgaatgaagtttagcataatgataatactagtataattatttgaaaatgtctcggccgggcaccgtggctcatgcctgtaattccagcactttggaaggccaaggtgggcggatcacctgaggtccggagttcaagaccagcctggccaacatggtgaaaccccgtttctactaaactataaaaaattagccaggcatggtggcgtgtgcctgtagtcccagctactcgggaggctgaggcaggagaatggcgtgaacccgggaggtggaggttgcagtgagccgagattacgccattgcactccagcctaggcagcagagcgagactccgtttccaaaaagaaaagaaaaaaataaaaataaaaaggatttttttttcttttttttgagacagagtctcgctctgttgcccaagctggagggcagtggcgtgatctcagctcactgcaacctctgcctcccgggtttaagcgattctcctgcctcagccttccgagtagctgggactacaggcacatgccaccatgcccagctgatttttgtatttttagtagaggtggggtttcgccatgttggccagtaaaaaggacttaagatccttaaggtattcaaattttcagggtctcctgaagcctcatctgataatttctccagtgttttcaaacagaaaagtattaccattgattcttacttttcattgatcacacatacaccttttgggtggcagtgggtgaggggggtgctttccagtgaagaccagaaaacctgctagacaaattctaatagagctgtaacactcatgcacctttcttagtagtaaggcatatgacattattcagacaaagcttccatggagaataaaatgttatataattttcacttccactttccagaagaaatccctttcttcccgttttctctgtgatcccttccagatctatggtgcacttgcatactgactggccactttagatcatgtagttaagaacagccttatcttttcaagggagactgcgtagggtattgggtgagagtgtgggctctgatcccagtttcttgagttcacatcttactatcttccagtctgtgaccttgggcatgttacttaaccgttctgtttccacctgtttaaaatgtagataataatagtcattatatcacaaggatatgaatgtgtgtgtgtgtgttttatcttagaaaagaacctgtatatgataagtgttcaataaatgttaggtatgattattcaacaaatggtattcagtgctggacccaggcaatacactgattacaccatgagcaagatttgatccctgcccttttttctcagaatatgtttcctggtgctcaggtcatattgaaatttgctatgttaatttgggtttgacattttttatttcattttgtagttgaagtcaagtgattttgctgttctgaagcagttgttgcctctgttggagaaggtatccaacacataccctgatccggtcatccaagaactcgctgttgatctccgcatcaccatctctacccatggagcctttgccactgaggccgtcagcatggctgcccaaagtacactgaacagaaaagatctggaagggaaaatagaagagcagcaacaaaccagtcatgaaagacccactgatgtagctcatagccaccttgaacaacagcagagccatgagacagccccccagacaggcctgcagtcaaatgctccaatcattcctcaaggagtcaatgagcccagcactactacaagtcagaaatctggaagcgtaaccacagaacagctccaagaggttcttttgtcagcttatgaccctcaaattccaacacgggctgctgccctgcgtactctttcccactggatagagcagagagaagcaaaagcccttgagatgcaagagaagcttctcaaggtgagtagaacacactgtaaagacacatgggcacagggtggggcattcattcaactcaagtatttttggagcctggactatgtgtcaagtgctgttctggaccaccctccagaaatttgtgaattttgtgaggaggcaacactt

SEQ ID NO: 16377 - DNA, 2300 bp, Homo sapien
ctcctgagttcatgcaacctgcccgcctcagcctgccaaagtgctgggattacaggaatgagtcactccgcccagctgacaagtgacctttgagcaaagatataaggaagcaaggggttgatccagaaacctagggagggagcattccaggtggagggagatgtgagtgcagaggccctgcgacaggtgcaggcttcacgtgctggagaacagtaaggccagtgtggcttcagagaagaacaggagttggcaccagaaaggcagtggccagtcccagtggagccttgtgtggactttggctttccctgtgaatgagatgggaagccagggcggaagaatgaaatgatctaacttcattcgttcattcattcattcatttattcattcattcatttatggagacagagcctcgcgctgtcgcccaggctgtagtacagtggcacaatctcaactcactgcaacctctgcttcctgggttcaagcaattctcttgcctcagcctctcaagtagctgggactacaggcatgtgccaccatgcccagctaatttttttctatttttagtagaggcaggatttcaccatgttgctcaggctggtctcaaactcctgagttcaggcaacccacccgcctcagcctcccaaagtgctaggattacaggtatgagccacaatgtccagccgatctaacttcttttaaaaagttactgttggccgggcatggtggctcacacctgtaatcccagccctttgggaggccaaggtgggtggatcacgaagtcaggagttcaagaccagcctagccaagatggtgaaaccccgtctctactaaaaatacaaaaaattagttgggcatggtggcaggcgcctgtaatccccactactggggaggctgaggcagagaactgcttgaacccggaggctgaggttgcagtgggccaagatcacaccactgtactccagcctgggcaacagaacaagactccatctcaaaaaaaaaaaaaaaagaaagttactgttggcaggcgtggtggctcatgcctgtaatctcaccactttggaaggccaaggcaggcagatcacccaaggtcaggagttcgagaccagcctggtcaacatggtgaaaccccatctccactaaaaatacaaaaattagccccgtgtggtggcaggcacctgtaatcccagctactcgggaggctgaggtaggagaatcacttgaacccaggaggcggaggttgcagtgagctgagatcacaccactgtactccagcctgggcaacagagagagactctgtctcaaaaataagtaaataaaataaaaagttactgtggcttcttctaggacagttctttcagtgtaccatgaaagctcttgaagtctcagaattgcttagttccagggtgtgctggtggagaaggaacttgagctttgggaaacttgtctttgcgaacagaaggaattctccttcgtgagcatctgttatctggcaagtatgctagaagacacaaataaaggacccaatctcttcccttaaggaagtctcagtaacttgtgtgaaacgcagaggagtaaatcaacagtggataggagtgacacgatagagccagcaccaagctctgggggacccagagctgggaccctgggttaacttgtcagggcatcaagaaggttatgttgatcaagtgttagccaggcagaggaagagaagaagcataatctattttgagataaaattgaacagcttcctttctgagaaatcaccaaactggaggataacgccaatgtggcgggaggtcctggaggccctggggaccctaaatggaaaactgccatggcttcctcagaggctttggtagcagcatgcaggactgggctcgcagccatggtcaaggctagagctgaggctgtggaactcacagagacatgactgaggacaaggagtggatacccatcaccaagctggtccctctggtcaaggatatgaagatcaagtccctggagacctatctcttctccctgcccatcgaggagtgtgatatcattagcttttttcaaggggcatctctcatgggtgaggttttaaagattatgcttgtgtagaaacagacccacactggccaccgcaccagattcaaggcatttgttactgttagggactatgatggccacatcagtttaagtgttaagtgctccaaggaggttactactgccatccaagggaccatcaccctggccaagctttccattgtccctatgcggagaggttactgggggaacaagatcggcaagtcctacac

SEQ ID NO: 16378 - DNA, 2300 bp, Homo sapien
catagctcactgttgccttgacctcctgggctcaagcaattctcctgcctcagcctccctagtagctgggactacaggcacactccaccatgcctggctaatgttttttttttttttcttttcttttctttttctttttttttttatttttattttttgagatggagtctcactctgtcgcccaggctggagtacagtggcataatcttggcccactgcaacctctgtctcctgggtttaagcgattcttctgcctcaaccttcccagtggctgggactacaggcacgtgccaccatgcctggctaatttttgtattttttagtagagatagggtttcaccatattagccaggctggtctctaacttctgacctcgtgatccgcccacctcggcctcccagagtgttgggattacaggcgtgagcctgcacccggccctggctaattttttaattttaatttttgtagagacgggggaagtctcgctttgttgcccaggctggtcttgaactcctggcctcaagcgatcctccatcttcagcctcccaaagtgctgggactacaggtgtgagccactgtgcctggccaataatgtaagatgggattgtgtggagtaggtgtgcctggggtctttgcttgcctgcggggactgaggtgtgaggtctgtggcccagactgagcaatggtgggcaggcaagtccctgagcccctaaaacttgcgagaggagaagtttatagactgcagctcaggtgcctataaatttgttgcagcttgggaagaagtgatagaaattatatcaggtgtatttggaaaacaggtaaactctgttttttggttttttttttttttttttttttttttttttttggagacggagtctcgctctgctgcccaagctggagtgcagtggtgcgatttcagctcactgcaacctccacctgcggggttcaagcgattctcctgcctcagcctcccgagtagctgggattacgggcatggtgcccgtaacgccgaaagtgctgagattacaggcttgagccacggcgcccggccactcattttttaaaaactagttattaattataatttctcttcaagttttcctgagatgtaaaaactcatcgccttcagctggttctaaacttcttgtctctgctaacaactctcccccctcctcgatctcaccccaccccagtgcaccccaactcacttcatctcactttactcgagtctagcactatcttttagggacctgaaaactactgtcgataaggtcagttgggaatttaggaggtcatggatgtcggaaataaaggtgtgaaaaagaagaggaggaattgttttggctttaagacaccggaacctccaaggttcctacaaaaccgtttgcagcttttgcaaaccgccttaaagtcatcagcgccccactgcggaattcaaagctaagctgtcacaattgttaacaccttctttgaccagcctttttacatttgacaattctcttcagcgcctctttcctgccagcaggaaggttttgctgccttggctttcgggagccccctagacagcgaactgccccttcgcgtgcagaagtcggggaagagtgctctcagctcgccttccttgcagggtgagtaggttttgcgggttagagagcggggcgtgggggcggggagggagagtaacaattttggaagtccctgcgtggtatctggaaagttaacgacgcttcaggttctaggttgagcccaatgaccgtcttgccttggcagctggtcccagggcgattgcagagccgcgtggccttcggccccactcgggggacccagcttcggagagggcgcaggggctgcgagtcttgcgagccggagccgcgtccacccgggactaggcgtccccgccgagcgctggcttgtggcgctccctgggaccgcgcggggtcgggggtgcgcccgcgggggccctcccactctggtcaactttcccggccccagggccgggggaggcgcctctcctggcgggcacgcgccgggtacttaagggcggctcggctgggcaggcggcagtcggagcgcgcggcggcgcggagcggagcgggaggaggggcatggagccgccgcgggcctgctgagctccggagcgcggcagccggcggcacggtgagcgcgggccggccggcacccaggaggggagggccgcgcggggctgcgccgaggccggggcgcgccgggtggcaggggtgcctctcgccgagccccccgcacccggccagctcccagccctgcgggcgccgcgtccg

SEQ ID NO: 16379 - DNA, 2300 bp, Homo sapien
gaatttaggaggtcatggatgtcggaaataaaggtgtgaaaaagaagaggaggaattgttttggctttaagacaccggaacctccaaggttcctacaaaaccgtttgcagcttttgcaaaccgccttaaagtcatcagcgccccactgcggaattcaaagctaagctgtcacaattgttaacaccttctttgaccagcctttttacatttgacaattctcttcagcgcctctttcctgccagcaggaaggttttgctgccttggctttcgggagccccctagacagcgaactgccccttcgcgtgcagaagtcggggaagagtgctctcagctcgccttccttgcagggtgagtaggttttgcgggttagagagcggggcgtgggggcggggagggagagtaacaattttggaagtccctgcgtggtatctggaaagttaacgacgcttcaggttctaggttgagcccaatgaccgtcttgccttggcagctggtcccagggcgattgcagagccgcgtggccttcggccccactcgggggacccagcttcggagagggcgcaggggctgcgagtcttgcgagccggagccgcgtccacccgggactaggcgtccccgccgagcgctggcttgtggcgctccctgggaccgcgcggggtcgggggtgcgcccgcgggggccctcccactctggtcaactttcccggccccagggccgggggaggcgcctctcctggcgggcacgcgccgggtacttaagggcggctcggctgggcaggcggcagtcggagcgcgcggcggcgcggagcggagcgggaggaggggcatggagccgccgcgggcctgctgagctccggagcgcggcagccggcggcacggtgagcgcgggccggccggcacccaggaggggagggccgcgcggggctgcgccgaggccggggcgcgccgggtggcaggggtgcctctcgccgagccccccgcacccggccagctcccagccctgcgggcgccgcgtccggcgcggggaggcgggttgggggcggcggcagccccgggcttcccggcggccgttcctgcagccccctccccactgacccctcctccctttcttcctgcatcctctcctcttccagcctcgcctccctcctccccggcggctcctgttttgtgaatgaattaggaggcggacgccggtgcggggctccaggctggctggggtacccctcccccgcaccttctacgacctcccgggggtttgcacctgtccgggcaccaaggtaccaggcgcccacgttcctgcgggttagccgggccgcggcagcacgtgtccgggggagtgggctcccctcccctggccggcctggaggggcccggagggcggccgggcacaagaggaggagccccgttgggcgcacaagtttccatgccgctgcgtgtggccctgccgcggggcgcacctgtcagcgggagagacgctgcacaccagcagcccctcaaagtttcggaggcttgatggagaagcgtgcgtccttgactgggggttctccttccgtagtcctgggagccggacttgagagcgcccccaaccttgtgcccttgaaagccgagtgcgcgttagtttgcctgggctgggctcccgtggatgagcgaagggcatgaggaggcggcggtccaggctgtaggatcaccccacagcctctgccggcttggggtgacacagccccccgccccaggtctgggcaggagaacctcgaccacagcctgcaccagcgcctgattgcacgtggggtatctggctgagggacattttgggggcctctatttgggggtgggggtagtaacctgggtaatgcctctaattcctgcgggggaggggtcccgcccagggaaggagagggccggctacaccggggatgcgcctttgtctacaggcacactttgccaaggtagctggggtaccaggaagagcagggcctggtccgactgggatcccttgggttttccgttccttcccggttgggtcgtgggaaagcggcacgtgggtgtggccggcgccgcctttgccaagaggcgaggctcgagcggggatgagaagcgtggcgagtgcgttcgcggctgctttgacctggtgggcgccgcctccggcactgcaccgaggcggggcgccagcgcccaggttgctgggctggccttggcgcccccttcccctacccagagcgcaggcaggcaggggggtcccgccgcgccccttcagcatgtaagctccggaggggaatgggggcgctcctaggctgcggatgc

SEQ ID NO: 16380 - DNA, 2300 bp, Homo sapien
tacctcagcctgccgaatagctgggattatgggtgcctgccaccacacccagctaatttttgtatttttagtagagactgggtttcaccgtgttggccagggtggtctcgaactcctgacatcaagtgacccaccgcctcagcctcccaaagtgctgggaacacaggcctgagacaccgcgcctggcccccttggctttatttttaaagggagaccctttgaaccttgataaccaaggaggtagacttgaagcttacatcattaccaaagaaaaaagtaaaatcttaagaaactccataggcttttttaagaaacatgcagagtaggaaatagactaccctaggctgggcacagtgcctcacatctgtaatcccaacactttgagaagctgaggtaggaggatcacttaagcccgggcagtaaaggcctcagtgagctatgattttgctcactccatcttgggcagcagagtgagaccctgtctcaaaagaagaaaaaagtaagaggccgggtgcagtggctcaagcctataatcccagcactttgagaggccaaggtgggcggatcatgaggtcaagagatcaaggccgggtgtggtggctaatgcctgtaatcccagcactttgggaggctgaggtgggtggatcacctgaggtcaggagtttgagaccagcctggctaacatggtgaaaccccatctctactaaaaataacaaaaattaagccaggtgcggtggttcacgcctgtaatcccagcactttgggaggccaaagtgggtggccaacctgaagtcaggagttcgagaccagcctggccaacatgaagaaacctcgtctctactaaaaatacaaaaattagccaggcatggtggttgtgtgcctgtaatcccagctgctcgggaggctgaagcacgagaatcacttgaacctggaaggcagaggttgcagtgacctgagatcatgccactgcactccagcctgggtgacacagtgagactccctcccaaaaaaaaaaaaaaaaaaattagctgggtatggtgacatgcacctgtaatcccagctactcaagaggctgaggcaggagaatcacttgaacccgggaagcagaggttgcagtgagccgagatggcgccactgcgctccagatttggtgacaaagtgaaacttggtctcaagaaaaagaaaaaaaaaaaaaaaagaatatccttaagaaaggcacatcagcatagtgagcaagagtatggtctttgcaatgtatgtcttcggttcatatcatcttttccttagtagctatgtgatcttaattagttttgcacatacagttgaccattggtgattttaagcaaccctatctcatatgtacaatattggtaaaagaacaattcccacttagggcattgttagaggaacaagataaaatgtgtctaaaggacttagaaaagtacctagcacacagtaagtaataaatattagttgtcggccaggcatggtggctcacacctgtaatcccagcactttgggaggctgaggcgggtgaatcacgaggtcaggagttcaagaccagcctggccaacatggtgaaaccccatctctagggccgggcgcggtggctcacacctgtaatcccagcactttgggaggccaaggtgggtggatcacgaggtcaggagatcgagaccatcctggctaacatggtgaaaccccatctctactaaaaatacaaaaaaaattagccggccgtggtggcgggcacctgtagtcccagctactcgggaggctgaggcaggagaatggcatgaaccccggaggcggagcttgcagtgagctgagatcgtgccattgcactccaacctgggtgacagagtgagactccgtctcaaaaaaaaaaaaaaccccatctctactaaaaatacaaaaagttagctggccatagtggtgggtgcctgtattcccagctactcgggaggctgaggcaggagaatcgattgaacccgggaggtggaggttgcattaggtgtcattattagttgttgttgttattaccctaaatctctttttttctctctacagcttgttttcacttgctttttaaagacagaaagctcatggtgcaaattgttatttccaggtaagtacattttgagattttaaaatttggcttgaaatgatgagggctatagaggtgtgccatgtgtctggaagaatcagggtccttaggtgcatcttgtacaaatccttgcattctgatctctagttccatgcctagcactgcccaatttcccaagaacttgacatccaac

SEQ ID NO: 16381 - DNA, 2300 bp, Homo sapien
cctggattctgtgattttgccacctatcccatatgtgacagtgggtagtttaacctcacgtgttttcctaacaatacactgggcataaacacctattttgaaaggctgttgcaagaacgagtaatgaatgtaaagcttttagcacattgtctgacacatggtaagccttcagggtcaagctatcgatttcccagagaaaggtggcattttcttagtattcatcaaatagaatgtcttaatactacactgtgttagcatattaatgtttataacggactaaagcattctacgaaagcagcaggtcatcagaataaaatcaagttttcataacagtagaattcaaacatggcagttgtggttcaccaaactgcttcagggattaagttctggaaggtaatttctctaaatatgatgactatgtctctatgtgcctttctaccaagtgaacaactcagaacgttttacatacaaccgaatacagattatttttatttgtagtgttatcgtggttttgtaactgaaggggacaggtctatacttttgaaggggatcttgtctcttgaaaggcttatgttactaagtctaaaatcctgtttccaaatgagaatcttgctcccctccaaaaaggggcttatggagggttggtggaattgaatgcttccaaactttacattagtgaagtgtgttcaaaaacgtgtgtggatgctatgcatacacgtgatacttcccatcacattttaggattcccacgttggagggaatcaattactggtatttgtagcaatgggtggaaaagatggcttcagtcgatctgagttactgcagttttctccatcttctgctactctgcagccccatcttagcctgtcctcctcttaatggtacggccccctgtactcccccaaaccctttcctttctagcccggcgtagagtctccctctgtgctcttcctcccacccacccccatcttctccacccactccctctcggccccctcccaccctttctgctagagctacaaacacttcctatttctagtcccacccactttctgggacttctcaatccgcttcccccctcttctccacccccctccaaattacaagctgttttaaccccttttcctgcctcccagggaaactattctttaaaccgccttcctccacaccacccactggagtggtcttccaaaccgttcaccctcttcccaaagattactctttaaacgtcctttctctaccaccctcgttctccaaattgttcccggttctcaagtactccactcctccaggaccccaccccactcgtctctcggcttccctcccacaaaagaacctggaatgactctccaaccacccttccaattacctctcccagaagcctcccccctccacgattacaaatgttacctggaacaaaacctcacggtcctaacccccaccccgaactcccctttctgctcttcccgctacttcctaggttccagttctactccgctcccgcaagcatagcgggctgggctccctcccaaccccgggaagagccccttcccgcacgtacctcgagattccggccctcgccgcccccttctccgtcctccgcccgcgctcggccaccctttccgcccttctcccgctccgccccgctcgctcccttccttccctccgccttccgtctccacaccgctcccttcccccacactcctggccctcccaccccggaggcccctccgggcttgcccccacctccgcgccgccctcccgccgccctcccccttcccggccacccctcccccgcccgcgctccccgcccctcggctcgccattcttctctccgagccgcgcgccccgcccggccccggctccctagcttcccgctccctcgcgccctcgcccccaatcccggctcggccctcgctccccgcagcctcccgtgccccccgcccgcggcctgacctgcaatggcggccgccgagcgcggcgccgcgcggccaacgggcgacaaccgaacctcccgccgccgtcgccgccgccgcgagcactgcctgcgcacttccgactatgcgccaggagcacttccggggcagagcctgagagcgcgcgcgcacgtggggccggggcggagagaggcgagcaccgggaaggggagcgtggggccgctggtgagttggggaaggggcgtgggaagcggctgcgagagctgggggggtcttacaaggtggccggcccagggtcggcgtccggctgagctccttgtcccgagggtctccttgtcccgaggcggggtgggggctactctg

SEQ ID NO: 16382 - DNA, 2300 bp, Homo sapien
caggatgcaataagcacacgccagcgcatgttcttcataccacagaatgtaacccatttgtggtggtcctgtagtttttaccttttgattagttcttcaggggtgagctcagtaaatcatccctttccacatttcctaaacccacctctcagggaaggcaattctctgaattgccttccctgaaggcaattcaatgaaggttctatgcctgtgtttcggtttatcatatttattttacaggttggaaactgtacacttatctttctcccactggtctttgagctccgtaaagttagggcctctgacatttgtcttagtgcccagtatttgccactcattcaccgagaaacatttacagaatgcctaaattccaggtaccaggctgctgggcactgaattcactcatttgcccatctactcatttatatcacagcacccagtacataacagtcattcaacatgaactaagatgttgcacccgaagaaaatcactagtcagtgcccttggaggggagaagaaaaaggactaatagacctctgcatacacccaaaggacattttacctaattttaaatctcctttactcccaaatgtagacatgtaggtctacattctctcagacagatgaactttggaatccatcttcccacatcaccaaaaagtttctgatattaaaacgtgttatcattttttctgaattgacaatgaaacagtactgatactccctgcaggaaattttgcttaccaaagctgcaatggtgttgagactgatataccaacaatttcccttcctgtgtccaaaagatccagcaaacctcagtttccaatgacaggcagtgagatgtcacatttctaggtaggacccttctaatcaacattacacagattgaaactgagcttctcttatcagttaggagatctcagaagtttggtagttctaagcaacttcagaggggctaggaagtcactcaatcagtttgattataaaagacatacaagcttcttgaacttcagaagaaattaacatcaaaacaccatatcagactcccaaatgacttactttctcctgaaagtagtttgctgacaagttataaatttccacagtgccatctgttcgtgaaacagccaatctgtttgactggttattgtaagccacacagcggattcctgatggaacataattaaagaaacgtactcgatggaccttaaattcacccattcctagggggcgaaaagagagtcattattgctatatgttaactgcagtatgtcacatatagtattcagttccttaatatcactgttctggctggaaggctccaacaacatctccctgaagttcatttccaaatggctgctaacaatgccccccacaagaattactcaatcttcaaaagctcagaatggcttgaataataaggaggcttcagcaaaaaatcaaaaagggtcctactccatagctccagagttcctatctcggggcgcctaggaatccgcattttagcaagcatctctcctcaactctattgctaagtttgcaaacaacagacctaaactgaggtagtgacagtgaggctgatggggcaggcagaaccgagctcctcttgaggaagaaacgacagggtttgacttaatctggctgcctggtctgacgtctgtcacttaccctaccccgtccccccgacgcccgccaacatatatactggccgagagtagagaccaggtcttgttcgcccctcactggcctagcttcaaggttaggaacccgcagacagagcaagcgcgttcggtcgggccggggcgtctgaggcgcgcgcggtcttcgcctccccttccctctccccgagtctacagagtagcccccaccccgcctcgggacaaggagaccctcgggacaaggagctcagccggacgccgaccctgggccggccaccttgtaagacccccccagctctcgcagccgcttcccacgccccttccccaactcaccagcggccccacgctccccttcccggtgctcgcctctctccgccccggccccacgtgcgcgcgcgctctcaggctctgccccggaagtgctcctggcgcatagtcggaagtgcgcaggcagtgctcgcggcggcggcgacggcggcgggaggttcggttgtcgcccgttggccgcgcggcgccgcgctcggcggccgccattgcaggtcaggccgcgggcggggggcacgggaggctgcggggagcgagggccgagccgggattgggggcgagggcgcgagggagcgggaagctagggagccggggccggg

SEQ ID NO: 16383 - DNA, 2300 bp, Homo sapien
ttggagacggagtcttgctctgtcacccaggctggagtgcagtggcgtgatcttggctcactgcaacctctgcctccctctcctgcctcagccttccaagtcgctgggattacaggtgtgccaccatgcctcgctaatttttttattttcatagagacgaggtttcaccatgttggccagcctggtctcgaactcctgacctcaagtgatctgcccacctcagcctcccaaagtgctgggattacaggtgtgagccctcataccagactgattatctttttcttggtcttgttcttcttctttttttttttttttaacagtcatggccatattatgatttttctgtttgtcatttgtaacagttataactatataatttgtgtgtttgtttaatgtctttcttccatgctgaacttccaattttatgaggataggaaccatgtcagtgatactcacatctgcattcccaccatttatcaagcgcctcctacaaagccactgcttaatgtttcttgaatggataagtcaaccattccttacctagtgttccttattttcttttctccttcatctgttttctttattcttcaacaattaattaactcaggctggtttcctgctttccctatattccctttcctactagatacgattgcttagctctgtcagtgactctcagagcaagaaaaaattagtacgttaaagtgaaaagaggcagggcagagtggctcacacctgtaaacccagcgctttgggaagccagggcaggtggatcacttgagcccaggagtgtaagaccaccctgggcaacatagtgagaccccatccctaaaaaaataaataaataaattagataggtgtggtgttgtatgcccatagttccagctacttggagggttgaggcggaaggatcgcttgagctcaggaggttgaggctacattgagccaagatcgtgccactgcactccagtctgggtgacaaaatgagaccctgtgtcaaaaaaaataaataaataaaagtgggcctgatgcggtggctcactcatggctgtaatcccagcagtttgggaggccaaggtgggcagatcacctgaggtcgggaattcgagaccagcctgaccaacatggagaaaccccgtctctactaaaaatacaaaaaaaaatagcgggacgtggtggcacatgcctgtaatcccagctactcaggatgctaaggcaggggaatcgcttgaacccgggagtcggaggttgcagtgagctgagatggcgccattgcactgcagcctgggcaataagagcgaaactctgtctccaaaaaacaaaaaagtgaaagaatatgagcatatgagctaggagtaaggagaccttcatttgcctcatgcaattgactttggcacttttggcaacctacttaacccatgtatatcttggccttttcaagttgaaataggaaaaattatacctacttagttcctttttcgtcaagcaggtctaagcataaaatgccttgatagctacgaaaacttttgggttgggtgcagtggctcacgcctataatcccaggactttgggaggccaaggctcactgcagcctccgcctcccaggctcaaacaatcctcccccgtcagcctccgtagtagctgggactataagtgtgtgccaccacacccggctactttttatattttttgtagagacagtgtctcactctgtcgtccaggctggaatgcagttcaaaccttttctgctgaaaatgttttgccgaactagtcctagtaaaagaaacaaatttaactgtataaaagtaattagaatttgagctgaaaaaatgaaaatgtcattaggcatgatctgatagcacaaaaccccacactagttatttatggggaagttgtttttaccatgttgcctgtgaccactcagtaccggtacctgatgaatttgtggtaatgttgagaagttatggtgtttctgcagtttttcccaggtcatgagtctcgggctacagaagctttgtgctgggcagaaggacagcgactctttagtgctgggctcaatggcgagattatggagtatgatttacaggcgttaaacatcaagtatgctatggatgcctttggaggacctatttggagcatggctgccagccccagtggctctcaacttttggttagtaagcaactattggtaattcaaaccaaaatttctctcgtgcctgctcagactttcttccctgtgctcataggagagtaacgatatattatggcatgtggcaaccccaactataagattggaattg

SEQ ID NO: 16384 - DNA, 2300 bp, Homo sapien
aatgagaccctgtgtcaaaaaaaataaataaataaaagtgggcctgatgcggtggctcactcatggctgtaatcccagcagtttgggaggccaaggtgggcagatcacctgaggtcgggaattcgagaccagcctgaccaacatggagaaaccccgtctctactaaaaatacaaaaaaaaatagcgggacgtggtggcacatgcctgtaatcccagctactcaggatgctaaggcaggggaatcgcttgaacccgggagtcggaggttgcagtgagctgagatggcgccattgcactgcagcctgggcaataagagcgaaactctgtctccaaaaaacaaaaaagtgaaagaatatgagcatatgagctaggagtaaggagaccttcatttgcctcatgcaattgactttggcacttttggcaacctacttaacccatgtatatcttggccttttcaagttgaaataggaaaaattatacctacttagttcctttttcgtcaagcaggtctaagcataaaatgccttgatagctacgaaaacttttgggttgggtgcagtggctcacgcctataatcccaggactttgggaggccaaggctcactgcagcctccgcctcccaggctcaaacaatcctcccccgtcagcctccgtagtagctgggactataagtgtgtgccaccacacccggctactttttatattttttgtagagacagtgtctcactctgtcgtccaggctggaatgcagttcaaaccttttctgctgaaaatgttttgccgaactagtcctagtaaaagaaacaaatttaactgtataaaagtaattagaatttgagctgaaaaaatgaaaatgtcattaggcatgatctgatagcacaaaaccccacactagttatttatggggaagttgtttttaccatgttgcctgtgaccactcagtaccggtacctgatgaatttgtggtaatgttgagaagttatggtgtttctgcagtttttcccaggtcatgagtctcgggctacagaagctttgtgctgggcagaaggacagcgactctttagtgctgggctcaatggcgagattatggagtatgatttacaggcgttaaacatcaagtatgctatggatgcctttggaggacctatttggagcatggctgccagccccagtggctctcaacttttggttagtaagcaactattggtaattcaaaccaaaatttctctcgtgcctgctcagactttcttccctgtgctcataggagagtaacgatatattatggcatgtggcaaccccaactataagattggaattgatagtgaagattttaaaaatccccagcattctttttgctactagtctggaccttgttgattcatttatgaaatgagaggattacatcagttcaacatttcccaaactgtgttctgtggaatttggagatgtagaggtttttttgttttggtttgttttgtgttttatggtaaatttcatttcacaaatacagcatatttaatcctgctgtaaattcacaatgcacatcggtacatgaagagttctgagagtcccttcagcaagttaacctgtgcacttgtgtttcagcccagtgtttctcaaaaatatgaccacacactgagccccttcccataattaccattagagtgggtgcttccagatctttaattctgtgatgagtctgattatttttgatctgcactaatttgcacgatatctgaaggtgtttccatttaggttataatgttagtaggtcttttatttaggccaagggtctctagcagaagtattctatgaaatcctacttctaatccatgtcatacagaggaatggggccactaattagaactcttaatatcagtctgttttctgtctaggatatgaaggctactgagaatacactattagtttcttgataactagtactttctctcacaaatgatttttctttttcacggcaactgatagctttaaggaggaagagagaatagagagagtgtgtgttggggggtgtgtgtgtgtgtttagtcctataaaatgtttactattgattttttctgtttactacctctttctcaaataggttggttgtgaagatggatctgtgaaactatttcaaattaccccagacaaaatccagtttgaaagaaattttgatcggcagaaaagtaagcgtcatttttcatggggcggtaaatagccttaacaagaaattaagtttctgtgccactggggatgggatattttcccatgaatccaggtaatattttatctctactggg

SEQ ID NO: 16385 - DNA, 2300 bp, Homo sapien
ctataaaatgtttactattgattttttctgtttactacctctttctcaaataggttggttgtgaagatggatctgtgaaactatttcaaattaccccagacaaaatccagtttgaaagaaattttgatcggcagaaaagtaagcgtcatttttcatggggcggtaaatagccttaacaagaaattaagtttctgtgccactggggatgggatattttcccatgaatccaggtaatattttatctctactgggtacagggagggtatgtgctagaagccatccccagcccaggctttacccattgtatagcatagttgtgactgcttggttaagtaataatatagaaaaccagaaatccaaaattggaaagctagtgtttctgtggaagtcaatttgttagttatcacttacttttgtgatgttttaacaagcgtacatgaagtcttgaactacaattttgtcattaggaactatggttcttttctttctttttttttttttttctggaggcagagtgtcactctgtcatccatgctggcagtggcggtggcatgatctcggctcactgtaatctccgcctcccggcttcaagtgattctggtgcctcagcctcccaagtgactgggattccaggcacgtgccatcgtgccctgctaattttcgtatttttagtagagacaggatttcaccatgttggccaggctggtctcgaactcttggtcttactcaagtgatccacctgccttggcctcaagtgctgggattacaggcctgagccacttgccctggccaaggaactgtggttcttaatccttctggtgcattcaagttgaatgagggagtttataaacagttgcccatccttgggctccacctgggctgaattggcattgaccctttagaacaggggttggcagactgtttctgtaaaggaccagatagtaaacattttaggctttgccaaacctacattgtctgccaactctgtcagtgtagtgcaaaagcagccatagacgatactgaaactaatgggcaggctgtgctccagtaaaaactttatttacaaaaacaagcagtgggcctgatttggcctgtgggccacagtttggtgacccatcttctagaatagcaaatgtcctctgtgtccattagtaatacttatcctctgctaatcagattcttgcttcgtttttaatatatcttgggtgctctttttttttttttttttttttttttcctgagatggagtcttgctttgtcgcccaggctgaagtgctgtggcgtgattttggctcaatgtaacctctgcctcctgggttcaagcaattctcctgcctcagcctccctagtagctgggactacaggtgcgtgccaccatgcccggctagtttttgtgtttttagtagagacggggtttcaccatgttggccaggctggtcttgacctcctgacctcgtgatccacccacctcggcctcctgaagtggtgggattacagacatgagcaactgcacccggcctgggtgttctttctcaattacaaaggtaatacaatgctttttaaaaatctcatacattttgtcaagtatgaaatagaaaataggtgtctcagctgggcacgatggcttacacctgtaatcccagtactttgggaggctgaggcgggtggatcacttgaggtcaggagttcgaaaccagcgtggccaacatggtgaaaccccatctccactaaaaatacaaaaattagccagacatggtggcaggtgcctgtaatctcagctactagggaggctgaggcaggagaatcacttgaacctgggaggcggaggttgcagtgagccgagatcccactgcggcactccagcctgggcgacagaggagactccgtctcaaaaataaataaataaataaataaataaataaataaataaataaataaaatggtgcttcaaggagtactatagatgagagagctaagattgtagaacactctagagatagttgtgggaagagagctcagttactcttcgtatatttatgtgtatgtcactttctttttttgttgtccaactcccaaggtcgcatcctgagtctcagctggcatccctctggtacccacattgcagctggttccatagactacattagtgtgtttgatgtcaaatcaggtgattgtttttttcagttcatttggggtgtgggttttgtcagattcacatttctgagttttcaaaagcttgagcctttgtcatggtttcatgacctttatggcctaacatgtcattaatcttctgagatgtc

SEQ ID NO: 16386 - DNA, 2300 bp, Homo sapien
gcatatttttaaaaactcaaatagtacaaaagggtatacaatgaaaaaaaaatcattttgtgagtttttaaaaactacatacatgttacattcaacttttctttattctccagattcttttttgtttggttagttggttggtttttttgtttgtttgcttacttttttgaggcagggtctcattgtgttatccaggctggagagcagtggcacggtcacggctcactgcagcctcaacctcccaggctcaggtgatcctaccacttcaccctcccaggtagctgggactacaggtgtgcaccaccatgcccggctaattttttgtagagtcagggtttcaccatgttgtccagacaggtcttgaactcctgggctcaagcaatcctccacctcagcctcccaaagtgctgggattacaggcatgacccactgtacctggccttcaaatgttcttcatttgctatttcttagaagtctttaaagcagaacgccgtacacaaaacagaaaataagtacttcaaaccacctatcctccagagctttccttcagtaaatgcctccctgctcaggtttctgaagttggggtctagtatgaggctatctatgaagtattcaaagggccaaaataagaatagacctccattcttggatttggaaatcaaagccatgccttttaggtgctctgcctctgaaataatcatattaatgcagaccacacgaggatcgagattatgtgtagatatctgtgggtatgtccagagtggcaagagcttgaggcgtcatgtcccagtgcaccttgttatgtgaagtttaattgcacattcatcttgattcctgatattgccagggtcctgagaacattatctgtagctgtatctccccatgtggaagttggatagcctattctacagtttctcggttttttctctatcggctgaattatgaacatgacaacataagcctcaaaagggtaagtgatagtccaatatctggtcacataagaggaaacttcctaaatatgtcatttttgtgtgaagtggaaatcaactggatgtgaatccttgctcagttaaaaactatttggagatttggagaaggctgttatgaaacagtgttttatttctttctttctttttttttttttttttgagacggagttttgctcttgtcacccaggctgtagtgcaatggcacagtcttggcccactgcaacctccgcctcttgggttcaagcgattcctgtgcttcagtctcccgagtacctgggattacaagcacccaccaccacacctggctgatttttgtatttttagtagagatggagtttcaccacccgttggccatgctggtcctgaactcctgacctcaagtgattcacccgcctcagcctcccaaagtgctgggtgctggcattacaggcgtgagccaccgcacccagccttttttttttttttgaccgagtttcactcttgtcacccaggctggagtgcaatggcaccacctcagctcaccgcaatctctgcctctcgggttcaagccattctcctgcctcagcctcccgagtagctgggattacaggtgcccaccaccaggcctggctactttttgtatttttagtagagatggggtttcaccacgttggccaggctgtcctgaactcctgacctcaggtgatccaccccctcagcctcccaaagtgctgggatcacaggcatgagacactgcgcccggcccacacccagcctttatttccattttgaaattttgaggtatgttcttagagggatagggtaatgccctacaggcaataaaattaaagcttttctgtttagtggtttcacgtgcgacttagttatttccttgatagagaagtgaatatttagtaaagagatgaaagggggatgtatagattactggagagaaaccagtgttctgtgccgagtcagttggcttacttagagacaggaagcattaatgtaccttaagcctagctgtgattgtttctgatgggctgtaggtctcccttctctcactggcttttattattggttcacccaaaggtttccaaaatgccagcattccttcgctctgcccttcagattttgttttctgaagattcaacaaagctctttgtagcatcaaatcaaggagctctgcatattgttcagctgtcaggaggaagcttcaagcacctgcatgctttccagcctcagtcaggtgggaatctggtaactggccatggggagacttgtcgtgtctaagatgtaacttttttgcttttaagcctccatgtcgggggt

SEQ ID NO: 16387 - DNA, 2300 bp, Homo sapien
tctaaagaagatcaccctcaccaatgtgggcaggcagcatccagtcagttgagggcctgagcaaaacaaagggcagaggtagggggaattcattctctgcctgagctgggacatccatcttctcctgccctcagactttggtgaacctggctctcgggccttggcagtgggatggtgacttacatcattgtccccccaccccaactcccaccctcacccccttctcagactttctgttttgagacagggtcttgctttgtcacccgggctggagtacactggtgcgatctcagctcactgcaacctccacctcctgggttcaagcaattctgcctcagcctcccgagtagctggaattataagggcccaccaccatgcctggctaatgtttgtattcttagtagagacgggggtttcaccacattggccaggctggactcgaactcctgacctcaagtgatctgcctgcctcggtctcccaaagtgctgggattacaagcgtgagtcaccgcgtgtggctcagactttttttttttttttggagatggagttttgctcttgttgcccaggctggagtgcagtggtgcaatcttggctcactgcaacctctgcctcccggattcaagcgattctcctgcctcagcctcctgagtagctgggattgcaggcgcctgccaccacacctggctaattttttgtatttttagtagagacggggtttcaccatgttggccagactggtctataactcttgaccccaggtgatccaccgccttggcctcccaaagtgctgggattacaggtgtaagccactgcacccggcccagactttctttttctttctttctttctttctttttttttttttttttttgaggcagagttttgctcttgttgcccaggctggagtgcaatggtgccatctcagctcaccgcaatctctgcctcccaggttcaagcaattctcctgcctcagcctcccaagtagctgggattacaggcatgtgccaccacgcccggctaattttttgtatttttagtagagatggggtttctccatgttggtcaggcttgtctcaaactcgtgacctcaggtgatccgcccacctcagcctctcaaagtgctgggattaaaggcttgagccaccgcgcccggcccagactttcaatctcaggtttataccactgattctgggtctcaggcctttgggcttggattggaagtgcaccaccaactttcctgggcctgcagtttgcagatggcagatcgtgggacttctcagcatccataatctcgtggccagtcccttgtaataataataaatttatatatctctatatatcctattggttggtttctctgaagaaccctaagacaccatcattctgcaaatatccttgaggcctgccaattgtggcttcagggtttaagaagacatggttccctcttgaattacaggcaagtaaacgagattacaaaacattgacaaaggcttggatcatgctgttggacctttgcttgagctgttcaccgtccgttgttacctctgtgaagctgaccccaggcctaaccaaatgttccttttatgctgttctggggacgtcttctgcatgtcacttaaccacatagtatcacacctagttggttggttctgcattttccttccccactagaccgcaaactctcagctgttgttggtactattgagcttaagtacagggcctcaaaaggagccggagtacagggctaagcgctcagtacacagggtacgaaccaatcaatgcaagaatgaacgtgccaccgggtcttgcaggcttgagaagtgtttctccaagctgattttgctttccgtgcccgggcagctcccgtgaattgcacggtagaggtcaggagtttctggggggtccgtggggagccaatggaaggatgaggagaaatgcagtcccaccgcattcgggttgcccacgtccggcgagaggcgagtgatcggacaacttctgcacctcccggaagcggctgcgccggccccgcccctccagaggcaggcgtggcctcatgaataatgaatcgtgcgggggaggggccgggcccgcccctccgggcgggaagagggaagcgccgaggctgcctgactggaatgagggtagctgcggcgactgcggcggctggagcggggccggccatggcggtgtggacgcgggccaccaaagcggggctggtggagctgctcctgagggagcgctgggtccgagtggtggccgagctgagcggggagagcctgagcctgacgggcgacgcc

SEQ ID NO: 16388 - DNA, 2300 bp, Homo sapien
ttttcgtatttttagtagagatggggtttcaccgtgttagccaggatggtcccaatctcctgacctcatgatctgcccgcctcagcctcccaaagtgctgggattatgggcgtgagccaccgtgcctggccttagattttaaatcctctactatttagttcttcctaccaggcatggtgaaacccagtacaccaccagttgtctcctaattggggatgtgaaacctcacaccagtattatgacatggaataaccttactccatagtgcacttttgcctgtggctttaagttcctaagagtttccatagctctggcacattctttacctaccttaaatttattttgcatcttcgtttattaagttgtctgtatatggtagtgaggtagtgatgcttagtgtcctttctccacagaccatggacctgcactcttgtccgaagccgattgtatttgtgttgcacacgtttttatcggccaaagtcactcgtatgggactgcttgtatgagcaacaaaaaatcagaaaagagccttgactgtcacaagaaatatttccacctcaaaaaaaaaaaagcacaaaaagaaactctttgctctccttcagcacagtgccttcccaaggacctgcaaataactgctgaaccataaccgtgtttaaagaagagcctacctttcacagtctaccttggccagatattctagcactctaaaaggctccaaaatgaagctgttgatttattctcatttcaaaatatggtttatgagtaattaggtttatttctactgctaaaaagaatggctcattgttttctttttttttcattgttttcatttttagacataatcaaatacccaagcattgttttctttttcttctccctgtaggatttgtgttgtgcttagccttgatctcttgttcagaacaattgtcccttcccaggtgctagcttgcagcagcctgttgcttcctgagcattccagataggtcgtatgtcttggaatttactgtcctcactagctccttccaccataggaagtccttgaattgtatcaccaaagggttgttccatttgccctggatctccctctatctcagcctggccatcacttcccaccttatcccaagctttgccactgtctctaggacttagaacttgtaaatttgatttgccttgccttctacttcctttctagtggtgactgagttgaaaagcaagttggaagccactgcttttaaagaaaagttttgcttggtttaggtttttccaattttatttttgttaggagccaggggataagatttattttaaatgaaaatcctcttcctaggttaagccattttttttattgcttaccaaatgtgcctttggttagggttagtggagctttattagtcactatttgaataactggaaatcactgccatttccaggagatcacctatcctagttttgaggaatagtcattgaggtgggtttccttaatggcatctcttctagtaggcagatctgtttgaacaagataaatcctaaagagccagcctgcttgaggagtagacttggtgggtgaagccagcaattccgcacaaacgtcatgttgaattgttttgggctgcccaaaaacaacaggatgcagcatcctggctgtggcctggccctttgtggcagcagtggcatggacaagcaactgctaattcgagacttactattggcttcacagcacaccctacagtgagcagggtgatgagaccgtggaacagctacctgcttttggttaagattgccagatatcattaggacacagtagcagcaagaatgctgattttgtagtgttagaaaatgaactcagcttgtttttcctaattttgaaggtggtatatatctgcaaacatttaaaatggtataatatcatataaaatgtcaaaattagcacagtccctggatctcaaagaataggtaatattgacttggatgttctttatgctctctgaagaaaggtctagggaaagttcttgtttgcttgattgatcaagagtgccacggaagaatgtgagcgctgtggagggtggaggagggtgtcacttcagatggggcaggcacagggggagaaaagaagagaaaaacacacctgtgtgcaaaatgagctatttggtttcagtgcggcctgaccgatggggaggacccatgagcagagagagttctaggtcaacattgtaactccattgtcctccttcacccataagtcagtcctccttcctcattacagtgaaaccaacaatatgcagaggttggggagagatgcc

SEQ ID NO: 16389 - DNA, 2300 bp, Homo sapien
ataaagtcctcctaatcaagaaatcaacattggcacaccaccactcattccatagaccccattcaaatgatgccagccatcccggccatgtcctgttttcctctctggccttggatcctggccaataccactttcttgccttttgtcgtcgtgtctcagttcttcagtctggaatgttcctcggccttactctaattcgcatgtgcctgagtctcagcacaaggctttgattgttcagcacagctctccagctggctctattcggtgttgcctcacaaccaggctgtgtcacacactcttggcagagatgccacgatgccatgctctcttcagggtatcatgtggagagacacacgagggccacgcatcccaccaccaggggtgttcccttcggtcgcgtagtcaagctaatgtcctcattgttttctcctttgtatttatttatttatttagagatggagttccgctcttgtcgcccaggctggagtgcaatggcgtggtcttggctcactgcaacctccgcctcccaggttcaagcgattctcctgtctcagcctcccaagtagctgggattacaggtgcccaccaccatggccggcgaatattttgtatttttagtagagacagggtttcaccatgttggccaggctggtcttgaactcctgacctcaagtgatccacctgcctcggcctcccaaagtactgggattataggcgtgagccaccgcgcccggcctctcctttgtatttaattagcattttgtgaagagagattaaggtgtgccaattttttggttttttttttttttttttttttttttttttttttttttttttggaggcagggtcttgcttcatttcccagggtggagtacaatggcctggtcacggctcactacagcctcgacctcccaggctccagcaattctcccaactcagcttacggagtagctgggactacaggtgtgcgccaccatgcccagatacgttttttattttttgtagcgatgggggttcacctgttgccgaggctgttctcgaattcctcggcccaagcaatcggcctgcctcggcttcccaaagtgttgggattacaggcatgagcccccatacccagcctcaacttggatgttttttgccctccattttttttctctcacaggatagacttgtggacaaatggatcacttgcctctggtgcgtttttttgtttgtttgttttgttttgtttcttaatttagcgacgaggtcttactatgttgcccaagctggtcttgatcctcggctcaagcaatcctcctgccttggcctcccaaagtgctggaattacaggcgtgggccagtacacccagccctagaactgctttgatcattgtatccccagaaactagcacacaacgctgcacacagtaggtgtgcatgcctgtaatcccagctactcgggaggctgaagcaggagaatcgcttgaacccgggaggcggaggtcgcaatgagccgagatcatgccactgcactccagcctaggcgacagagcaagactccgtatcaatcaatcagtcaatcaatccaagcaaaacaaaactggctttgaacagtcagcggcatcccaccagggattgagccccagtgtggggcacactctgtttacattagctagctcatttattccccacaaaagccagacaaggcaggtactaattatgatcgtgcgatattaaacatggagaaaccaacgctctgataagttcgttttattgtgagaataaaactgctcaatgggcgctgttattccaagcgaggtcaggatttccggattctaccccgctccgcccctggccccgccccgagaatgtacgtcccgccaggccccgccccggccttgtcccacccaccccgtccccgccccctgtccgtctcgccctagtcccacctcctcgtccccagtcagtcctgcctctcgaaccgccccctgccttcgccgaggcagggagaggtgcctgcagtgcgagccgtggacgctagggggcagccgctcggctcgggcccgaccgctctgggctgcgctcctcgcttgccctcggactcggctcccgctgcgagcggccgccctgcccgcgcaccgcgctcagcgcccaccgccgggcttcccgcgccggacccagtacctcggctccccggggccggaccgaggccgcaagcagcgccgcggggtgtggggcggacccaggagatgaaatgacaacgtcaaccctccaggtacttcgtgcggcccggcccgacttcggaggccgaaggcagc

SEQ ID NO: 16390 - DNA, 2300 bp, Homo sapien
tgcctccaacaggtggggcggccggctcgggttaggagccctgccgaggtggcacaggatggaacttggacccccaaagcagggcgggtggccccgattccccagccagggtcctctccacagcctctcacctcaggtactgggttcgcccaccacggtgatcccagtcatatgaacacaaatgctggtggtatctcggaggcgtgggaggggaagtgagggggtcccccaggcaggagaggggtgggtggtgtcagctgcctcaccagaggcgaggcctcctcctggatggagggtctgcaccacgttcccatccgcagagggagaggtctggcgaggcaggggtggaggccagggatctccaataaggattaaatcaagttttgaggatgacagattccatccagggaggaagtagccctggggtgacagtggctgcgttctccccaggagttccctttcgatttcggttttgctttctcctctgtccttcggcagtggctgctttggagtcaggggcacatgctgtccctgagtctctacaaaaagcttctggtgcggggcatggtggctcacacctgtaatcccagcactttgggaggccaacgcgggcagatcacttgaggtcaggatttcaaaaccagcctggccaacatggtgaatcccgtctctattaaaaatacaaaaaaataggccgggcgcggtggctcacgcctgtaatcccagcactttgggaagccgaggcgggcggatcacgaggtcaggagattgagaccatcctggctaacacggtgaaaccccgtctccactaaaaatacaaaatattagccgggcgtggtggcgggcacctgtagtcccagctactcaggaggctgaggcaggagaatggcgtgaacccgggaggcggagcttgcagtgagccgagatcgagccactacactccagcctgggcgactgagtgcgactctgtcttaaaaaaaaaattagccaggcattgtggcatgtgcctgtaatcccagctactcgggaggctgacgccagagaattcagagaattacttgaacccgggaggcggagattgcagtgagctgagatggagattgtgccatcgcactccaacctgggcaccatctcaaaaaaaaaaaaaaaaaaaaaagaagcttctggcagctgcattgtttgactggcttttttttttttttttcccccagacagggcttcactgtctcccaggctggagtgcagtggtgcgatcttggttaactgcaacctctgcctcccaagtagctggcaccataggtgcgtgccaccatgcttggctaattttgtgttttttgtagagacaagatctcgctgtttcccaggctggtctcaaactcctgggctcaagcgatcctcccgcctcagcctcccagagtgctgggattacaggggtgagccaccgcacccagcctgggctgtgagagccactgcaggtggcctcccagagtatgaggtgtgagtcaccgcacctggcctgggctgctctttaagtccagctgaagcacatttcccttacggccttcaggagagggccgacccggattcccatctgctccgcgaagaaacagggcgggttataggagtgtttgctgggggggtcctgaagtgagctgctgagagcattggcccaaatgtccctgaagtacttgcttgagtcacacggcactgttaagccaggaaggcttcgttccttaaccagtgtgcaggcagcggagcctggacttgctgggagcacctctgtgctccaggctgaagggccagcttgtgactttccgtctcccttcccagcagtgacagtgacagtgaaggggataatccggagaaaaagaaactgcaagaacagctgatgggtaagtggctcgcggccctgtggcagcggcaggggatgagagtgggtccgctgctgggttggctcatgccccttggccgggcccgggcccgggccggcctccctctcgcaggtgccgtcgtgatggagaagcccaacatacggtggaacgacgtggccgggctggagggggccaaggaggccctcaaagaagctgtcattttgccaatcaaattcccacacttgttcacaggtgagagttgagccatttcaaaccccaatgtaaaaattccaggcttccgcagggctggcactccgaggcacccgggagtcagtggcgactcagcccccggggcctgcagagggccaggcctggctgctcgctggtgtccacaacactgctgtggctggagctatgagatgacgatca

SEQ ID NO: 16391 - DNA, 2300 bp, Homo sapien
cacacctgtaatcccagcactttgggaggccaacgcgggcagatcacttgaggtcaggatttcaaaaccagcctggccaacatggtgaatcccgtctctattaaaaatacaaaaaaataggccgggcgcggtggctcacgcctgtaatcccagcactttgggaagccgaggcgggcggatcacgaggtcaggagattgagaccatcctggctaacacggtgaaaccccgtctccactaaaaatacaaaatattagccgggcgtggtggcgggcacctgtagtcccagctactcaggaggctgaggcaggagaatggcgtgaacccgggaggcggagcttgcagtgagccgagatcgagccactacactccagcctgggcgactgagtgcgactctgtcttaaaaaaaaaattagccaggcattgtggcatgtgcctgtaatcccagctactcgggaggctgacgccagagaattcagagaattacttgaacccgggaggcggagattgcagtgagctgagatggagattgtgccatcgcactccaacctgggcaccatctcaaaaaaaaaaaaaaaaaaaaaagaagcttctggcagctgcattgtttgactggcttttttttttttttttcccccagacagggcttcactgtctcccaggctggagtgcagtggtgcgatcttggttaactgcaacctctgcctcccaagtagctggcaccataggtgcgtgccaccatgcttggctaattttgtgttttttgtagagacaagatctcgctgtttcccaggctggtctcaaactcctgggctcaagcgatcctcccgcctcagcctcccagagtgctgggattacaggggtgagccaccgcacccagcctgggctgtgagagccactgcaggtggcctcccagagtatgaggtgtgagtcaccgcacctggcctgggctgctctttaagtccagctgaagcacatttcccttacggccttcaggagagggccgacccggattcccatctgctccgcgaagaaacagggcgggttataggagtgtttgctgggggggtcctgaagtgagctgctgagagcattggcccaaatgtccctgaagtacttgcttgagtcacacggcactgttaagccaggaaggcttcgttccttaaccagtgtgcaggcagcggagcctggacttgctgggagcacctctgtgctccaggctgaagggccagcttgtgactttccgtctcccttcccagcagtgacagtgacagtgaaggggataatccggagaaaaagaaactgcaagaacagctgatgggtaagtggctcgcggccctgtggcagcggcaggggatgagagtgggtccgctgctgggttggctcatgccccttggccgggcccgggcccgggccggcctccctctcgcaggtgccgtcgtgatggagaagcccaacatacggtggaacgacgtggccgggctggagggggccaaggaggccctcaaagaagctgtcattttgccaatcaaattcccacacttgttcacaggtgagagttgagccatttcaaaccccaatgtaaaaattccaggcttccgcagggctggcactccgaggcacccgggagtcagtggcgactcagcccccggggcctgcagagggccaggcctggctgctcgctggtgtccacaacactgctgtggctggagctatgagatgacgatcacgtcacagggtgggggcaggatcaggaagcagtgccagccggtgtcactgtgcaaggtcatggggtcatagcaggggcactgtgcaaggtcatggggtcatagcacagggcacagcagggaatgtagctcccatcacttgtttgccagtagagtccgttgtttcacagaatgccctgttttactgtatgtatgggactcgagaccctctgcttttcctattcctttccccagtcaggaggcctaacttctgtggttctctgttgcaggcaagcgcaccccctggcgggggattctgctgttcggaccccctggcacagggaaatcctacctggccaaagccgtggcaacagaggccaacaactccaccttcttctctgtgtcctcctcagatctgatgtccaagtggctgggggagagtgaaaagtaagtcggccaccaggccatgctctgccagcagccccggcactgctagtgacccagcggcccaccctgtggagtcacctctcagaggagtggtttggttttcagggagggtacccaagagcagtgtgtcgctagcttatcggctggga

SEQ ID NO: 16392 - DNA, 2300 bp, Homo sapien
actgtctcccaggctggagtgcagtggtgcgatcttggttaactgcaacctctgcctcccaagtagctggcaccataggtgcgtgccaccatgcttggctaattttgtgttttttgtagagacaagatctcgctgtttcccaggctggtctcaaactcctgggctcaagcgatcctcccgcctcagcctcccagagtgctgggattacaggggtgagccaccgcacccagcctgggctgtgagagccactgcaggtggcctcccagagtatgaggtgtgagtcaccgcacctggcctgggctgctctttaagtccagctgaagcacatttcccttacggccttcaggagagggccgacccggattcccatctgctccgcgaagaaacagggcgggttataggagtgtttgctgggggggtcctgaagtgagctgctgagagcattggcccaaatgtccctgaagtacttgcttgagtcacacggcactgttaagccaggaaggcttcgttccttaaccagtgtgcaggcagcggagcctggacttgctgggagcacctctgtgctccaggctgaagggccagcttgtgactttccgtctcccttcccagcagtgacagtgacagtgaaggggataatccggagaaaaagaaactgcaagaacagctgatgggtaagtggctcgcggccctgtggcagcggcaggggatgagagtgggtccgctgctgggttggctcatgccccttggccgggcccgggcccgggccggcctccctctcgcaggtgccgtcgtgatggagaagcccaacatacggtggaacgacgtggccgggctggagggggccaaggaggccctcaaagaagctgtcattttgccaatcaaattcccacacttgttcacaggtgagagttgagccatttcaaaccccaatgtaaaaattccaggcttccgcagggctggcactccgaggcacccgggagtcagtggcgactcagcccccggggcctgcagagggccaggcctggctgctcgctggtgtccacaacactgctgtggctggagctatgagatgacgatcacgtcacagggtgggggcaggatcaggaagcagtgccagccggtgtcactgtgcaaggtcatggggtcatagcaggggcactgtgcaaggtcatggggtcatagcacagggcacagcagggaatgtagctcccatcacttgtttgccagtagagtccgttgtttcacagaatgccctgttttactgtatgtatgggactcgagaccctctgcttttcctattcctttccccagtcaggaggcctaacttctgtggttctctgttgcaggcaagcgcaccccctggcgggggattctgctgttcggaccccctggcacagggaaatcctacctggccaaagccgtggcaacagaggccaacaactccaccttcttctctgtgtcctcctcagatctgatgtccaagtggctgggggagagtgaaaagtaagtcggccaccaggccatgctctgccagcagccccggcactgctagtgacccagcggcccaccctgtggagtcacctctcagaggagtggtttggttttcagggagggtacccaagagcagtgtgtcgctagcttatcggctgggacacagtcccaacaaagacaagtgaaggtggaagggacctgggagaggtgaagtgctccacaagagaagggaaaggaagtgaggatatttttggggtctgggttgcggtccctgttggggcagtgtgtgggggacatggttccccacactgactcctgttttgcgtgtgatgagacgggctcggaagaaggggactgacgtgttgtaagtgcagagctagcgcatggggctcctgggattgaggctctgcgtttggggctgacaccaaggtgtgctcctcctcttggtgcagtgtggcccgagggctcctcaccaccacgttttccgcaattccggcatgaccgtggcctgcgcctccctgtgggaagggtgagaagagggaagtgccgggagcccaggcgggcacggacgtgaacgtcttgtcctcaccccctttctcaccttcacaggctggtcaagaacctgtttgagctggccaggcagcacaagccctccatcatcttcatcgatgaggtggattccctctgcgggtcccgaaatgaaaatgagagtgaggccgcccggaggatcaaaacggagttcttggtccagatgcagggtgtgtgccgggcccagggcccccttggttcttgttgcacctgaagccaac

SEQ ID NO: 16393 - DNA, 2300 bp, Homo sapien
gatcacgtcacagggtgggggcaggatcaggaagcagtgccagccggtgtcactgtgcaaggtcatggggtcatagcaggggcactgtgcaaggtcatggggtcatagcacagggcacagcagggaatgtagctcccatcacttgtttgccagtagagtccgttgtttcacagaatgccctgttttactgtatgtatgggactcgagaccctctgcttttcctattcctttccccagtcaggaggcctaacttctgtggttctctgttgcaggcaagcgcaccccctggcgggggattctgctgttcggaccccctggcacagggaaatcctacctggccaaagccgtggcaacagaggccaacaactccaccttcttctctgtgtcctcctcagatctgatgtccaagtggctgggggagagtgaaaagtaagtcggccaccaggccatgctctgccagcagccccggcactgctagtgacccagcggcccaccctgtggagtcacctctcagaggagtggtttggttttcagggagggtacccaagagcagtgtgtcgctagcttatcggctgggacacagtcccaacaaagacaagtgaaggtggaagggacctgggagaggtgaagtgctccacaagagaagggaaaggaagtgaggatatttttggggtctgggttgcggtccctgttggggcagtgtgtgggggacatggttccccacactgactcctgttttgcgtgtgatgagacgggctcggaagaaggggactgacgtgttgtaagtgcagagctagcgcatggggctcctgggattgaggctctgcgtttggggctgacaccaaggtgtgctcctcctcttggtgcagtgtggcccgagggctcctcaccaccacgttttccgcaattccggcatgaccgtggcctgcgcctccctgtgggaagggtgagaagagggaagtgccgggagcccaggcgggcacggacgtgaacgtcttgtcctcaccccctttctcaccttcacaggctggtcaagaacctgtttgagctggccaggcagcacaagccctccatcatcttcatcgatgaggtggattccctctgcgggtcccgaaatgaaaatgagagtgaggccgcccggaggatcaaaacggagttcttggtccagatgcagggtgtgtgccgggcccagggcccccttggttcttgttgcacctgaagccaaccctgggctttattctgagctgcggctggatttggttgttctcagcctcggagaggcactccccagctccagcccctcagggcacgggtggacttcaattcccaagaggtgcctgaggcctctgcctcacgggccactccacccctcccatggcaggcagtgccataggtctcacctggcacagccagaccaagatgtggtttaatctcacttgggaccctgccagtggtgggtggcacagggatggcttcaattgctgacacacaaagcccccggggtctgtccccaggtttcaactgacccgtgcaggtgtccagagtctgagtctttgtctccctttctccacaggggtggggaataacaatgatgggactctggttcttggagccacaaacatcccatgggtgttggattcggccatcaggaggaggtgagtcttccccaggagaagccagggctggaggcttcctcccaccatggtcacggtccgcctgctgctggcagcccgggtgcagcctggccccttttccctggagtcttcccgtctgcctgccaagcagagccctttgtgaggctggcttgttgaggatgtgccgccagcatcactggcccatgaaatgcgtccgtttcactcaaatcttcgtgcctccccttccgtgaataccattccatcatccgctgtcaactcctgccgtgtgctgggctctctaggtttgaaaaacgaatttatatccccttgccggaggaagctgcccgcgcccagatgttccggttgcatctcgggagcactccccacaacctcacggatgcaaacatccacgagctggcccggaagacggaaggctactcgggcgcggacatcagcatcatcgtgcgggactctctcatgcagcccgtgaggaaggtgcagtcggccacacacttcaaaaaggtgagtgcccgcggccactgctgagaaaaatctcatagtaagagcgggatgttcggttttttttttcccagctcctggtcctgctccccggctgctcaggtgacacagtctctgaggcctcctggagagccgagggccagtgcc

SEQ ID NO: 16394 - DNA, 2300 bp, Homo sapien
tgtaaactgccttactgatgtgtaattcacatactaaataattcatccatttgtgtaagtcagtgttttttagtaaatatgaatccaattttagaatatttccatcactccaaaaagatccttcatgcacgtttgtagtcattcctcgacagcatccttagtccctggcaacctactttctgttgccatagatttgcctcttctggacatttcataaaaatggaatcatacattatgtggctgtatctggctaagcggaagaagccagtcacaaaagaactacatacgtatgattccatttatgtgaaatatctagagaaatggtttttacagtcttttttttttttgaggcggagtctcgctgtgttgccaggctggagtgcagtggcacagtcttggctcactgcaacctccacctcccgggttcaagcaattctcctgcctcagcctcccgagtagctgggactacagactcgcaccaccacgcccagctaatttttgtgttttagtagagacggggtttcaccatgttggccaggatggtctctatctcttgacctgtgatccgcccacctcggcctcccaaagtgctcggattacaggcgtgagccaccacgcccgtcctaaagtcttttttccaattcactttcacgtccttgtccctttgtggtaggagaggggcttggttgaggcacagcttcccaaagggcaatgggtcagtgcatcacacgtgcaaagcctggctgccctctgctttttccctggtgctgcctgaggtctgggttcctgctgcaggcaccctacactgctgttccgttacgttctgcttcacagtatagcttcccattccctgtaacaaaggtggtttttgctgtattaaaacatagtaattgatggctgggcgcagtggctcatgcctgtaatcccagcactttgggaggccgaggcggatggatcacctgaggttgggagtttgagaccagcctggccaacatagtaactccgtctctactaaaaatacaaaaattagcctggcatggtggcgggcgcctgtaatcccagctaccacggaggctgaggcatgagaactgtttgaacctgggaggcagaggttgcagtgagcagcaatcacgccactgcactccagcctgggcgacagagcgagactgtctcaaaaaaaaaaatagtaatggctcgttttttttcccttaaatttccttttttttttttttttttttttttgagacggagttttgctcttgtggcccaggctggagtgcaatggcgcgatctcggctaactgcaatctccacctcctaggttcaagcgattctcctgccttagccttcccaagtagctgggattacaggcctgcgccaccaagcccggctaatgttgtatttttaagagagatgggatttctccgtgtgggtcaggctggtctcgaattcctgacctcaggtgatccgcccccccctccccggcctcccaaagtgctgggattacaggcgtgagccaccgcgcccggcctcccttaaatttctatattgagttttattagtaactgttttccattttgctttccccacgtctgggttaggcattcctcccactcagctctccaagtacggtaacctagggcatgtgaacatcggcgccattcaggagcccctcgcctttatcctgccaaagagagagacgcttttcaccctggatgaccaggcgctggggcccgagctcacagctccagcaccagagcctcccgccgaggagccacgcctggagcccgcgggcccagcctgcccggagggagggcgagcggagacgcaggccgaaccgcccagcgtggggccctagccggcgtcccctgcctccagaacgcggtgcgtgaggttcccggcgcggggtggccaggactgcctcgccctggaaggtccggggcgggttcgggaggcgggaaggcgctcccgggaggagagcggaagggggcggtgctcactgccagtctaagcaggaaggcggggatccagtcgcggcttcgctgtgtgctggccgacggcgcttcccggcgtgccccgcgctgcggccggaaggggcgggccgggtcactgttaagggggccgccatggcccggctgtggggcgcgctgagtctttggccactgtgggcggccgtgccgtggggcggggcggcagccgtcggtgtccgggcttgcagctccacggccgccccggacggcgtcgagggcccggcgctgcggcgctcctattggcgccacctgaggcgtctggtgctgggtc

SEQ ID NO: 16395 - DNA, 2300 bp, Homo sapien
ctcaccgcaacctccacctcctgggttcaagtgattctcctgcctcagcctcctgagtagctgggactacaggcgcgcaccaccatgcctggctaattttttgtatttttagtagagatggggtttcacttgaactcctggcctcaagtgatccgcccacctcagcctcccaaagtgctgggattacaggcgtgagccactgcgcctggccctatataccgttttactaatgaggaaataggttcagagaggccaagtaccttgccacagccagcaagtggcatatctggatctccatctgttagatttattaattgtatgtttttggacaagttgcttaacctctctgggattaaaaatttcctcaattgtaataatacttaccttataggtggggtgtgaggaataaatcagatagatcatccagcccaatgttcatagcaggtacttggtaactgtagctaaggtttgggtacagagcagtgaaggatcaacattcttctgattattactaggaactttgtgaaggaagccgaggagatcagctccaaccgccggatgaatagcctgaccctaaaccggcacacagaaattttggaaatactggagattcctcagctcatggacacctgtgtccggaacagttattatgaagaggccctggagcttgcagcctacgtacgccgactggagaggaaatactcttccatccctgtcatccaggtagccaccttgcccagagaggactcaaagtaatgttcttgtaatcatttattctgtggtcaggactgaagctttaggtagaaactcttgcatgtttcacatcagtttctgccagccaggtatgcctgaacagaaaacattcatttattcaaaatacatattaatcatgtgccaagcactgctctatatgctggggatacagtgtgaataaagtggtcctggctctcatgcagcttacgtgctaatgggaagtctgataattgacaaagaaatgatatcatttcagatagtggtgtctgaagaaaaaaacagggaatggggtaagggagtctagggtaggtttctttaggtagggtgatcaagaaggactcttctagggaggtaacatttaagctgagacctaaatgagaaggaggtgccagcccacaaagatctggggagagagcaaaccagaaagtgtgaagaacaagtagagagggctgaagtgggcagaaattgaggtgtttaagggatacagaggcagccagggttaatggattgtagcagcgggagagcactaggaagcaggtgaagatggagagccaggtagggccaccagtgtaagtcccaacaagtggttggaattttcttgattgcagtgggaagtcactggaggattttaagcttttttttttttcttttttttttttgagacagagtctcgctctgtcccccaggctggagtgcagtggtgcgaccttggctcactgcaacctttatctcccgggttcaagtgattctcctgcctctgcctcccgagtaaccgggattacaggcctgcaccaccacacccacctgatttttatatttttagtagagacgaggtttcacatgttggccagattggtctcaaactcctgacctcaagtgacctgcctgcccacggtgctgggattacaggtttgagccactgcacctggccaggttttaagctttttaagcaagagagttaactaacctgatctttgttggtgaacctacaggcatcagctttaggaaattacttcacatttcaggaaagccatgggaatgttggtctgcagtcttcagagttaggggaatgggttctagagagcatccttcccagcgcagtgtgactctctctgtgtattgtcagggcatcgtgaacgaagtgcgccagtccatgcagctgatgctgagccagctgatccagcaactgaggaccaacatccagcttcctgcctgcctccgtgtcattggctacctgcggcgcatggacgtcttcactgaggctgagttgagggtgaagtttcttcaggcccgagatgcttggctccggtccatcctgactgccattcctaatgatgatccctatttccatattacaaaaaccatcgaggcctcccgtgtccatctctttgatatcatcacccagtaccgtgccatcttctcagacgaggacccactgctgccccctgccatgggtgagcacactgtgaatgagagtgccatcttccatggctgggtgctacagaaggtctcacaattcctgcaggtgctggagaccgacctttacc

SEQ ID NO: 16396 - DNA, 2300 bp, Homo sapien
agtctactttcaacacttctccatatttgcagagacctgctttatcaagtcccctatctattctggagcatggaagggtacaaaagctgctgtcaaatatccaaaggctcaaaagaaaaattaaactttaatcatgaaaggctggaaggcagaactagggataatggagacagaatatgactcacaaaggacttttttttttttttttgagacggagtcttgctctgtcaccaggctggagtgcagtggcacgcatcatcttggctcactgcaacctccgcttctcaggttcaagtaattctcctgcctcagcctcccgagtagctgggactacaagcgcgtgccaccacgcccagctaattgtatttttagtagacatgggggtttcagcatgttagccaggatggcctcgatctcttgacctcgtgatccgcctgccttggcctctcaaagtgctgggattacaggtgtgagccaccgcacccagcctttttttctttttttaagagagtttcactttgtcacccagtctggaatgcagtggcacaatcacagcccaccgcagcctcgacctcccaaactggagtgcggtggcacaatcatggctcactgcagcctcaatctcccgggcccaactgacccccccacctcaacctcctgtgtacctgggactacaggcgcacgccaccacgaccagctaattttttattttatagagacagggttttgccatgttggccaggctgctctcgaactcctgggttcaagcctcaggctcccaaagtgctgggattacaggctgagccaccacatccagccatccaaatggagagactttttgatatctgatgccctcaaatgcgaggatttccttgtcaccttcccgtcaatggaagttttgaagcagatgacctccggtccacgctttcgtataaaataagtatataaatgtgcacatatattcagctcacacctataatgttaactgtgtcagacccgataataagagctttgcatgaatcctttttctttgtgcccacaactgcccttcgagggagggacgtgcttctgggtaaccagttctgaattcgaaacctcctagctgtgtccttggacgtcactaatctctgtcttgacttgctcatatgtaaaatggaaataacagggctgggcgcagtggattatgcctgtaatcccagcgctttgggaggccgaggcggacagatcacgacatcaaaagatcgagaccatcccagccaacatgctgaaaccccgtctctactaaaaatccaaaaaaattagctgggcgtggtggcgcgcgcctatggtccctgctactcaggaggctgaggcaggagaatcgcttgaacccaggaggcagaggtaggttgcagcgagccgagatctcgccactgcactccagcctggcgacagggcgagactccgtctcaaaaaagataaaaaaggaataacagtacctatctcgaaggctgttgtgaggtttaaatggattaataaagcgctcagcagagaacctggaacgtggtaaacgctttatgtgttagttatttctaccatcgtaaatgtcagcttttacagttataaaacccctttagcgccaggcgcgtcgcacctgcagctctgctggaagctgggcaaacggtcgagcaggcggccgagcgacgcctccacgtcgccaaacaggcggtggatgcgctcggtgcactcggcgccgcggatgaaggtcttgtagttagcgaaggccaagtcgcgcgtctgctgcagcagctgcgcccgctcctccgccaggcgctcgggctcgcgccgcagccgctccagccccgagccgctcaactcccggaggtagcggcccacatcgggccgctcgcgccactgggcctcggggaagcggtcccggaacagcgacgccaggagcccttcatcctccacctcgccgagagccgctgctgtggccgtggctaccgatgggatagtcgccgcggtcgccatcttcccagcaacaacgtcacttcccttccggaccacaaggggcgctgactccgaacttaggacaggaagaaacaggcacatttccggtctctatgctttctcatccggccggcttgctttcccctgcggtcgtccagactattgggcgctagcgagacgaactattggtacggggctagagaggaaggctttgggattgccggggagcagcgagcgaccgacttccgtttccagttaccaaggcacgaggatccggtgttccaacccagggggaaaaatgcggcctttga

SEQ ID NO: 16397 - DNA, 2300 bp, Homo sapien
cacaggaaacaaagctcggcctttccatacagccgtctgtccttggaatggcttcgttttaagtcaacgtctcttcatgccgcacatattccccaatgtctgcttgatgaaataccacaatcgccatggggtctacttttctgcagtcttgtgtagatttggctgccaccccaaaaccctgggattcaaaagaagagacactaactcactgaagtcattcaatatgcccatattgagggctggaaataacaaagacggaaaaaatacagttctggtctttctgggattcaaaacgtgctgagaatttattctctcaagcactcagattgaagacatacccttcttgaataagagtacttgagttctgtaacagctaccatctctactcaccaaagggatgtctgccatggagtacaccaccacgccctggtactgagaagtattttcagtgattcgacccagaccagatttcaacacatggttcccatacaggaaggactgctctgcaccaggctttatccaaactttatactataagagaattaaaatccaagagacataaaaacgttactatttctatccatgcagacaagctagctgctggatctgtgaataattttctgaaataattttaagggaaacagagagactcatgttttcctcaaactgtctatctcctgaacagaaatgcaggaagttgcccggtgcagtggctcacgcttgtaatcccagcactttgggaggccaaggcaggtggatcacttgaggccaggagttcgagaccagcctggccaacacagtgaaacactgtctctactaaaaacacacaaaaaaatcagccaggtgtggtggcacatgcctgtaatcccagctactgaggcacaagaatcactggaaactggaaagtggaggctgcagtgagatcgcaccactgcactctagcctgggcgacagagtgaaactgtgtcaggaagaaagagaaagagaaatgaaaagaaaaaacagagcaagaaagaaaaagaaaaaaatagaaaaagttattttctcaactctacaaggatcatcctccatggccaggttaacagctctttttctggaccccggtgtcttcattgctgccacttatttgctttctgatctctagctgggtctccctaggctcttctacttcgctggagaaaactaaccctacgcagccacatagcattcctatcccatagccctgaccatgctcaagctgcaagacctctacacatctccatgtgctgaaactcctccaagcacactgtcagggactctgtgggagagaagctgccggacaatctgcctaatccttgacttcatcgcccgtggcagaattggaaaccgccccacaaaccttggcataaggtgcaaggtaatccagagctgtgacgtgcaaccgaaacttgtgggttttagtgaattttccaaagcaggtccccagcgacaccagcttgtccccggaaatattggcggccagcttcataatcttctcactaaaagggtaaagggggagcaaggttgcggatgaaggaggctcgtgggacccaggacccctctcccctgggtccatgctgcctgcccggccccgcctcacctcacatagtacacccggtcgttgtgcagacggaaacagtaggtgccatcgggccggtccaccagcagttgaagattctccccaatgctgagggcaaaaagaggactggagaccgcgcccgaacgaaccggtctccggcaccgcgcccccactccacccttggccaccacacccacacactcccgcgtccgccccgcgcgctcctactatttcgctatcttctcaaacatgacacgggtctcctcttcagtcaaaggccgcatttttccccctgggttggaacaccggatcctcgtgccttggtaactggaaacggaagtcggtcgctcgctgctccccggcaatcccaaagccttcctctctagccccgtaccaatagttcgtctcgctagcgcccaatagtctggacgaccgcaggggaaagcaagccggccggatgagaaagcatagagaccggaaatgtgcctgtttcttcctgtcctaagttcggagtcagcgccccttgtggtccggaagggaagtgacgttgttgctgggaagatggcgaccgcggcgactatcccatcggtagccacggccacagcagcggctctcggcgaggtggaggatgaagggctcctggcgtcgctgttccgggaccgcttccccgaggcccagtggcgcgagcggcccgatgtgggcc

SEQ ID NO: 16398 - DNA, 2300 bp, Homo sapien
acaggcgtgagccaccacacccggcatcagtgtttcttaaacttgagaatgcctatgttcattaatattttttcacataattcagtgttgtttttattatagttattgaaatgtgtgcaaagataaaactatgcttacagcttctgtagaactataaaacttactatgaactgacgattgtttcgccgaaaccaagtcactgcttatggcatgaccagtgctaggactgcgacggtggtgggactcgggtgggggatgcctgtgccacgtgtgctgatagaagttcccagactcttctgtcacttgagcaagactgccatagagccactgtgctcccagagtgctgtgctgtcatttggcctttgctagaactgaaccccatgtatagagtctgttttctgcctacttagcttgtgacactttgagtcaatgcaaataattgctggaaggtgttaatgctgttttgttttttgttttttaagattatgactaaggctaggcacggtggctcacacctgtaatcctagcacttcaggaggccaaagcatggggatcacttgagcccaggagtttgagaccagcctaggcaacatggcaaaacctcatctctacaaacaatacaaaaatcagccaggtgtggtggtgcactcctgtgggtccagctacttgggaggctgaggtgggaggatcgtttgagcccaagggggtgaggctgcagtgagctatgtttgtgccactgcactccagcctggaagacagagtgataccatctcaaggaagcaaaaaaaaaaaaaaaaaaaaaagattaggactgaaaaatggttaggcagtgtcagaactcagagactgacagcttgagaatgagaaacactgtcctgcctggtggttaagagcatgagcccccaccggggacccagctctgccaggtgtgcttgtgggagcgtgagccaccactggaatctctgaatgtctgtgtcctcatctctaatgccagagctcacaatacctcccttgcagggctattgtgagaataaaataagatgcaggtaaatcttagctcagtgcctgccatgaaggaggtgggtgttgaaatcatgaataaaagaataaagattaaggatgtgaataatataattgtctttaagtgggttctggatagttttttcccccatgggtgctgaagaagtcctgaataaaagaaagatcaaggctgggcgtggtggctcatgcctgtaatcccagcattctgggaggccgaggcgggtggattacttgaggtcaggagttcgagaccagcctggccaacatagtaaaaccctgtctctactaaaaattcaaaaattagccgggcatggtggcaggcacctgtaattccagctactcaggaggctgaggcaggagaatcgcttgaaccggggaggtggaggttgcagcgagcagagatcgtgccactgcactccagcctgggtgacaaagctacgctccatctcagaaaaaaaaaaaaaaaaaaaaaaaaagattgaggctttggataatataattgtctttcagtgggtttggatagctttaggtgaccgttaggtgaaaggcatcaggacgaggactgtcagtggaggggtctaagcaccatcctctggcactgtattcatccatttacatctttgcacacacatgctgtgatttgctctgagctgcagcattggggagagagaagtgttgccccatgtgtttataggagcaatttgatgtaagagaacaatccccccagccaactttttgtcagtgtattcagaagttgtaaacttacccactattatatccccaagaagcaggaactaaaaaatgacagccctaatgaagggtggaaagacctcttctgaggtggtagattctatgtagcacccatgaagtaggtttggtaagccactgagtttttgaggtgaaagcaaaatttcctcctgcgagccaaacatgggagtatcatggcagttctatgatgaatatctatgtgtggccctgaaatgggccgtaatgtgacttgtggagttaatcattagcccagcggttgtctgaacgacttgatttccctgggctgcgagcagttcacctgcagaggaggctccagaaagcggcatgtcccctttgctctttggggctgggctggtcgttctgaatctagtgacgtctgccaggagccagaagacagaacctctaagtggctctggggaccagccactcttccgtggagctgatcgatatgactttgccatcatgatacctccaggaggcacggaatgctt

SEQ ID NO: 16399 - DNA, 2300 bp, Homo sapien
agacagcgtggccaacatggtgaaaccccgtctctactaaaaatacaaaaattagccaggcgtggtggcacacgcctgtaatcccagctactcgggaggctgaggcaggagaatcacttgaacccgggaggcggaggttgcagtgagccaagatcgtgccactgcactccagcctgggcaacagaacaagactctgtctcagaaaaaaaaaaaaaaagttagaattgaaaggcaagtgatttggcaccaggcatagtagctcaaccctgaaatccccagcactttaggagaccagggtgggaggagtgcttgaggccaggagttcgagaccagcctgggcaacacggcaagacccctaattctacgaaaaaaaatttcaaattacccaggcatggtggcacacgctggtagtcttagctacttgggaggttgaggcaggaggatcacttgagcccaggagttcaaggctgcagtgagcacgattgtgccactgcactccaacctgcattacagagtgaaactttctcaaaaaaactaaaataaaggcaagtgatttggttcctggttaaggcaagcaggctggaatggaaaagcagccatgggccgggcgcagtggctcacgcctgtaatcccagcactttgggagaccgaggcgggcggatcacgaggtcaggagatggagaccatcctggctaacacagtgaaaccccgtctctactaaaaatacaaaaaattagctgggcatggtagtgggcgcctgtagtcccagccactcgggaggctgaggcaggagaatggcatgaacccagaggcggagcttgcagtgagccgagatcgtgccactgcactccagcttgggcgacagaacgagattccatctcaagaaaaacaaagaaaaaaaagaaaagcagctatgatcaccaaagatcagtcagacctagaggcctcttctctcatcccggaacgtgtacctcatagaacttttggctttccaggatactatacatattaaggtcctgatattaattcacaggtccagcatgggattcacatcctcaaggacatggccacctgcacttctgagttgtctttgagtggccccaaactggatctttgcaggttccagactagtggggctggtaggacaatctttgaagctagaccagttactgggcctctcaggaagaggcacccacaaccaccatcctgaactaaggtctgagctggaggttctccatttggtcaagtgccagttggtgaattccaagagtatcagagatatctgaaagtgactcagaccctctatgggactatgggtggtccttttgcttatttttctaattgttctacaacaaaatgtgttatttttgtgattacaaagagtatatgtctagcggctgggttgccaggtgcattctatttattggtatcacactggtctttgctttataattacagtatttgttaaaatacaaatttgtttaaagactttcctctgtgtatgctctcttccacaattttcaaagtgtttaataaggtgcacatatttggttttcttttttttcttttcttttttttgagacggagtttcgctcttgttgcccagactggagtgcaatggcgcgatctcggctcaccgcaacctccgcctcgcgggttcaagcgagtctcctgcctcagcctcctgagtagctaggattacaggcatgcgccaccacgtctggctaattttgtatttttagtagagatggggtttctccatgttggtcaggctggtctcgaactcccgacctcaggtgatccacccgcctcagcctcccaaagtgctgggattacaggcgtagagccaccgatcccggcctgtttttcagtctctaatacactgttccgcgtccctagcatagtagctgttttctgtaaattcggagcgaagttgactgcaaaacccgccgggttcaccggcctgggcggtgtggacttcaagccccaggaggcattgcggccggcacatcgggaactacggcgtctgagaagggggccgggccctccggtcctttccctcccagaagcccgcgggcggctcggaacgctgtttctatcatggccgcgggagccgggacggcgggccccgcttccggcccgggcgtcgtgcgtgacccagcggcgtcacagccgaggaagcggcccggccgggagggcggggagggcgcgcggcgatcggacacgatggcgggaggaggcgggagtagcgacggcagcgggcgggcagctggcaggcgggcgtcccgcagtagcgggcg

SEQ ID NO: 16400 - DNA, 2300 bp, Homo sapien
catccaggctggagcacagtggtgcgatcatacatcactgcagcctcgacttcccaggctcaagccatccccagatctcagcctctcaaatatctgggattacagttgtgtgccaccatgcgtagataatttttgtattttttgaagagacaagagcctcactatgttgcccagcctggtcttgaactcctgggctcaagtgatctgtccacctcggcctcccaaagtgctggaattacggggcttgagccaccacattcagcctgtaaatgtttttatttctttcagagattttgtttcttatgttatctctctactcccaatgcctatcataagacttgtaacagtaaatagtaaatgtctggaataaatgtaaatatttgaatctagagtttgtggaggatcctaagaatcttgtgagattgctctcatagtgtcagtctaactagggaggtaaaatacgtaaagttaaaatttacagacgtagcaggcttcccaaaatagtaatatgctttcttaggtactacaaagggatggaagcactggagctcaaaacggtaggagaagtttgaaaatagaagaaactgaagaggaacttgaaaagccggtaggcattgaaaggaagaggagtccttgggacagcaattgagggtagaatgtggagtatcccatgtttctaccaccattcagaatccgattttcaaatgaattctgtgatgatcaggatcaatctgcactattttagtctctaagtgatctaaaattaacttggtggacctgggatgaccacggatgtggttttaaaccagcaggtttcagagtcggggcgggtgcaacaggcttataaagggaatggtggaaaatattatacgttagtgaaagaggttgcgaatggattgtggagagccctgaatggtagactgcgagagtgacaggatgaaaacgacgacatcataggaagagcaatctgtcagttgtaatggcagttaaaaagtggcgcacaacactgtaccttaaccaaacttggaattccaaagtgctgggacctctagcggagagcagttgagttcaattctattttagatcacgtagagactaaaatagtgccgattgatcctgatcatcacagaattcgtttgaaaatcggattctgaatgatggtagaaacataggatactccacattctacccccaattgctgtccgggacagcaattgcctttctaatcgactgccatgtttagcgattactatgcgccaagcgctttacaggcactctcattaaaataggcaaaccgggccaggcgcggtggctcacgcctgtaatcccagcactttgggaggcctacgcaggcggatcacctgaggtcaggagttcgagaccagcctggccaacatggtgaaacctactctctactaaaaatacaaaaattagccgggcgtggtggcgcatgcctgtagttccagctagtcgagaggctgaggtaggagaatcgcttgaacctgggaggcggagtttgcagtaagccgagatcgtgccactgcactctggcctaggagacagagcgagaacttgtctcaaaaaaaaaaaaaaaaaaaaaaaaggcaaacccctctgtaagagagtgctttatcaagcccattttactgatggggaaattgaggagagacgggattggccagatcacgacctggaggcagcaaagatgtaaaatcagggttgggatacaggctgcgccggtagtgtaggggataggaactttctgagactcaggagaaagccacagcgatgggaagggaagcagaacactggagaccctaaaggcccacaggctgagagaagtggtacctctcctgaagtgacacctgtcagcacgcctcttttgggcgccagtccaaaaatcgcggtatctgattggcgaggttggagggggctgaacgaccctaattggttagttggacctcgaaccagactttcatctggaggatcgggcgaggagtgggcgggatttcgaactgagccactcccttcattggtgaaaagaaaacgaaccaggaactattcggaagtgtgattggctgttgctaggaaccgtctcaaggccttatgggccctggttacggaagccgaggaaggctgagcgcgggctctcaaggaaagtagtcgcggaatctcagttagcggtggagaggcagtatgtccggttcaatggcgactgcggaagctagcggcagcgatgggaaagggcaggaagtcgagacctcagtcacctattaccggttggaggaggtggcaaagcg

SEQ ID NO: 16401 - DNA, 2300 bp, Homo sapien
tttttgtaggcaacaaaataacagtaaatggaccccaaagtgattttccagatacaaagtgacatcacatcggcagtagttcagaagaagccctgggtactgggggatttcatgggtggaagagacaaagtctaattatcttttcctctggctctcagcaaaaaacaagtgcagatgtaaacaggaaaagaaaaccaatgtgaagtagaaaaacataccttttgcattggcatttaccttaaaaataacaaaaacaccaattttacttaagatggtagttctttaacatttcttataagccagatgtttttcattcaatttcggacattgccaacacacttttacaactgattcaagttatcttcaggcttggctttagtttgaatgttccctttcaagctcctcaatactcctctgttctttacttttaccccaatgtactccaataatcacgcaatttatttattacaggcaatcatataccaatccttccttgcctttaaatagagaagcatcaagtcataccacttttgttaaataataaccaaagtttttttcaatattgtcttaaaagtagcatcttataatgcatacaaacatttttctaaagataaaagctttactaaacccatatccctgataataaaagtcagccagaaatctcctaaaattactcccaaatatatccaagtgtgcaagtacaaggttaatattattttgatgaattctgtattcattcaactgctaaatcacaggatacaagacctgggttgaactttttcttaaatagtttacatgggcagtccctggtttgctgggcagtttcctgtctcatcaaatccctggcaagctgggagggagggaggagatgctgagcagcctctatggtccttcttgaaccaagctgctccctgctggatatgacaatggctcagaagcagactagcaattctcaaaggacagggagaaaaatcaccacagttgctggcagaaaacagccagtgtactatttatttcctcaagtgcttccatgggggaaaaaataaaagtctaatatgccagagaaatcatcattgaaccaataagacacagtaacataattctagtaacctacttctcaatgaacacacatctgagaaaaaaaccgccagtattttattctcatggaaaaacagaacaaacccacaagttggagtcacggagataaaatacagatgaaatggaaaacggtctgttgtcatgaactctcactttcaaataccattttatatggaagttactttactgcggggcaaacagaaggccatgctggagtctcttacttttggaaaatggagaatcaaaaatttgctaatcaacaaacaaaaaaggagggaaactccttggtaaagctctacaaacataattatacatttatattttaccaataaaagatagctagggtagaaaaaacagatggttagaaactggtgccaaaccaaagtgaaagctttggtgccttctctaaactcctatcctgtttctttagaaaacaccagttttctaaagaaagattactctgaattcaccagggttctatcaccccaattcatccctacctttccacccccaagacacgaaagggccatgtagttttttgtccggcaccacttgggaaggggctgggctcaggggctgggaagagctacctgctgccctagcttgaaagggaggaggtggccacaccattctttgtatttttatcacgcacataaaagaacaaaaatcatttggcagttttaagtttaataggtgcaaacctttacttcaggaattaaaccccttatgataaataaaagaattaaatcagatttttttttaatacagataggggtctcgctatgttgcccaggctggtcttgaactcttggcctcaagcgatcttcccaccttggcctcccaaagtgccaggattacaggcctgagccaccacacctagccctaaatcagaattttttaaaaaaaatttacttaaaagaaaaatggaaaaataaaactttcaacactagactgccgccctgttaagaatgtctaatatgcaatcaaagtattggaaagcaggcatttttaccaaagagcaatgtcactataacttatgaacagaaagttgtgaaatataagggtactcatggaaaccagtgaagagaggaaacaccggcaattgttcaacacggaacagtgagcaggtactttgggagtaaggctctgagagatggaagacgctggtctcagatctgaggtgatgtctggccaatcgtctt

SEQ ID NO: 16402 - DNA, 2300 bp, Homo sapien
agtatggccaagaaaactagccaactaagcagtttttcaaagaaggtgtcttgggccaggctcaatggctcatgcctctaatctccgcattttgggaggtcgaggaaggaggatcacttgaagccaggagtccaagaccagcctaggcaatatagcaaaatcatgtctctgcaaaaaaggagttcaagactagcctgggtaatatagtaagaccatgtctctacaaaaaaataaaaaataaaaataaataataaaatgaattagccgagtgtggtggcatgtgcctgtagtcccagctacttgggaggctgaggtgaaggatcactttgagcccgggaggagtttcagtctgcagctgcactgagctatgaagctgccactacactccagcctgggcaacagaacaagaccctgtctcaaaaaaataaacaaacaaaaaaacccgaaagaatagaaaagaaaaaaaagaaaagaaaagaatataggccaggtgccgtggctcatgcctgtaatcccagcactttgggaggccaaggcgggtggatcacctgaggtcaggagttcgacaccagcctggccaacatggtgaaaccccatctctactaaaaatacaaaaaattagccgggcatggtggtgggcgcctgtaaccccagctactcaggaggctgaagcagaagaatcacttgaaccagggaggcagaggttgcagtgagccgagattgcactgctgcactccagcctggacaacaagagtgaaattccatcttaaaaaaacaaacaaaaaagagaatatatctctgtaagaagacaggtgcagggggtgggagtggacactgatttttcaaatacctatttagatataatccgtgcttaatgcaggacctaatgaggtaagtgaggcctgagcccacagaatccctctcagggaattcgcagtttaggtcaagccacactttggtgggcctctcttcactttgctcttacctaatcaggggaaatctgattaacatatacaacaaagcctcaacggggaataaaaaggtcacaaaagggcagagaaggattcacagaaaaaggaagaggccttgccagttcttgactagttaattagggtcagaaccgtactggggatttcctataccctaagtttgttaagtgattacatcggtctggggaaaagggatctgctcagagtgattcagtcaactttcttagtatcgggtggtgaatcgcatttcctctctgctaccctgtatactgactaatgggtggcgtatggggggtctccaagaggtgtgtttactccaattcagaagctataggatttcagtaggccttggcctgttgggcaatgtgaggtttcaatctttctctctcaaatgagtggggctcttatcagttatgaagggacttcccttgggacttgtcacgacaccatacagcagagatggcaatttgagggcagtttcttgttctgctttgccatcttggggtggctctgaaaagctttctgaacctccgacaaaagaaaaatgttcacaggattgattactacacacaattcagtgaagacaactgggcaacctgaatcaaatgttgagatgaaagataggtgagctctgatgacacacgtttaaattctaggtctacaggtaaaactttgtaaagggccttgcctcagcgacatctgtactgggccctcctttgctgagagcttcttaccccaaccctagcactccaagtcccgagaactgctcaatttcatgggaaaaagtctctataattatatatatatgtatatatgtgtgtatatatgtatgtatatatatgtgtgcatatatatacacatacacatattacaacagactgattttcatgagttgtaactatccttgtagataaaaaacgaaaccattcgaatagcttaaaaaccatgcccacgtggctactggcatcaatattccacacaagattaaaattacttcccaagatgcacaccctgcactccaggtaatatttcaataacttgattaaaaatttctcagaagtctattagaatcagaaaacgctctgcggtgtgggtgaggattttaaatttttgcaacggaaacttttggctccacgaacagaaaagcaagagcaaaaactcagttaaatgcgttcttcctccatctttgcctagtccaaaaggaaaaaaaaagaaacagaaaaaagaaaaactgtttggaagagtagcgttgaggtttgctttttacctgtttttcctctagaacagccaggtggattcacatgatccaat

SEQ ID NO: 16403 - DNA, 2300 bp, Homo sapien
taagtgaggcctgagcccacagaatccctctcagggaattcgcagtttaggtcaagccacactttggtgggcctctcttcactttgctcttacctaatcaggggaaatctgattaacatatacaacaaagcctcaacggggaataaaaaggtcacaaaagggcagagaaggattcacagaaaaaggaagaggccttgccagttcttgactagttaattagggtcagaaccgtactggggatttcctataccctaagtttgttaagtgattacatcggtctggggaaaagggatctgctcagagtgattcagtcaactttcttagtatcgggtggtgaatcgcatttcctctctgctaccctgtatactgactaatgggtggcgtatggggggtctccaagaggtgtgtttactccaattcagaagctataggatttcagtaggccttggcctgttgggcaatgtgaggtttcaatctttctctctcaaatgagtggggctcttatcagttatgaagggacttcccttgggacttgtcacgacaccatacagcagagatggcaatttgagggcagtttcttgttctgctttgccatcttggggtggctctgaaaagctttctgaacctccgacaaaagaaaaatgttcacaggattgattactacacacaattcagtgaagacaactgggcaacctgaatcaaatgttgagatgaaagataggtgagctctgatgacacacgtttaaattctaggtctacaggtaaaactttgtaaagggccttgcctcagcgacatctgtactgggccctcctttgctgagagcttcttaccccaaccctagcactccaagtcccgagaactgctcaatttcatgggaaaaagtctctataattatatatatatgtatatatgtgtgtatatatgtatgtatatatatgtgtgcatatatatacacatacacatattacaacagactgattttcatgagttgtaactatccttgtagataaaaaacgaaaccattcgaatagcttaaaaaccatgcccacgtggctactggcatcaatattccacacaagattaaaattacttcccaagatgcacaccctgcactccaggtaatatttcaataacttgattaaaaatttctcagaagtctattagaatcagaaaacgctctgcggtgtgggtgaggattttaaatttttgcaacggaaacttttggctccacgaacagaaaagcaagagcaaaaactcagttaaatgcgttcttcctccatctttgcctagtccaaaaggaaaaaaaaagaaacagaaaaaagaaaaactgtttggaagagtagcgttgaggtttgctttttacctgtttttcctctagaacagccaggtggattcacatgatccaattttttaattgtcttctatgtcccactccgaataacccggatgccccagcacaatcagagagatcgttttttttaaaaaaaatttcagcctccaaaggtaggaggggagtgttaggggagaaagtactttaattaaaaatcaataactcgaggtttttgggatacggtttgccatttcctaattaagaaatgggtttgacagtccctttgtacacactgctatgcaaaccccaaagggttggcggctgtccgggcgatgacactccggtcccctgcgagaccccgggccagccaggcccgtccgccgccggcctctggggtccgtccccggctcgcgcagacctctcgcttctctcggctctgtctcctgcgctcagctctgctcggggccggccgcctcaggctcgccgccaccaggtcgttgcaaataccttttccctccccggggccccagcgcgcggccacctcccagcctccccccctcccaccctggcagcggggccctttcccggctcaggaacagcagcagcccgggccgcgccggcaggaagcgaggcccatgttgctgctgttccctggcgcgcctccccgccctccgggggccgccacggctcttccgcgctcccgggcacccccctccgcgcctgcgctgtgccccacgggggcggggctcagattcctgtcagcggcggcggcggtggcggcgaccgtcagttttcgctgaggagaaacacgaaacggaccctttggctctcccccttccccttccccgtcctgaacccctctcctggtcaccgagaatcagtccccgtggagttccccctccacctcgccatcgtttcctcggtcctcggcccagtggaagtcactaccctcgaggaggaggcagcggc

SEQ ID NO: 16404 - DNA, 2300 bp, Homo sapien
atattgagttgaaaagccatacctcttctctacaagtgtcaggatcttcgaatgggaatttgatttctataataataatttaataaaagtgatttctagcaacaaaattttttatcccattgaatttattataacttaatttacttacgttagaaagtatttacagttatataatgaggattttcttgagttgactaaatttgaggaagaaatttgcctttgattgctttcctgggttaacatatttcagaatttttgccacctaatgtagtatactcttcatgaaattaaaccagaaacccactaacgagaaaggtaattcacctacagatgctgtgagctaaaatgttgtgagttgatcttggttattctttatggccattcccttttttccaagaaaactagaccatttctagaaggaagtcagatcctagttacaaacatgttgcaagcagatttaaaaatctctactcctccttctatcttattatactgaaattacatagtaaatttaaatacatacacttatacatatggatggtatgtatgtatggatttatgctgaagtctgcattattagagagcaaacttgggcctatagccattaattcagaaacaactgctaattgtttgacagttacaaattgacattgccaaaaagcaaacttggcctattattgctttgttcctttaatatttctctttttattgtcctcttaataacacttttataaatattgtgatttattcagtttctaataaataagcatatttttatattacttgagtcaacagaacagcattttgaaactgttcacagattctcattcataagctaaatacttatagaaaatagatacagttactgattttatgcattctgtacaattttgcctaagaaattaatgcatagaagtggacttttttatatcaccaacaagattgaaaatataagcaaaaagtgtttataactaattgttttataagaaaggaacttcacctgtttctggatattttttcctctggaattcagccataaaaaagaatgtaatcttgtcatttatggcaatgtggatggaactggaggacattaagtgaaataagccaggaacagaaagttaaacactgcatgttctcactcatatgtgaaagctaaaaaatgttggtctcatagaagtaaaaagtaagacagaggatagataatagaggctgggaagggtaggaggaaggaagggatagggagaaatttgttgaaggatacaaaatttcagctagatagaagaaataagttctagtgttctataccactgtaggatgactgtagttaacaatactatatagtttcaaatagctggaaggaagatactgaacattcctaacacaaagaaatgataaatatttagataatggatatgttaattaccttgatttgatttctgtacattatatgtatcagaacattatctaccccatgaatatgtatgattattatttgttaattaaaaaaataaaattaaaaaaatcatacatgggccaggcatagtggctcatgtttgtaatcccagcactttggggggccgaggcgggcagatcacttgaggtcaggagtttgagagcagcctagccatcatggtgaaaccccatctctactaaaaatacaaaaattagctgggtgtggcggcgggtgcctgtaatccccagctcttcaggaggctgaggcaggagaatcactcgaacctgggaggcagaggttacagtgagccgagatcatgccactgcactccagcctggcgatagtgagattccgactcacaaaaaaaaaaaaaaaaaaaaaatcatacatagtaaaatggtagcattttttgaatatgagtggaagctacatgagtgttttaaatatttcataattttaaaatcactgggtgcaaatgactatatgaataaaagtgtccaataaactgtactcttaaaaactaacaaatatatgggatatattagatacttgatggatttatatttggcataagtaaggttatattcacttttcatccatcattgcatatatgtatcaagtatgtgtgtactggcagtatttatttagcccactcaggtagaatttattcttcccatataattacagggtattatcatcaactaaattaaatcagaaaatgaatgagaaagcacctcaaagtaccaggtctatacagccattctctagatcaaacttacttacaaacacacacacaacatgtacatagttttatttatttgtttatttttctcacagatgagattaa

SEQ ID NO: 16405 - DNA, 2300 bp, Homo sapien
cacttcataaaagggaagatatatcttaatataccaggtttgtatctcatgctaccattgtagcatcaaaaaaatagacatttaaatcatggctaataacaaattttagaatgaaatagttggtaaattttgtgattttaaacttttctttttgtgtgtgtgtatatgcagcaatgaaaactactggatgtaatttagataaggtaaatattatccctaatgccctgatgactccactcataccaagcagtatgattaagagtgaagatgttactccaatggaagtaacagcagaaaaaagatcttccactatttttaaggtaagctgtattgactagtgcacaaacctcctatataaaaattgctgtcttttacttttcctatttttttaacattatttttactttggatgcacttaatgaattttgctgtaaagagggaatgctttatacttcagcaaaattgcccacatagtgacttccaatatacaagggaggaattaatatgttgtatgagatattgatgaaagtactaattttagcattttcagaattagagatgtttttatttttttcccagtcttttcccataactttctgtttcttttttttacttgtcttatcccctgtaatgttactgaggagccacaaaattgagatattttgatacctgctcttcatgaaccataaaattactgtgttctgattacccttaattcacctaagcatatcaatagccgattattctacttccttgtttgactatctttgcttgtcgtacttttaaaaaatatatctcaaggaaaatgagacatcatgttatggagaattgtagtcctgtacctgttttctaaatgataataatatagagtggaaagctggtcctgcatatatttttagagcaatagtgatttttgatgtatgttacaaacttgtttaatgtttatatattcataatatttggggatttttattttttagactacaaagtctgttggatcaactcagcaaacattagaaaacatctcaaacatagcaggaaatggctctttttcatcaccatcatcttcccacctaccttctgaaaatgaaaaacagcagcagattcagcccaaggcatacaacccagagaccctgacaactattcaaacccaggacatctcacagcctggtacttttccagcagtttctgcttctagtcagctgcccaacagcgatgcactattgcagcaggctacacagtttcagacaagagaaactcagtctagagagatattacagtcagatggtacagtggttaatttgtcacaactgactgaggcatcacaacaacagcagcagtcaccactacaagaacaagcacagactttacagcagcagatttcatcaaatatttttccatcaccaaatagtgtgagtcagcttcagaatactattcagcagctgcaagcagggagtttcacaggcagtactgctagtggcagcagtggaagtgttgacttggtccaacaagttttagaggcacagcagcagttatcttcagttttattttctgctccagatggtaatgagaatgttcaagagcagcttagtgcagatatttttcaacaagtcagtcaaattcagagtggtgtaagccctggaatgttttcctcaacagagccaacagtccataccagaccagataatttattacctggaagagctgaaagtgttcatccacagtctgaaaacacgttatctaatcaacagcagcagcagcagcagcaacagcaagtgatggaatcttcagccgcaatggtgatggagatgcaacagagtatctgccaggcagctgcccagattcagtcagagttattcccttcaactgcttcagcaaatggaaaccttcagcaatcgccagtttaccagcagacttctcacatgatgagtgcattgtctaccaatgaggatatgcaaatgcagtgtgaattgttttcttctcctcctgcagtttctggaaatgaaacttctacaactaccacacagcaggttgcaacccctggcactaccatgtttcagacatcaagttcaggagatggagaagaaactggaacacaagcaaaacagattcagaacagtgtctttcagaccatggtccaaatgcaacatagtggggacaatcaacctcaagttaaccttttttcatccacaaaaagtatgatgagtgttcagaatagtggtacccaacaacaaggtaatggtttattccagcaagggaatgagatgatgtcacttcaatctggaaattttttgcagcag

SEQ ID NO: 16406 - DNA, 2300 bp, Homo sapien
caggtctttccaaacactagtgacatgtggctatctaaatttaattaaagccaggcgcagtggcacatgcctgtaatcctagcactttgggaggccgaggtgggcagatcacctgaggtcaggagtttgagaccagcctggctaacatggtgaaactcatctctacgaataatacaaaaagtggctgactgtggtggtgcatgcccgtagtcctagctactcaggaagctgaggcacaagaattgcttaaacccaggagatggagattgcagtgagccaagatcctgccactgcactccagcctgggcgacacagtgaaaccccgcctcaaaaaataaatttttaaaaaattaatttaattacaattaaaacttcacttcctcagtccactggccacttttttttttttaatttccattttttttcttttattgagtccaccactgcggccttgaattcctgggctcaagcgatctttttgcctcagatcctgagtagctgggacacaggcgcctgccaccacgcctggctgctggccacatttccagtgctcaatagctacttgaagcttgtggctaccttacttgggcagcacagatagggaaagttctattggacagggctgcctacctagcccttttttaaaacgtccttttatactattttgtcagatggggtctcactttgttgctcaggcttttctcaaactcttgggctcaagtgatcctcctgcctcagcctcccaaagtaatttgtaaatacgtgtaaataatatagtcctctcttgttgcatcaaaatgaatgcaaaaatgtcacgatggggccgggcgcggtggctcatgcctgtaatcccagcacttcgggaggccgaggcggtaggatcacctgaggtcgggagttggaaaccagttttctggtgcctccttaacttttgcactggagggacaacggaagggccctgtgtcatcctcacctcccccatctgtgattcttctgatggttaattaccactttaaagctctagttctttttccttcacctactgagagtatatctccttctttacagtaacttttactttatagagttttttttgagacggagtctcacttcgtcacccaggcgggagtgcagtggcacgatctcgacccactgcaacctccgccttccgggttcaagcgattctcctgcctcagcctcccgagtagctgggacttacaggcgcccgccatcacgcccagctaatttttcagtacagacggggcttcaccaggttggccaggctggtctcgaactcctgacctcaggtgatccacccacctcggcctcccatattgctgggattacaggcgtgagccaccgcgcctggtcccgttttggctattctttaatatgcttccctataactgctatctccacaccagccttgccttagctcatgggaaacaaaaccaattagttcccccattacctgccttgaggagcaggggtggtgcagtggcatgcacccagggaagtgtgttgtatgggcccccaagtgcagaatctgaatcttgcaaaggaagaaacaaattcgtctccacggagcatgtctccccaggactctcagccttccaaatccgcagtcacagtgactcagcagaatctgagcctagggcaccacagtaatccgcatccggctctttttctgctccatttcgtgccaaggctaaaagggcatgcccacttgatccctggactctcttgggacgacttccaccctgcatcctcttgcacctcagggcacagtgcgcagatgggcttgccttagcacccccagccagatttttgaggcctctgtcacacacacccctacaatcccctcccccagccccgagagacttttcttgacttccaccagttgctccggcgggtgagagtggagaggcccctccttcatcccccaggctccctcccttcctggagctgcagcctcagcatcctccgcccagcaccccaggattcaggcgttgggtcccgcccttgtaggctgtccacctcaaacgggccggacaggatatataagagagaatgcaccgtgcactacacacgcgactcccacaaggttgcagccggagccgcccagctcaccgagagcctagttccggccagggtcgccccggcaaccacgagcccagccaatcagcgccccggactgcaccagagccatggtcggtgagtgctgcaaagggcggggtgcttggcggtcgtctctcgagcactggtgcctgtggaggaggttgtaggggcttggccctgaa

SEQ ID NO: 16407 - DNA, 2300 bp, Homo sapien
aagactcttaaaaactttaaagccatcattacacctacacaaaattaatagtaatgcctgttatcaaatatccagtcaacattcacattccccagttattttgtaaatgttaaagcgtttgtttgtttggatcaggatcccaatgaggttcatacattgcaattggcaagtgtgtctcagtcccttttttttttccctctttcatccagggtctagctgtgttgcccaggctggtcttagaactcctgggctcaagtgatcctcccacctcagcctcctgattagtctcttttgatctgtaggtttttgggaaaggtttaaatttggaaaatgcaaaagaataaaaatctatatatctgtatataataatttttttaaaaaaaagaactatttctggccaggtgccgtggcttatgcctataatcccagggctttgggaggccaaggcaggagcattacttgaacctaggcatttgagaccagcctgggcaaccccgtctgaggcaggaggatcacttgggcccaggagattgaggttgcagtgagttgtgatcataccactgcacttcagcctgagtgacagtgagaccctgtctgaaaaaaagagagctttctggaggtaaaaaagaatgaacactaagtacttgcaagtgttttttcgaaccttgcttccttcaaaactttgacttcctattgtgtttttagggtcttacccactgtggctaggttgaagagactgatacatttgtgcctgcacccattgtctatttctaagccagaggattttagaagtcaaaaattttaacctaataataattcattttcaatagtgttgacaaataattgcttaatcttctctgcctaaagtcatcaaaactatggtggactcatatttttgcactagttgaaactaccctcaaatttttttaagaaagatggggtctctctgtgttgcccaggctggtctcaaactcctgggctcaagccatcctcccaccttggcctcccagaatgctgagattacaggcatgaactaccacacttgttttttgtttgtttgtttgtttgtattttaataagacaggatcctgtcatcacctgggctggagtacagtggcgctgatcacagctcactgcagcatcaaactcctgagcacaagcagtcctcctacctcagcctcccgagtagctgggactgtaggtgtacaccaccatgcctggctaattttaaaatttttttatagagacagggtgtcacttttgtccaggctggtctcaaaatcctggcccaaaacaatcctcctacctcagccttcctaagggctgggagttagtgagccactgcacccagctatttttttatttttattctctgatttttttaaaacactggatgtcagccaggctcggtggctcctgtgtgtaatcccagcgctttgggaggctgagatgggcagatcacttgaggctgggagtttgagaccagcctggccaacatggcgaaaccccatctctactaaaaaatacaaaaatcagtggggcatggtggcgcacacctgtaatcccagctacttgggaggctgaagcatgagaatcgcttgaacctgggagtcggaggttaggttgcagtgagccaaggttgtgccactcccctccggcctgggtgacagagcaagaccctatctcaaaaaaaaaaaaaaaattgggtatccttttttttttttgagacagagtctcatttttgttccccaggctggagtgcagtggcgtgatctcagcccactgcaacctccgcctcccggtttcaaggaattctcctgcttcagcctcctgagtagctgggattacaggtgcctgccaccacgccaggctaatttttgtatttttagtagagacagggtttcgccacgttggccaggctggtctccaattcctgaccttgggtgatccgcccacctcggcctcctaaagtgctgggattacaggcatgagccatcgtgcccggccaaaaaaaaaaactggatatctttaattttgataacaagaggtatatgttttttgtttttttaaaggttaaggtgagctcatcgattcagcacccagaaacacctctgcacatttctggtttccatctgccctacaaggtaatttcttagacaagccaggccgttcatgctcttttctgaaacatgtcacatctctctaagtcatctcttcacagtgaactaaatttacgcggaccaataacatagtttgtccagccctgtctgatctgacttgtatatcatatgtgatttcat

SEQ ID NO: 16408 - DNA, 2300 bp, Homo sapien
gccataagcaccaggtcatgctaatgagacagaatttgatgaggcgccaagaagaacttcggaggatggaagagctgcacaaccaagaggtgcaaaaacgaaagcaactggagctcaggcaggaggaagagcgcaggcgccctgaagaagagatgcggcggcagcaagaagaaatgatgcagccacagcaggaaggattcaagggaaccttccctgatgtgagagagcaggagatttggatgggtcagatggctatgggaggtgctatgggcataaacagcagaggtgccttgacccctgctcctgtgccagctggtaccccagctcctccaggacctgccactatgatgccggatggaactttgggattgaccccaccaacaactgaacgctttggtcaggctgctacaatggaaggaattggggcaattggtgaaactcctcctgcattcaaccatgcagctcctggagctgaatttgctccaaacaaacgtcgccgatactaataagttgcagtgtctagtttctcaaaacccttaaaagaaggaccctttttggaccagccagaattctaccctggaaaagtgttagggattccttccaatagttagatctaccctgcctgtactactctagggagtatgctggaggcagaggacaagggaggggtggtattaaacaagtcaattctatgtagtatattatttaatcagttctgtgtggtgcattcctgaagtctcaaatgtgattgttgagggcctggggaaaccatggcaaagtagatccagttagagcccattaatcttgatcattctgtttttttggtttgtttgttgtttttttttttttttttttttgtccatcttgtttcatttgcttgccctgcccccgagatggagtcttactctgtcgcccaggctggagtgtagtggcacgatctcggctcactgcaatctctgcctctcgggttcaagcttgtccaggctgatcttgaactcctgacctcgtgatcccctgcctcagcctcccaaaatgctgggattacaggggtgagccaccgtgcccaacctcacttgctttcttatccttacactcccccagtcccagagaaactgccacatacaccacaaaaaccaaacatcccccaatgaccttagccgcattgctccattcactcccaggtgagaattcaggtaaacgtccacaaaggtcacaggcaacgtacatacggttctattatatcccatatattaccccttcatgtcctaaagaagacattttctcttagagattttcattttagtatatctttaaaaaaaaatcttgtgttaacttgcctccatctttttcttgggtgaggacacccaggaatgacccttttgtgtctatgatactgctgttcacagcttttcttgataggcctagtacaatcttgggaacagggttactgtatactgaaggtctgacagtagctcttagactcgcctatcttaggtagtcatgctgtgccttttttttccattggtgtattgtatttgatttgtctctgatatatttggagtttttctgagaactggagcagtaatgcagcatcgacctattaaaatacattttaagcctttaaaaaaaaacagtacctatctcataggggtgctgtgataacgaaattaggtaatctgtattgattgacttttaaccataagaatatatacaggttttaaatttatttatttattgaagagatgggggtctctctatgttgcccaggctggtttcacattccagggctcaggcaatcctttcgcctcagcctccttaatagctgggactctaggcgcgcaccactacacctggcaggttttatcttcaaaggtgaagaaggcactaaggtctagatgctgaagccgatttcccaggtgtcccccaaggtttgaccccgcccacacttctctggctatgcgggcggcgtcgctgcgcatgcgcgcgagtagagcagggaggtgctggcgcggccgccaggaggcgcagctaagtcgcggctgctcttcctggttcccagaggcccagacttggacataggagccggcgcaagctccgtgcgcatgcgcgctcccctctcacgcagccaacatggctccagtggagcacgttgtggcggatgctggggctttcctgcggcatgcggctctgcaggtacggggagctccctccgggacgagagagatctgggctggccgcccctcccggagtgcgtggagtcgcgcggagcgttgcttggtgcgggtgggtctgagctgggg

SEQ ID NO: 16409 - DNA, 2300 bp, Homo sapien
atgtacaaagacaggactgtatctccttgaaagttaatctcttggatttggagtggtactacaaaaagtagagactaagtgttcaacctatttatttatttagatacagagtctcactctgtcgcccaggctggagtgcagaggcgttatcatggctcactgccacctccgcctcccgggttcaagcaattctcctgcctcaggttctggagtacctgggattacccgcacccggaccatgcccggcgaatcttttttttttttttttttgtagttttagtagagatggggtttcaccaggttggccaagtgggtttcgaactcccgacctcaggtaatccacctgcctctgcctcccaaagtgctgggattacaggcgtgagcctccacgccccaccagccaatttaatttgtatgcatgatagaatccatcccaattcgaagacccaaaaataacagattagtacaagtctttgaggctaattacgtcattagtattaattttaatcaatggtgattaaactgagccttcattcaacttgtccagaacatcagtcaagaatgtctatttaaaatgttcttggaggccgggcgcattggctcacgcctataatctgagcactttgggaggccaaggcaggtggatcatctgaggttaggagtttgagaccagcctggccaacatggtgaaaccccatctctattaaaaatacaaaaattagccaggcatggtggtgggtgcctgtagtcccagctactcaggaggctgaggaaggagaattgcttgaacctgggaggcagaggttgcagtgagccaagattgagccactgcactcctgcctgggctacaagagtgaaactctgtctcaagcaagcaaataaataaataaataaataaataaataaagttattgggcaggcacagtggcattcgcctgtagtctcagctacttgggaggctgaagcaagaggactgcttgaagctgggagttcgagcccagccaaagcaacctatccagacccatctcttaaaaaaaatatttctctgccaggtgcggtggttcatgcctgtaatcccagcactttgggaggccaaggtgggcggatcatttgaagtcaggtgttcgagaccagactggtcaacatggaggaaccctgtctctactaaaaatgcaaaaattagccaggcgtggtggtgcacgcctgtaatcccagctactcgggaggctgaggcaggagaattgcatgaaccggcgagacggaggttgcagtcagctgagactgcaccactgcactccagcctgggcgacagagcgaggctccatctcaaaaaaaaaaaaaaaaatatcatctatctatccacctacctacctacctacctacctggattataattcattaagttctctgtgccctgtagttgtagattaagggaatgcgattggattagtgtggaggggctttttatggagccaagcaggagtttttaagcttttgtacttttgcttcatgtcacaaggacagatgccccacaaaggctgagatgtttgtggtcctggatcttagaacagtgcctggcacataataggcataaggttgccaggaaatagaaatacagatactcaattcaatttgatcttcagataatcaaaaaatactttttttagtataaatatgtcccattctgtatttgggacatacatattacactgttgtttatctgaaattcaaatttaagtgggtgtcctgtactttatctggcaaccctactaaaggagctcaattaagtatttgctgacttaacagtctgaaggtctcgtttcacctgtaaaatggggctagtacctgtccctgcctctataaggttgatgggcagagtaggtggcattcagtgagccctcaatttatttgattgcctgggaccatccggtgagcagaaacccttccactttcaactacagagacgataaaaaggcctcctcgaggccagaggtgcccaggccaggcctaggtggcccgcacctgcgagcctggccagcctcttccgggtcaggtgaccgcgcgcggtcacgtgacccggcccgagtgcgggcggtggaaggcggaagtaggagaggagttcggcgccgcttctgtggccacggcaggtagcgagcgctggcgcggggggcgcggtgggctggctgcctgcacggggcgggccgggggcggcgggcggcgcggggtgggccgggggcggcgcggcccgggcgtcggggggcggcggcttcctgtgggaggggcctggcgcggcggttccg

SEQ ID NO: 16410 - DNA, 2300 bp, Homo sapien
acagtatttgttaccaatgataaaatatgagttttttttttttttaaagaaaagaaagagtggtcgagtgcagtggttcacacctgtaatcccagcactttgggaggttgaggcaggcggatcacttgaggttaggagttcgagaccagcttggccaacatggcgaaaccccatctctactaaaaatacaaaaattagccaggtggtgctggtgcctctaattccagctacccatgaggctgaggcacgagaatcacttcaacttgggaggtggaggctgcagtgagccgagattgtgctactgtaccactccagcttaggtgtgtgagactgtctcaaaaaaaaaaaaaagacaaaagacaaggtagtagagatgatggaaggagggaggaaggggagcggatatgagtttttaagtgaaaggttttaagggaaagttagacttttggaatgcttttatctactaccaagagctcaatggcttcccaatgcttaaagacttgtctgatgagatcagtggtgacattcacaaatgtgatttttggatattgcataatgaaatgtgtcaacatttggaaaatctgcagaactcaatgaaccaatatttttcaaatgtcaaatgatgatattccaaaatcacatacaagtaaaagatccattcaaagtacaagatagacttgcttctagccaagacggaatgacagggacacctcatggcgaatgatgctgcacatcttttttttttttttttcgagacagagtcttgctctgtcacccaggctggagtgccatggcacagtctcggcccactgcaacctccacttcccgagttcaagcgattctcctgcctcagcctcccgagtagctgggattacaggcacccactaccacgcccgacaaatttgttgttttttagtatagatggggtttcatcattatggccaggctggtcttgaactcctgacctcagatgatctacctgtcttggcctcccaaagtgctgggattacagaccatgagccactgcacccagcctacccatttaaataattgtattagttgtcttctttttctctttcctttttttttttcttgcattatacttttagcaaggattactgtcagattctactcatttggccagagaccctccttgaggtgtttgcagcaaacttgctctacagctagcacactagattagctgtctttctgctgtgaatctgtgatgttctttttggagatgtcttttttttttttttcttctttttttgagacagaatcttgctctgttgcccaggctggagtgcagtggcacgatctcggctcactgcaccctccacctcccgggttcaagcaattctctgcctcaccctcctgagtagctgggattacaggcacccaccactatgcttggctaatttttttgtatttttagtagagatgggatttcatcatcttggccagactggtgttgaactcccaaccctgtaatccacccgcctcccaaagtgctggggattacaggcatgagccactgcgcccagccaatcttttttttttttttttttttttttttgagatggagtttcgctcttgtcacccaggctgcagtgcaatggccgatcttggctcactgcaacctccgcctcctgggctcaagtgattctcctgcctcagcctccagagttgctgggattacaggcatgcagcaccatgcctggataattttgtattttttagtagagacggggttttgccatgttggtcaggctggtctcaaactcctgacctcaggtgatctggccatctcggcctcccaaagtgctggaattacagacgtgagcgaccatgcctggcagaggtgtcttagtagactctgcctcctctagactttgctataacagtcctgtgtcctttctagtctatcctaagacctgtccaggttcattaagtcattataagacaaactataccctggttgcagttgcttggacgtttctattttcttgcctgtttctttaagcttaaatattgaaattgagttaaactcctctgtcttcttatcagatattctctgaattcttttttctgtttgtcttacagcttcacggtgatgatatggcatctgccagctctagccgggcaggagtggccctgccttttgagaagtctcagctcactttgaaaggtgagtggcactgtataatgtcttcatcttgtctacgcccagggaagagggagaatctaaccacaccttggtctggggagccaaattttgtgaaatagtttacatgtgttaa

SEQ ID NO: 16411 - DNA, 2300 bp, Homo sapien
cagaaatgaaaaattcagtagaatggttgaaaggtaaatttgggctgagcatggtggctcacgcatgtaatcccagcactttgggagggcgaggcaggtggatcacctgagatcagaagttcgagaccagcctggccaacatggtgaaacccccgtctctactaaaaatataaaaaattagccaggcgtggtggtgcttgcctataatcccagctactcgcgaggctgaggaaggagaatcgcttgaacctgggaggcagaggttgcagtgaactgagatcacaccattgcactccagcctgggcgacagagcgagactctgtctcaaaaaaaaaaaaaaaaaaaaaaaaaaaaagaaagtgataaatttggagataagaagatgagaagatgtgaccaagacattcaatatctgaagaatagttctttagcaagaacttgcggaatagcaggaaagaacagagaaacaggcaataggaaatcattagaaaagaaaattgccagaactcaagtatccagattcaaacagctcaccacacgcctagcccagaggataaaaaaagactcaccccaaggctcatctgattgaatttctgagtgccaagagacagcctcagaaacttccagagggaaaaaacagagtacctagaaaggatcaggaaccaagagtgccatccttcttctcagctgtagagcaggaccttcacaattccgatggaaaatgatttcctgccgggcacagtggctcaaacgtctaatcccagcactttggggggccaaggcaggaggatcgtttgagtccaggagttcaagaccagcctgggcaacacagtgagacactatctcttagaaaaacaaaaaattggccccgcatggtggtgcgtgcctgtagtcctagctacttgggaggctgaggtgggaggatcacttgagctgggaggtcgaggctgcagtgagccatgatcatgccactgcactccagcctgggcaacagagcaagaccctgtctcaaagaaacaaaaaagaaaatgatttcctgtctagaaatcaactttgagttattttaacatttgaatatgagagtagaagtcaaggcatcttcagacattctgggcttcaaaaaattaaccttgatacatcctgtcttggaagctactccatgatttatcgcaccaaatcccaccaggaagccaagaaagaagaatgaatgggatgcaagacacagggaacttaaccccgaggccatggaatctcccaggaggaggagaagggaaggcaagtcaggtcaaggacacagagcgggtgtgagatggacacacaactgtccccgtcagatgagggagagatgtggccgagagaggaaggccactgccaggccacctgtcccgtctgagaatctggggatgcatcagtgataggttcttgaaaaccacacagaagacgacaaggaagttctcacctccagaaaaaagaaaaaagttgttacaagtaaggaaatgtacttatagtattctacattgtcatccaaaccctgaatattgatttaacggtgagtttccatattgagaggacgaggggaggagatagttgagggatggaatgcaatacctatatcctcatccctcatctttggtagtggaaagtccataagcgatagcaaatatggcaaaaatcaagaaataatgagccaggcttggtggtgcacacctgagactactcagctactcaggaggctgaggctggaggatagtttgagcccagcagttcaaatccagtttgggcaacatagtgagatcctgtctctgtattaaagaaaagacaaaaagcaatgaaatagacatgttatttagagacacagatgtacacatatactagtagaagcaattgagagttgaaagtggttgccttcggggaacaggagtcagcaatggggcaagagaccatcgtttttcattatattccctgcagtcctgtttatgtttcaaaactatatacatatgacttcgggccgggtgcaggggctcacacctgtaatcctagcactttgggaggctgaggcgagaggattgcttgagcccaggagtttgagactagcctgagccacacggggaggcttccatgtctacaaaaatttttttaaaaaattagttgaatgtgatggtgcattcctgtggtcctagctattcaggaggctaaggtgggaggatcacttgagcctgggaggtgaggctgcagtgagccatgatcctgctactctactctagcctggactaacagagtgagaccctgtcaaaaaaaaa

SEQ ID NO: 16412 - DNA, 2300 bp, Homo sapien
ttttttttttgagacggagtctcgctctgttgcccaggttagagtgcagtggcgcaatctcggctcactgcaacctctgcctcctgggtttaagcgattatcctgcctcagcctactgagtagctgggattataggtgcctgccactatgcctggctaatttttgtattttcagtagagacagggtttccccatgttggccaggctggtctcgaactcctgacctcaagtgatccatccgcctcagactcccaaagtgctgggatcaccagcctgagccacggcacccggccgccatgactccacaattacttttgcaccaacctaataaatgttgtttgtgtttatcagtctctggtgtctctccctttcctgtctgcctcctcttctcctcgcttcttataggtgtgtgtgttgggggggtggggggggtgcgttctgatagaataacaaacagaggataccaaggaaattttttaaaaaccctttaacgaaagagagccaacattgcatgaaggctgagattttttttaaaaggcaaggattcagaaaagggctgatcagtattttctgatcctagttcagtgctagtcagggagactgtcagtaaagacctttttggtctgttgatttgtagaattaagcaaaagatgaccatgcccctgtggaagctgggttggtaccagctggtagctgatttcccaggagaaccctgaacgctttacagatgatctactgactccaaaacaagacctgaagcagcaaacacttttacaccaaatgcgtcttcttttaatgtcttaaaataaccttttctatagtccttcccttttgcaaggtcactgctgtagctcagcacttacccagtgcctctggctccatgatgtagaatacgtgtgttttctcatttgttcctttgcctctgttgccgaatgtttttaatgtgttaactacaaaacagagttggaggaacttggattttatgagatgctgtaccctatctcccccaaccccccaacacacagacacacgcccccatgacttggaattcgggagatttttttcagtaatgattcaacgtgatttgtgatggagaattttaggcacagcttgagatcaatgataaggggccctaaatcaaggtgagcttcccccacctccgtgcacttgcattctgtgtgggcaggaggccctgccctgaaagggggctccgtcctgtcaagagcctatggtttcaagacttaaacatctttgttggaacttgcttggaagaggggcctgtgttgccaccttggaaagaaagtttctctgtcctttcagctgggggtggagggagggctgtggaagggggcttgctggcagttgagttccaccaatgttttctcaagccgacactgagccccattcatcctcctgcccatgtgtggctccggcacccctagacggggccagcccagcagcctgaagtccgcatttagaacttgatcccctcttataacgattaaattttagtaagtaaaataaaaatgcttcagaaagaaaaaaaagaaaggaagaaagagtggaacaatacttgttttatttaacgaccagaactttttgacaacaccccccttccccgcaggatatgagaatgcctggtccactgcagtccatccccagggacctcgaagcagaatttggctggagggggtgtgggggggattctaatgtaaacagtgaccctgaagccctggagccagttcccccttctttcccctgtctccccttctgtcttgctgccccacccccagccccaacaccccccaccccccccacccccaccccgagacaaacacagaacactgagcaacttcaggttcaggcaggggaggaataaaggtgctttgtaaaggggaaggaaaacattcctgggggaggtgagggcttggggcatgaatgtgccctcagtctgggtggacgctgcacacccagatgggaggttgggggggacgccgaggtggagggaggagggccgggccccagccaggaagctctgggcgtgggcagggcttgtgggaatgatttcattggaaaggcctgcgatattttttcccctcctgcgtgtggttcttggagaaagttggaggtggtggtgatttcagtcgccttggccgccttgagccggagctgagcggaggcactgggccgagcctgcttcccgggccttcctaccatgccagggctgctccctgcctccgccaccctggcacaccttcacccgcgtaccgcctcctccccgtcgctctgccttttccaaaa

SEQ ID NO: 16413 - DNA, 2300 bp, Homo sapien
agcctcacctggggaaagctgccttgcaacaatgaggctgcccattctccaaacccaccccagccaccgagcaggctccactaaaaagtctgaacccaggagggagtaccatggaaaccaagttgcaatgccctggttaggggcccagcagaggggtcatcccagctctacgccattggatactgagtttcaggagtgggagtgccatcctcagggtcacacagcgtgtcggttccagcctaggtcttccagtgtctcattaatcttttatccactcagcttctcttctggcccatgaaccttgctctcctgggactctttttttttttttttgaggggtcgggggtgggacagagtcttgctctgttgcccaggatggagtgcagtggtgccatcttgcttcactgcaacctccgcctcccagattcaagcaattctcctgcctcagcctaccgagtagctgggactacaggcacccaccaccctgcccagctaatttttgtatttttagtagagacaggatttcaccatgttggccaggctggtctcgagctcctgacctcaagtgatccgcctgccttggcctcccaaagttctgggattacaggcatgagccatcacacccggcctgggactcttcttgcagtgagccagggccatgggacccttcaaaagttgctccaccctaatccccaaaatatctttttctcccgcctgtcccaagtgcctggcatcatactatatgggtcaactggccgtgtttgccatggaagcccaattgtaggaagtgggtcttttatcacccggcatagcagagctgtggaaactgcactgggaaagatcaggatgtgaattaaagcgttgggaatgggaaggcagagaccttggattagctgggatgctccatgcactcgctgagtgaccttggacaagccccttagacacactaagcccgtttcctcatctacacgacgggcatcccatctgctactgcaccaggttcttgtggcaataacttgaactcacacatgcaaacaggctttgtgagctccataaacacaggtggcttggccaggtgtggtggctcatgcctgcaaccccagcactttgggaggccaaggtgggaagatcccttgagcccaggagttggagaccagcctgggcaagacgatgaaatcctgtctctaccaaaaaaaatgataataattagccaggcatggtggcacacacctggtcccagctccttgggaggctgaggtgggaggatcacttgggcccaagaggtcaaggctgcagtgagctgagattataacactccaacctgagtggcagagtgaaactgtctaaaaaataaaaataaaaatacatcaaaaaacaggtagctattaagcattgctaggacccacacgcagtgaccctgagggtgctgggtttctgtttgagggagaagaaactcctgagcccctaggtattgtgggggacatgcagttccagaccgccttcatggcctgtatgcctggcctcatccccatccctggcatccatgacgatagccacattccactggtgtttccccaggaaagccaaccctacctgcatctcagcagagcttccacagagttggaaccccgctccgagagggtgtgggctcaggggccaggggtcacacaaactccagaaggaggacgtagttggtttgcaaggctgtcctttgccctggttgaataacctttggtcttccccgagaggaacgtgggcattaggttgcagcccgcaggaagccatgtattttctgagaaacttggcccatggtgcagatctgctccagctcactctggtgggatcacgccagccacggccgggccacggcacatcatggcaacgtgctgcccacctgctacgccgcctgtttttctagaggcggacgtgatcccagcaggactggagtcagcccagggcatcacgtgctctggtccccgcctgctttgactcctcctgcctcactccccccctggcctgtagtcacgtgggtgagggtggtgggcaccggggctgggcccagcccccgaccctgcccagacagactttcctaaggcacccttttcctcgtgcaggtgcggcctcagcccacccccctttgagcccacagattgcacccctctggtgtgcggttacctcttgcctatgtttaattcatggctggggggttgggacgagcttcccaagaaaggaaagaactcccctggggtcttgcccagttcctgctcaccagaaggaccatagccgaggtcctcctccca

SEQ ID NO: 16414 - DNA, 2300 bp, Homo sapien
gagtttcaggagtgggagtgccatcctcagggtcacacagcgtgtcggttccagcctaggtcttccagtgtctcattaatcttttatccactcagcttctcttctggcccatgaaccttgctctcctgggactctttttttttttttttgaggggtcgggggtgggacagagtcttgctctgttgcccaggatggagtgcagtggtgccatcttgcttcactgcaacctccgcctcccagattcaagcaattctcctgcctcagcctaccgagtagctgggactacaggcacccaccaccctgcccagctaatttttgtatttttagtagagacaggatttcaccatgttggccaggctggtctcgagctcctgacctcaagtgatccgcctgccttggcctcccaaagttctgggattacaggcatgagccatcacacccggcctgggactcttcttgcagtgagccagggccatgggacccttcaaaagttgctccaccctaatccccaaaatatctttttctcccgcctgtcccaagtgcctggcatcatactatatgggtcaactggccgtgtttgccatggaagcccaattgtaggaagtgggtcttttatcacccggcatagcagagctgtggaaactgcactgggaaagatcaggatgtgaattaaagcgttgggaatgggaaggcagagaccttggattagctgggatgctccatgcactcgctgagtgaccttggacaagccccttagacacactaagcccgtttcctcatctacacgacgggcatcccatctgctactgcaccaggttcttgtggcaataacttgaactcacacatgcaaacaggctttgtgagctccataaacacaggtggcttggccaggtgtggtggctcatgcctgcaaccccagcactttgggaggccaaggtgggaagatcccttgagcccaggagttggagaccagcctgggcaagacgatgaaatcctgtctctaccaaaaaaaatgataataattagccaggcatggtggcacacacctggtcccagctccttgggaggctgaggtgggaggatcacttgggcccaagaggtcaaggctgcagtgagctgagattataacactccaacctgagtggcagagtgaaactgtctaaaaaataaaaataaaaatacatcaaaaaacaggtagctattaagcattgctaggacccacacgcagtgaccctgagggtgctgggtttctgtttgagggagaagaaactcctgagcccctaggtattgtgggggacatgcagttccagaccgccttcatggcctgtatgcctggcctcatccccatccctggcatccatgacgatagccacattccactggtgtttccccaggaaagccaaccctacctgcatctcagcagagcttccacagagttggaaccccgctccgagagggtgtgggctcaggggccaggggtcacacaaactccagaaggaggacgtagttggtttgcaaggctgtcctttgccctggttgaataacctttggtcttccccgagaggaacgtgggcattaggttgcagcccgcaggaagccatgtattttctgagaaacttggcccatggtgcagatctgctccagctcactctggtgggatcacgccagccacggccgggccacggcacatcatggcaacgtgctgcccacctgctacgccgcctgtttttctagaggcggacgtgatcccagcaggactggagtcagcccagggcatcacgtgctctggtccccgcctgctttgactcctcctgcctcactccccccctggcctgtagtcacgtgggtgagggtggtgggcaccggggctgggcccagcccccgaccctgcccagacagactttcctaaggcacccttttcctcgtgcaggtgcggcctcagcccacccccctttgagcccacagattgcacccctctggtgtgcggttacctcttgcctatgtttaattcatggctggggggttgggacgagcttcccaagaaaggaaagaactcccctggggtcttgcccagttcctgctcaccagaaggaccatagccgaggtcctcctcccagggcccggggctggggagcggaagccatcagtgggctcggaggacactgtcccagccaggacacggccatcggtcactaatctgcagcactggaatgtccgcgggccaatcagcggggtctctgggggctccccaagggtgctaataatcccacaatgattagcaggggccgcgggtcagtgca

SEQ ID NO: 16415 - DNA, 2300 bp, Homo sapien
ggtcaactggccgtgtttgccatggaagcccaattgtaggaagtgggtcttttatcacccggcatagcagagctgtggaaactgcactgggaaagatcaggatgtgaattaaagcgttgggaatgggaaggcagagaccttggattagctgggatgctccatgcactcgctgagtgaccttggacaagccccttagacacactaagcccgtttcctcatctacacgacgggcatcccatctgctactgcaccaggttcttgtggcaataacttgaactcacacatgcaaacaggctttgtgagctccataaacacaggtggcttggccaggtgtggtggctcatgcctgcaaccccagcactttgggaggccaaggtgggaagatcccttgagcccaggagttggagaccagcctgggcaagacgatgaaatcctgtctctaccaaaaaaaatgataataattagccaggcatggtggcacacacctggtcccagctccttgggaggctgaggtgggaggatcacttgggcccaagaggtcaaggctgcagtgagctgagattataacactccaacctgagtggcagagtgaaactgtctaaaaaataaaaataaaaatacatcaaaaaacaggtagctattaagcattgctaggacccacacgcagtgaccctgagggtgctgggtttctgtttgagggagaagaaactcctgagcccctaggtattgtgggggacatgcagttccagaccgccttcatggcctgtatgcctggcctcatccccatccctggcatccatgacgatagccacattccactggtgtttccccaggaaagccaaccctacctgcatctcagcagagcttccacagagttggaaccccgctccgagagggtgtgggctcaggggccaggggtcacacaaactccagaaggaggacgtagttggtttgcaaggctgtcctttgccctggttgaataacctttggtcttccccgagaggaacgtgggcattaggttgcagcccgcaggaagccatgtattttctgagaaacttggcccatggtgcagatctgctccagctcactctggtgggatcacgccagccacggccgggccacggcacatcatggcaacgtgctgcccacctgctacgccgcctgtttttctagaggcggacgtgatcccagcaggactggagtcagcccagggcatcacgtgctctggtccccgcctgctttgactcctcctgcctcactccccccctggcctgtagtcacgtgggtgagggtggtgggcaccggggctgggcccagcccccgaccctgcccagacagactttcctaaggcacccttttcctcgtgcaggtgcggcctcagcccacccccctttgagcccacagattgcacccctctggtgtgcggttacctcttgcctatgtttaattcatggctggggggttgggacgagcttcccaagaaaggaaagaactcccctggggtcttgcccagttcctgctcaccagaaggaccatagccgaggtcctcctcccagggcccggggctggggagcggaagccatcagtgggctcggaggacactgtcccagccaggacacggccatcggtcactaatctgcagcactggaatgtccgcgggccaatcagcggggtctctgggggctccccaagggtgctaataatcccacaatgattagcaggggccgcgggtcagtgcacgccactctgcctgctgtcgggggcgggctggccaggccgaggccggagcaggcaggcatcccccggagttgtctcttttcatgccagcgccaacaggaggctgtctggacacactgattactcactcaccagcctccctcttttgtccaccagcccagcctgactcctggagattgtgaatagctccatccagcctgagaaacaagccgggtggctgagccaggctgtgcacggagcgcctgacgggcccaacagacccatgctgcatccagagacctcccctggccgggggcatctcctggctgtgctcctggccctccttggcaccgcctgggcagaggtgtggccaccccagctgcaggagcaggctccgatggccggaggtaagggacacctggtgaggaggtaggtggaggcaccattacgagctctgaggagtgggtgctaggagacttctggaagcccggtcccaggcctgagccccaggccgtgcgggtggtttaatgaggaagccctgggacagcccgggggcggtgaggggtggatgctggactggggag

SEQ ID NO: 16416 - DNA, 2300 bp, Homo sapien
ctgtcccagaagccctggcccttagcacccagggaggctcctgcccggcctgctgggaggagacccttttctcagagtcccctcctcctctgaccagaggtccccaggaatccttgtcgcatgagctgccagaaccatggacgtctcaacatcagcacctgccactgccactgtccccctggctacacgggcagatactgccaaggtgagggcactggagcctgggtgtgcccagccctgctctcgtggcaggtcctagggctgctacacttcctgagagtctcaagggtgtcagaggtgctgactgtgtactccctgagtctgcccactgcatacattctttcaacaagcattcactgagcactagctgtttgccagaccctgagctgtgcaggagattcaaagtgaaatcaggttcagccccttaggctctgggaggaggacagaattaggacccagaagtggattcttgccctactgcccctctaccctaacccactctgtgaccatgggcaggtcacctcccaaactccaatatgcctcactctgcaatggggaccaaaccaaagacaccaggcgtgccagcaatcggaagccttggtgggttctgtctatgggaggggtattcttgctgtggttggcattccctggatgttcgaggcctctggggggcagcgtggggtccagaaggctgggggctgagcctctgccccactgccctgccctggcagtgaggtgcagcctgcagtgtgtgcacggccggttccgggaggaggagtgctcgtgcgtctgtgacatcggctacgggggagcccagtgtgccagtgagtcctgccccagggcccccaaagagccagctcctctcaagaccccccttcaatggggcatcagctcccaggagcccgctgtgtgcctctctttccaactcattcagtgacaacacgttgagatcttgaaactggccacagcatggatatttacaccaaagaaattggcaaatgctataaaccatggatttttttttttcttttgagagagagcaagctcaatattccaacttaccagctcgctcctgaccctcaccacccactcttttggagcaggtggccagaggaaggggcaccctgagcttagctccccggcagggcaggaaagggcagggattctgaagtccacacacaaactcaggctcccctaccccagccaaggtgcattttcccttccacacctgtgacctgaggatcgacggagactgcttcatggtgtcttcagaggcagacacctattacagagccaggatgaaatgtcaggtgacagtcacccctagcttcctaggaaccccctagggcctcaagtgagggtcttaatgcagggaccctggagtgagaggtggttccttccacgtctctgacctcaccctattcatcagcataaagcaggggtcgtggactccaaggctcatagaagccaggaggtcacttattgacctgaggggccaaggtcaagaccaacctccatctaagggagttccagccactggttgccttgcaggaatgcaaggtcagggtggccagagctcggggttgttcaagaaaaccagcaacccagacttccactggcaactctcgaaaccacaattaattactggggttggcaatcaacttggatatatttaagacactgtgcaggtgaaacagaacctcctcaggggccagaccttgcctgggcttgtgggctgctggtcgcgcccccgtgcacagggagaagagaagcagacgggagcagaagggacccctgctcttggaagggaggctgtgcgggctgggggtgatgatagcccggccagcacacacacgtggcatcttaggccatgggcaggggtggcaggaaggggcagcctgggctctgggagccttgcctgtgtgacccagggtggggttacagaggaaaggcggggtgctggcccagatcaagagccagaaagtgcaggacatcctcgccttctatctgggccgcctggagaccaccaacgaggtgattgacagtgacttcgagaccaggaacttctggatcggtgagtgcccagctgattgggggtatggcgagtaaggggttgtgatgccccaccctgctgcaggaaccctgggccatggcggctgccagcagatggcaagggtgtgttgagggcctggagcccagagcggggccagctgctcaccccctttcccgggaagggcccaggtagggagcacatgggggctgccagcgctgggaagaggggccagaaaggcagctggcag

SEQ ID NO: 16417 - DNA, 2300 bp, Homo sapien
tttttctattgattggaatagtttcagaaggaatggtaccagctcctccttttacctctggtagaattcggctgtgaatccatctggtcccggattttttttggttggtaagctcttaattattgccacaatttcagagcctgttattggtctattcagagattcaacttctttctggtttagtcttgggagggtgtatgtgtcgaggaatttatccatttcttctagattttctagtttatttgcatagaggtgtttatagtattctgtgacggtagtttgtatttctgtgggatcggtggtgatatcccctttatcattcagtgaaactttttacaaataaaaactttactcaaaaccctgttatacaaaacagagctgatctgctagggagttagaagccccaactgcttacctaacccttccttctcagagtcctcccagggaccttaaggctcaggagaacacagctggaaaatccctggactagatcccttaggtcccttctagaatgtaacaatttctgaatcttatgttgataaatggagtggaatttcttaaaaacaattttgaggaggcaatgcagttttaaatatgtacgtattgtatgccatgctgtaagatattgctagatacagtgagcaataggaaaaggtaaacacagctcttcctttaagcagcacacttagaagagtaagaggggaacaaaagagctataacttatatatgatattatatgtattatatgtaatatatataatttattgttataacacaactcatactacatagagattgaagtcaacaagaattttctccctaaaaataactacagagattaagaatagagaaaggaaaatgaatgtgtatgttttaattctgcaaaaagttcgggcacagtggctcagcctgtaatcccagcagaaggataacttgagctcaggagtttgagaccagcctatgcggcataatgagacccttgtatctacaaaaaaattgtgaaaattagcaaggcatggtggcgagcacttgtattcccaggtactcaggaggctgaggtgggaggatcacttgatccctggaggtcaaggctgcagtgagccacgatcaaaccactgtaccccagtctgtgtaacagagcgactgtctcaaaaataatatttgtcaaaatagcatgtctttgtatcactgccacattgcttgtctgaagcgaagctgactcactttgttatcataagtgatcttaccaaagaccaagttgtccagttgccttggagtgtaggtcatgcgttgccggtaccctggggctgtgtacaatggccaggctgaggggaccttgtggttacccccatgggacttgtaacttgtcaagtgggaaggtggtaccaagtgaagaagggtagggtccttggttttggcctcacgtggttcttcccagaatgaatggtgaaaaaattataattctgcagaaaaatttaaattctattttgtttactttttggatgggagataggtgtacacatggcactaaaattcaaaaggaacttaaggaggccaggcacggtggctcacacctgcaatcccagcactttgggaagctaaggtggccagatcacttgaggtcaagagttcgagactagcatggccaacatggtgaaaccccccgtctctactaaaaatataaaaattagctgggcatggtggtgtgtgcctgtaatcccagctacttgggaggctgaggcaagagaatcacttgaacccaggaggcagaggttgcagtgaacaaggtcatgccattgcactctagtctgggcaacagagtaagactccatctcaaaaaataaaaataaaaacagcagcttcctctaggaagtggggctggaagacttttactttttctgttatacttttgtactattgcaggttttaaaatcatgtacttcacagtaaatccagaagaaattatgcacttaatttttctgggtgaattgtgttgtagaggtaatagaggattattaaaatttctttcttttttttttttttccccagatagcagaccccacgttagctgaaatgggaaaaaacttgaaggaggcagtgaagatgctggaggacagtcagaggtgagtaggacagaggtgaccctgttcaacgagttcagcctgctgtgaagccagtggctctgggttctttctgttaaaggtgcctcttggcttcacagtgtcacacacagcttcggctgacttgaaaattggtgtttgtcttgggtaaaaggtgccttgtaattaaaggattttgaa

SEQ ID NO: 16418 - DNA, 2300 bp, Homo sapien
ctcccaaagtgctgggattacaggcgtgagccaccgcgcccagcccagcctcttatttgtatttttattgttttttgagatggagtctcgccttattgcccaggctggagtgcagtggcgcaatctcggctcactgcaacctctgcccccgggggttcaagtgattcccctgcctcagcctcccaggtagctgggattacaggtgtttgccaccacgcccagctaattttttgtatttttagtagagacggagtttcactatgttggccaggctggtcttgaaccagcctcttattcttttacatactatttccagcacaactgtccgagatggcagtcaataaatgtttggctaaatataataaataatacggttgattatttccactttttcatgttgggttttcaaagactacttttaaaacagtaaagttaacttttctctctagtatttgttttgtagaatctattatactttgtaatgtaatccacagaaacttggaggtgactttagtaaaatgtactagttttgaatgatacccatactgaggtgctcagaggtgaaatgtactaacatatatcgatggatggatatatggatgcatatgtgattaaagcaaatatagggaaaattaactgtagaatctaggtagtgggtatatggttgttcactgtacaattgtttaaacttttctacctttgaaaaatttcaaaacacgttggaaaagtgacttgttttgctcaagcaggggtacattcaatcttcaattcttgaaagacataaatctatcattccttctgtttggaaagctctttagagagtcagaataattcccacagtacagtctaaaccagcacacaagggttttttggtagaaaataattttattaacataaccaggcaatttaccaaatacaacgtagatagctcaaaacatggagttactgcgctgaaaatgtgaccctgtttacacagatttcgggacgaagagtataaaacaggagagaaaaggagtaagattgtggttgcagcgtcctcgcagaggtgaagtgttccattgattgccactgtggtagtctacatcagtttcccacattaaggtgggaggaatctactaagcaaatgtacgccctccccattcgttcgaaacacattgcagtaaaattgcaaaagtggccgggcgtggtagctcacgcctgtaatcccagcacttggggaagctgagacgggaagatcgcctgaggccaggagtttgaagccagcttgggtaacatagtgagacacccccaccttctctattaaaatgagattttaattttttttctcttcagttcatcggttaacaagataaaaaaattaataaaaaattaactttttaaaacatttaaagtaacgtaggagtggaagcagtatgtggactcatggggcttgggtctgaatcctacctagatcggcactgcgaaatggggataatgatctcctagagctgctgaaataggaaaatggaagaacagcagctgatgtattaatattatcattattactactacccattacctgacaagtcataattgtgacatgcaagaggctggaccagttgtttcaacaattttttccgtctagaattcggcggtagggtctgagacaacacctcagcttagatcagtgccttctctgaacagcgttcactaagcagcccccaaccccaaaacccccaagtccccgggcgccgaggacgctgcgagtcctgcgcatgcgcaaggttgctctctcgctcaccgcctccttggcgaatggcctgttccattctcgagggatgccggcgggaggtgaggcgggagacttggaagcctgggcccggaagtgaggtgcgtcactagtatttccagcctttcactccatgaatagtactttgtgattattatacttctacctagatgattgcaacaggctgctggaaagagtttggtgaacaatccaccgggcatcctccccccttcacctgcgcacgttagggagggccggcgtggcgcccaggtacggaatcccagagggctccgcccaccattacagggccccgccccgccgccccgccgcccctcaaccatcaggttcggcagccggcggcgccgcctggcagctcctcctcttctccgccccgctggccgcgggcgcgggggacgtcagcgctgccagcgtggaaagagctgcggggcgcgggaggaggaagtagagcccgggaccgccgggccaccaccggccgcctcagccatggacgcgtccctggagaaggtgcgtg

SEQ ID NO: 16419 - DNA, 2300 bp, Homo sapien
tatcctgtgtggtagcaaatacatttaccaagtcactgcagatgaagatttcacaagaggacttgacaagcgtaattaaaacgtctgtttagggcaagacatggtggctcatgcctctaatcccagcacattgggaggccaaggcaggtggatctcttgaggtcaggagtttaatgccagcctcagcaacatagtgaaaccccacctctaccaaaaaatacaaaagttagctggggacggtggcacgcgcctgaggtctcagctattcgggaggctgaggtgggagaatcgctagagcccaggaagttaagactgcagtgagccgtgattgcaccactgtgctccagcctgggtgacagggtgagagctaatctcaaaaaataaaaataggctggacgcggtggctcacgcctgtaattccagcactttgggaggcctaggtgggcagatcacgaggtcaggagtttgagaccagcctggccaacatagcgaaaccctgtctctaataaaaatacaaaaattagcccagcgtggtggcgcacgcctgtacagtcccagctactggggaggctgaggtaggagaatcccctgaacctgggaggcagaggttgcagtgaaccgagaccacaccattgcactccagcctgggcaacagagtgagcctccatctaaaaaataataataaaataaaaacactcaatcccctagaaaaaatagtgcatcagtggttatgagaacctactaaggacaagacccatctttgacaatgaaaggggccttaggacttacttcccttttttttttttttttgagacagtctcgctctgtcgcctaggctagagtgcagtgacacaatcttggctcactgcaacctccgcctcctgggtttaagcaattctcctgtcccagcctcccaaagtagctgggattacaggcatgtgccaccacgcccagctaatttttgtattttttagtagagatggggtttcaccatattgatcaggctggtctcgaacttctgacctcacgtgatccaactgccttggcctcccaaagtgctggcattacaggcatgagccaccgcacccagcctgacttagcattttggagtggaggccgatcatggtgatggagaaggaaatcagggacagatctacaccatttgtttgctatttactgcacgtaaacagaatgaaatcaacacattaagtatttcacttgatttcatccaccatctcctgcagacaaccaggtttctcccaaattcatgtgcctggaaatggcttgaaccaaatggttcatgaggaaaacctgtgatatttttcatgaaatcgccacatctgggcatcaggaaagccttccccgagaatgtctcaaattggtcagccgttttctctttttttagacaggtaggtgtccccaagcattcaatcctagctaaaatatggaagtatttatctagcacaggagcctatggcatagtttcagtccactgtctggcagacctcatctgggctgtctttgtgtgatttgactggccagtaaatggggtataaactatgtaggctgtggcctggccttgtgacagaggggtccctggaacttgactgccactccctaagagcagaaaccgcctctttcttgtacattgctggatcccatcatcctgcacagtgcctggctacaggtggccagcaataaaacacaagattggggcaggcacagtggctcacgcctgtaatcccaggactttgggaggctgagatggaaggatcacttgaggccaggagttcaggcccagcctaggcaacatagtgagcctatctctacaaaaaaaaaattttttttaaattaataaaacacaagattggtttgtgtggtgagacagtattgaatccaacaaacgggaactggatagtgtggcccaagatgcaatggtggctgcagcatgagacccttatgcatataatattcagtggaagaggtgccaggcactgttctgggtgctgagaataaagctatgcataagactaaggttctgtcgacagagatcgtgtcacaccagtggaaaagacagtcatcaaacttatatccttgagtcagtgatgagttctagaaggaaagaaaaggctgatgtgacagtgaggaagggatgagtggagacttctctgagacttcagtgattcctcttcctctgagctgagccaagctgagaagctgagaagagtaagatagggccgggaactcaggtccgttagtccgtcctccgaggtggggcgggccagcagaatggatttccg

SEQ ID NO: 16420 - DNA, 2300 bp, Homo sapien
tgcagtgagccgagatcacaccgctgcactcccagctgggcgacagagtgagactctgtctcaaaaaaaaaaaaaaaattgctgaggaaaagcagcaaaaagggagggaaacgttgcaggtacatgaaagagagatagcagttgatggagctagggtcaagagaagagaggaggaagtgggatccagggcccttgggggagattaactttccagtggataaaagaaggaaggaagagatggttgcagatgcaagtgggtctataggaagggtttcagggaatgagatgagccaggttatctgcttagaatgagggaagaaaggaggtgaaattgaaggttgagagaggaatagctgggctctgaacctgaatacagacagaggtctgcctgtggcttaacatgtgctagcctaagccaccaaggagcaggacagttttcaagtataaccgagtggtcacgggtcagaagccaggaggttgacagtgaggtcaatgggacggggctggccatttggcagcagcagttccccaggagagctgtgttgccattgggacagagggtagagagaatgtcagcaaaggggtgggtgtttacctttgggaaaggtattctggagggtgcagtagaggggcttgaaggagaggaaagcaaagagagcttgggccacgggaaataaattggtcacgtggagatgagattatggaaagactagccgggtagagaagcttctgttttgagatggtgcttaacagggaccagggatgagaggcatggtggcaaccacaaggtggccaagacaatttgtctccagttggatgggatgtctgcctggacacagtctgtgcttgcattggttgcaattctgagagtcatctctgatggatggacatagataccttggccttggacaatttgtgctgactgtggagcatctgtgggtcctgtggctggcagtggaggcggtaaggagatgactagcagtgagctaccctaaggcccccttgtctaccgcctctcgtctcaaagtcctcatcctcctgtacacatgactgcatggacagccagtaggtgctttcttcttcagtttcttgaaacttgaacagtcatctgttttgctgatagattaagtttgttaaaaccctgccttgtccaagggcagtggttcatgcctgtaatctcaacactttgggagaccaaggtgggaggatcacttgagcctaggaagtcaactctgtttttcttataattctaccatccgctctccaccatggagccagactgacctttggaaaacatcccccaaccccccaccgccaaaaaaaacaaagaaaagaaaaacatcccagatcatttcattcccctgctagtgatactcccgcatgagtgattttcctttgtactttgaataaaattccaactcctgctgatggcacccaagggctgtgtgtaactggcttccgcctgcctctccagcattgtcttagatcatctccccacactccccgtgtcgtgtacatgccggcctcctttttgttcttggtctgtcttacctcagggcttttgcacatgctcgtctcagtgtctgccaaatgtatagctcgttccttatccttcaggtctgtttccaaatgtcacttccttggaggctgtttctgaccatcctgttttaaatatgcccctagttactctatcatgttagctttatttactgttttatttgtatgtttatttgtatattgattggtgttctcctcattcacacacgcaaactctcaaatgtaaatttcataaagacagggacttccccattcttgttcactgctagcagaatatctgaaactcagaatgccctcaaatatttctttttttgttttttttttgtttgtttgtttgttttttttttgagacggagtctcgctctgtcgcccaggctggagtgcggtggcgcgatctctgctcgctgcagcctccgcctcccgggttcaagcaattctcctgcctcagcctcctgagtagctgggattacaggcacctgccaccatgcccagctaatttttgtgtttttagtagagacagggtttcaccatgttggtaagactggtctcgaacccctgacctcgttatccactcgccgcggcctcccaaagtgctgggattacaggtgtgagccactgcgcccagcctaagtttttgaatttttagtagagacggggtttcactgtgttagccaggatggtctcgatctcctgacctcgtgatccgcccgccttggcctcccagagtgctgggattacaggtg

SEQ ID NO: 16421 - DNA, 2300 bp, Homo sapien
gcgcactatttacatcctctcctctctgctccatagtttatgattccaggaatttaattattgtgttccaaagtctgtttttaaactgagttgctattttcaatcttgaacaaggcccatttacatagtctcaggatgtgattctagggttttgtgttttttttaaatgaaagcattgagccgggcgtggtgtctcatgcctgtaatcccagcactttgggaggccaaggcaggcggatcacctgaggccaggagttcaagaccaggctgaccaacatggtaaaaccccatctctattaaaaatactaaaattagccgggcatggtggtgcatgcctgtaatcccagctacttgagaggctgaggcaggagaattgcttgaacccaggaggcagagagcgagccaagatcgcacgactacactccacccttggcgacaaagcaagactccatctcaaaaataaaataaaaaaataaattaaagcattgacttgactttgtcagtgtttcttctgggtggagaacctgctgcacatgccttcattctggaacatcagatgaaacaccaactctttctttaccttggaacaggtgttcagatctatgaccggacatctgttcttcatgtaatggtcaaaaaaggtcaagttactggagtggagaccgataaaggacagattgaatgccagtattttgtcaactgtgctggccaggtaggtcagcaccaacactgctgttcttatttaacgtttgtctccaagatttttttggtgtagagaagtaagattagtattgtgattggttatacagatatcagtaactacgctgtttcttgtagggtattctaaatcagaaacctacacttagtctgcaaatagaagcctgtgtgaccttgtccttcctccacactgggttgatgggtgctatcctggtcaggaaggccagcaaatggtcaggcattgacgtgaatccttggcactgggtcttgatgttacatttcattctataacctagcaaataacatattaggctattttattgtgtcaggaatgtggacactaatttccaggacactgcttcttttaaagcagattggctcttgccttccatgctatgatcccgaagtgaactaagaaatacttttgccatgtgaagttcatttagtgattgctatttggggtttgtagctgagcccaggcgttttatcaaaaggacctcctttggttcccatgagctcctttgactagctggtaaatatctcttcctttgatctcaaagtaatttttatgtcttaaaaaatgtagtattgctccccatccaaataattgaactaaagcaggctgacttcccacacctgacactgtagcaagagcacacataagccacttggaattaatctcaagaggctgaacttgctcatttttatttctgttcctcttcccacccacaaatcaacctgtccatttgtagtgggcatacgagctgggtctgtccaacgaggagccggttagtatcccgctacatgcctgcgaacacttctacctcctgactcgccccttggagacccctctgcagagcagcacaccaagtgaggacttgcacttttttaaaaaatcttgtttctttgccagtatcctgtcctctgaaaaggaaaactttctgctaaggacagcctgtgtctgaaagagtctttcatttctagagcatgttacagggaggtggacccaattctgacttttctttattaactctttatgaaaggatggccaaaatttccattaatacatttttttgtttttgtttgttttgcaagctaattttagtcctaaacagaggtcattgagaatatttggactgtcttgttgactttttaacttgaatgctatggatagtagaaatgtcataggtaaacaatagacttaggtgggttcgtggttccaagcactgtaggagagggttctcacatccttttgacggtcttcatgcctagaatgggctctgcaacccccctctctgttaaactttcgcttggcacagtgggagttacgtggtttgcttgtggggactagtcaaagcttctaggtaagggataatcagagaaacagtctccactgaaaggctaaatgggaggatcttcccccgtgacctcaaaaggtattttaaagctaatgaatgcctgtgttcattgaatgttctttcattaataaagccattaatgggtgtttttgtttggttgttctgtccatttagaaagctgacttgcctctaaacccttgttttttcttccactccccactccat

SEQ ID NO: 16422 - DNA, 2300 bp, Homo sapien
catgttgattccttaggggtgctgtagcagaggctctcaggcgcttctccgggaaccataaatcccagagtctaagaatcattacatgaaatcaaagccagtttattagcagtcctaaacaaaagaaatcaccaggaggaaaagaaaaaaaagcccaccagattatgtaccctactgggagaagatgccttgtcttttttcttttttttttttttgagacagggtctcactttgttacccaggctggagtgcagtgatgcgatcatggatccctgcagcctggacctcctgggctcaagtgatcctcccacctcagctttccaggtagctgggaccacaggtacacgccaccacacccagccagtttttgtatattttgtagagatagggttttgccacattgcccaggctgatcttgaacacctgagctcaagcaatctgcccaccttggcctccaaagtgctgggattacaggtgtgagccactgtgcccagccgatgtcttaacgttagtaaatctgtataatttcttggcattaacaggaagccagaattttgttttgttgttaggtggtgtatcctagaatggtgctactggccttctgtgaaagctaagaaatcatttcctagtatttgcctcattgctttgaaaccaaataagatttgattgcttcctgatccttttgctgctacctggttttgattattttggggtctcacttttcagtttcttcatgatctctccaaccgaccagcaggtccactgttgggcctggcttaagaaacacatgccgaaagacagcaacctgctcctggaggacgtcacctggaagtacacaggtacgggggttcgggctctgccacgtcgaaaaggccagcagatgcagatgtgtccacgtttgccttctttacatttgactctcaaaaatgaacattagagttagcataaaagaggctctctggtcatagaaaattgatctctaggggatgcggtggctgacacctgtaatcccagcacttttggaggccgaggttggaggatcactaggtcaggagttcgagaccaacctggactatatggtgaaaccccgtctctactagaaatacaaaaattagctgggcgtggtggcacacacctgtaatcccagctacttgggaggctgaggcaggagaatcacttgaacccaggaggcagaggttgcagtgagccccagattgcaccactgcactccagcctaggcgagtgagactccatctcaaaaaaaaaaagaaaattgagggctggacacagtggcttacacctgtaatcccagcactttgggaggctgaggcgggcggatcatgaggtcaggaatttgagaccagcctggccaacatggtgaaaccccatctctactaaaaatacaaaaattagctggacatggtggtgcatgcctgtagtcccagctactcatgaggctgaagcaggagaatcgcttgaatctgggaggcagaggttgcagtgagccaagatcatgccattgcacctccacctcccgggttcaagcgattcttctgcctcagcctcccaagtagctgggattataggcgcccgccaccacgccgggctaatttctgtatttttagtagagatggggtttcaccatgttggccaggctggtcttgaactcttgacctcgtgatccacctgcttcggcctcccaaagtgctgggattacaggcatgagccaccacgcccagtcccagagagtacctaatttttaaggatgacttggttccctgattttctcactctcagcagtctcggcttaacccctcccaccttcccacctaactgatcttgccccttggccccaccagcgtttgctctcccaggctctcattctcaattccttgtagtagcaaatatgatatacgtcctgctcctggattgggatactacagaatgttactgaacaaaagtcatgttctagcctgtcttaggatggatgacatgtaattagcacaagctgatgtcacaaacactggtgtccagaataatgctttccttatctagtaagcattaggatatgtttgaagtggatttagcttctctgaatttaaagtctgtatactttttggttgggcagatctccaccgggtactgatttggggttggggcttcttccatcacatagccttgctgggaaaaggaggagaacgggaattgtgtggggtggttatggccagccctgctgcgttcagcaggccctgttggcagaggtgtattcgccagaatcggggtgcttagcatccatcctt

SEQ ID NO: 16423 - DNA, 2300 bp, Homo sapien
tgagtttcaggagtgggagtgccatcctcagggtcacacagcgtgtcggttccagcctaggtcttccagtgtctcattaatcttttatccactcagcttctcttctggcccatgaaccttgctctcctgggactcttttttttttttttgaggggtcgggggtgggacagagtctcgctctgttgcccaggatggagtgcagtggtgccatcttgcttcactgcaacctccgcctcccagattcaagcaattctcctgcctcagcctaccgagtagctgggactacaggcacccaccaccctgcccagataatttttgtatttttagtagagacaggatttcaccatgttggccaggctggtctcgagctcctgacctcaagtgatccgcctgccttggcctcccaaagttctgggattacaggcgtgagccatcacacccggcctgggactcttcttgcagtgagccagggccatgggacccttcaaaagttgctccaccctaatccccaaaatatctttttctcccgcctgtcccaagtgcctggcatcatactatatgggtcaactggccatgtttgccatggaagcccaattgtaggaagtgggtcttttatcacccggcatagcagagctgtggaaactgcactgggaaagatcaggatgtgaattaaagcgttgggaatgggaaggcagagaccttggattagctgggatgctccatgcactcgctgagtgaccttggacaagccccttagacacactaagcccgtttcctcatctacacgacgggcatcccatctgctactgcaccaggttcttgtggcaataacttgaactcacacatgcaaacaggctttgtgagctccataaacacaggtggctcggccaggtgtggtggctcatgcctgcaaccccagcactttgggaggccaaggtgggaagatcccttgagcccaggagttggagaccagcctgggcaagacgatgaaatcctgtctctaccaaaaaaaataataataattagccaggcatggtggcacacacctggtcccagctccttgggaggctgaggtgggaggatcacttgggcccaagaggtcaaggctgcagtgagctgagattataacactccaacctgagtggcagagtgaaactgtctaaaaaataaaaataaaaatacatcaaaaaacaggtagctattaagcattgctaggacccacacgcagtgaccctgagggtgctgggtttctgtttgagggagaagaaactcctgagcccctaggtattgtgggggacatgcagttccagaccgccttcatggcctgtatgcctggcctcatccccatccctggcacccatgacgatagccacattccactggtgtttccccaggaaagccaaccctacctgcatctcagcagagcttccacggagttggaaccccgctccgagagggtgtgggctcaggggccaggggtcacacaaactccagaaggaggacgtagttggtttgcaaggctgtcctttgccctggttgaataacctttggtcttccccgagaggaacgtgggcattaggctgcagcccacaggaagctatgtattttctgagaaacttggcccatggtgcagatctgctccagctcactctggtgggatcacgccagccacggccgggccacggcacatcatggcaacgtgctgcccacctgctacgccacctgtttttctagaggcggacgtgatcccagcaggactggagtcagcccagggcatcacgtgctctggtccccgcctgctttgactcctcctgcctcactccccccctggcctgtagtcacgttggtgagggtggtgggcaccggggctgggcccagcccccgaccctgcccagacagactttcctaaggcacccttttcctcgtgcaggtgcggcctcagcccacccccctttgagcccacagattgcacccctctggtgtgcggttacctcttgcctatgtttaattcatggctggggggttgggacgagcttcccaagaaaggaaagaactcccctggggtcttgcccagtttctgctcaccagaaggaccatagccgaggtcctcctcccagggcccggggctggggagcggaagccatcagtgggctcggaggacactgtcccagccaggacacggccatcggtcactaatctgcagcactggaatgtccgcaggccaatcagcggggtctctgggggctccccaagggtgctaataatcccacaatgattagcaggggccgcgggtcagtgca

SEQ ID NO: 16424 - DNA, 2300 bp, Homo sapien
ggtcaactggccatgtttgccatggaagcccaattgtaggaagtgggtcttttatcacccggcatagcagagctgtggaaactgcactgggaaagatcaggatgtgaattaaagcgttgggaatgggaaggcagagaccttggattagctgggatgctccatgcactcgctgagtgaccttggacaagccccttagacacactaagcccgtttcctcatctacacgacgggcatcccatctgctactgcaccaggttcttgtggcaataacttgaactcacacatgcaaacaggctttgtgagctccataaacacaggtggctcggccaggtgtggtggctcatgcctgcaaccccagcactttgggaggccaaggtgggaagatcccttgagcccaggagttggagaccagcctgggcaagacgatgaaatcctgtctctaccaaaaaaaataataataattagccaggcatggtggcacacacctggtcccagctccttgggaggctgaggtgggaggatcacttgggcccaagaggtcaaggctgcagtgagctgagattataacactccaacctgagtggcagagtgaaactgtctaaaaaataaaaataaaaatacatcaaaaaacaggtagctattaagcattgctaggacccacacgcagtgaccctgagggtgctgggtttctgtttgagggagaagaaactcctgagcccctaggtattgtgggggacatgcagttccagaccgccttcatggcctgtatgcctggcctcatccccatccctggcacccatgacgatagccacattccactggtgtttccccaggaaagccaaccctacctgcatctcagcagagcttccacggagttggaaccccgctccgagagggtgtgggctcaggggccaggggtcacacaaactccagaaggaggacgtagttggtttgcaaggctgtcctttgccctggttgaataacctttggtcttccccgagaggaacgtgggcattaggctgcagcccacaggaagctatgtattttctgagaaacttggcccatggtgcagatctgctccagctcactctggtgggatcacgccagccacggccgggccacggcacatcatggcaacgtgctgcccacctgctacgccacctgtttttctagaggcggacgtgatcccagcaggactggagtcagcccagggcatcacgtgctctggtccccgcctgctttgactcctcctgcctcactccccccctggcctgtagtcacgttggtgagggtggtgggcaccggggctgggcccagcccccgaccctgcccagacagactttcctaaggcacccttttcctcgtgcaggtgcggcctcagcccacccccctttgagcccacagattgcacccctctggtgtgcggttacctcttgcctatgtttaattcatggctggggggttgggacgagcttcccaagaaaggaaagaactcccctggggtcttgcccagtttctgctcaccagaaggaccatagccgaggtcctcctcccagggcccggggctggggagcggaagccatcagtgggctcggaggacactgtcccagccaggacacggccatcggtcactaatctgcagcactggaatgtccgcaggccaatcagcggggtctctgggggctccccaagggtgctaataatcccacaatgattagcaggggccgcgggtcagtgcacgccactctgcctgctgtcgggggcgggctggccaggccgaggccggagcaggcaggcatcccccggagttgtctcttttcatgccagcgccaacaggaggctgtctggacacactgattactcactcaccagcctccctcttttgtccaccagcccagcctgactcctggagattgtgaatagctccatccagcctgagaaacaagccgggtggctgagccaggctgtgcacggagtgcctgacgggcccaacagacccatgctgcatccagagacctcccctggccgggggcatctcctggctgtgctcctggccctccttggcaccgcctgggcagaggtgtggccaccccagctgcaggagcaggctccgatggccggaggtaagggacacctggtgaggaggtaggtggaggcaccattatgagctctgaggagtgggtgctaggagacttctggaagcccggtcccaggcctgagccccaggccgtgcgggtggtttaatgaggaagccctgggacagcccgggggcggtgaggggtggatgctggactggggag

SEQ ID NO: 16425 - DNA, 2300 bp, Homo sapien
ctgaaaatgtggaaaatgtggacgagtgagtgagcagagaacatgggcaaggcccgtcctcgtggctcagataagctcaggaggaggcgctgggtccttgccgcacagaagcccctccccagcccagcacgaccttctccctccctggcccggccgcccatcctgcagggctcctcgtgaagctccccttccctggaggaggggatccggctcctcctgtggctcctggtctctgtggcaacaagatgccagggaaggcccaaggtcctgcccttcaggcgagtgggagccaaggggcccgacctcctgaactgagggtggggggttaagaaactgcagagacccccagcaaccagggcctccgtccctcaggggcaaggtggctggctgtgcctgcccaccctggtcaagtggaagggcacctggacaggcgtggcctcctgagccgccctctggggtccgcgcctccggccacccccctggcagagcccagctgggtcgggtactcaccagcctccgcatgtcagccgcagggggctggacccagctgcgcaggcggttgtgcagggagaggagcaagaaactctccttcctgttcagggctggggtggagagagaaggtcaggcagcccgaggatggggggacctgaacccaacacacggcagaataagcatgtgtccctgcccttggaaaacaagatgggagaggagtgtggtgggtgcaggggacgtggggcatagcaatggagcgaggctgagagagagaccaggtacagcaggcgtgggctgagtgctggggttggggtggcgggagggaacagcggtgcgggctgggtgtaggggccagccctggctcccgcaggcccctgtctggggctcctccgggccacggatttctccaggccccagccacagcgctcctcggcgttcctccttgaccccagccctggtcctccttcctcctccttcctccccagtccagcatccacccctcaccgcccccgggctgtcccagggcttcctcattaaaccacccgcacggcctggggctcaggcctgggaccgggcttccagaagtctcctagcacccactcctcagagctcataatggtgcctccacctacctcctcaccaggtgtcccttacctccggccatcggagcctgctcctgcagctggggtggccacacctctgcccaggcggtgccaaggagggccaggagcacagccaggagatgcccccggccaggggaggtctctggatgcagcatgggtctgttgggcccgtcaggcactccgtgcacagcctggctcagccacccggcttgtttctcaggctggatggagctattcacaatctccaggagtcaggctgggctggtggacaaaagagggaggctggtgagtgagtaatcagtgtgtccagacagcctcctgttggcgctggcatgaaaagagacaactccgggggatgcctgcctgctccggcctcggcctggccagcccgcccccgacagcaggcagagtggcgtgcactgacccgcggcccctgctaatcattgtgggattattagcacccttggggagcccccagagaccccgctgattggcctgcggacattccagtgctgcagattagtgaccgatggccgtgtcctggctgggacagtgtcctccgagcccactgatggcttccgctccccagccccgggccctgggaggaggacctcggctatggtccttctggtgagcagaaactgggcaagaccccaggggagttctttcctttcttgggaagctcgtcccaaccccccagccatgaattaaacataggcaagaggtaaccgcacaccagaggggtgcaatctgtgggctcaaaggggggtgggctgaggccgcacctgcacgaggaaaagggtgccttaggaaagtctgtctgggcagggtcgggggctgggcccagccccggtgcccaccaccctcaccaacgtgactacaggccagggggggagtgaggcaggaggagtcaaagcaggcggggaccagagcacgtgatgccctgggctgactccagtcctgctgggatcacgtccgcctctagaaaaacaggtggcgtagcaggtgggcagcacgttgccatgatgtgccgtggcccggccgtggctggcgtgatcccaccagagtgagctggagcagatctgcaccatgggccaagtttctcagaaaatacatagcttcctgtgggctgcagcctaatgcccacgttcctctcggggaagaccaaaggttattcaaccaggg

SEQ ID NO: 16426 - DNA, 2300 bp, Homo sapien; identical to SEQ ID NO: 16416

SEQ ID NO: 16427 - DNA, 2300 bp, Homo sapien
tacaaagcctttccacacactgacatcagttacttatcaatattttccactagttcttttatactcttacatttttttaaaaacatttaaccacttttaaatttagtttcacagttgtgaggaagacatcaaacctccccccaccatagtcaactcactgttttagctcagtttattcttgcaccattttttgtgggggggggaaatgagatatgtgtgtttaaaataacagcctcctttggggctgggcgcggtggctcatgcctgaaatcccagtacttggggagactgaggtgagcggatcgcttgagtccaggagtttgagaccaccctggccaacagagcaaaaccttgttttagccaggtgtgttggtgggtgcctatagtcccagctacttgggaggctgaggttggaggattgcatgagcctggtagggcaaggctgcagcgagccatgatcatgccactgccctccagcctgggtgacagtaagactgtctcaaaaaataagtaagtaagtaagtaaaggccaggcgcggtggctcatgcctgtaatcccagcacttcgggaggccgaggcaggcggatcacctgaggtcaggagttcaagaccagcctggccaacatggtgaaaccccgtctctactaaaaatacaagaaaattagccgggcatggtggcgagtgcctgtaatcccagctactcaggaggctgaggcaggagaatcacttgtacccaggaggcagaggttgcattgagctgagacagtgccattgcattccagcctgggcaagaagagcaaaacttcatctcaaaaaagaaagtaagtaagtagataaataaagaaataagactgcttcaatttgcttttcaggtttgaaaaggcctctgtggagtaccaggagcacctgtgtgccatgacaggtgttgattgctgcatctccagctttgacaaattggtgctcaccttagccaatgctgggtgtaacagtgccagcccgaaacattgtctgaatggtgagcgttcagtatttttaaataaagcaaaagttatagtgatatattttgtactgatgatcttatcatgtttttaggtttctgtgctctttgaaatatttctaattgatctgaatctcttcttattttataaaatactttcaggtgaatccagaaaaactgtgctgtccaaaccgactgactcttcccctgaggttataaattatttaggaaataaagcatgtgtgagtgctacatctcaattgccgattgcgctgctgtgcaggaatggcagaatgctatccatgacttgaaaaagagtaccagtagcacttccctcaacctgaaagctgaattcaactatataaagtaaggctttctgtttccagttataaaacaaatttccaataactatgatgtttttcctatggcaaaaaaatattaaaattggtcatatgtagtaatacaaaatggttatatttctaacttactgccattatgaaaatgacaacaggaaactgacatcagagatgagggaaggtatttgtataatgggaaaacactgctgagatagtcatttggtattaattttcagaacctgtcattctaaaaccttaatagagtttgaagattatgccagagtgaatataaggaaaaatttgtactgatttagaaagaatcacatttgatggctttgtttctaaatgaggtctgaatatatcaaaaacatttattctaatgaggacagagtttgtgaacatctgtaaattaaactttcttctcattcctctgtgcttttattaattctgtaattcaaaactgagcactcactctgttgcagacacttggctgggaagataaaggtcattagactttgtctgatacccttgctttctactgctaaatgggttaatgtgtaattgcttcactgagcatatactatgacccaggcagcacataaaacagacacaaattccaaccttttaaagcaaagattagataaagattattgatagaaggattaattggacctcactcaccttttctgtgccataaggaaagcagttaggtaaagctgaccttctttggagggaagacacaaggtcaaggcatgcccatcaggatgccctttgggcctagacctgatgtgagaatgatgggcttggagtgttctggaaatagctgggaggcctgtgtgtttaggagcaccttaaacagtaggatataagggcagagaagtagctgggaactgagaaaagaactttggctgttattctagtaagactgaaaatttcaggtgggatt

SEQ ID NO: 16428 - DNA, 2300 bp, Homo sapien
gttccaggccctggccactgcagtcatcccccagtggcagaaggatgaattgcgggagactctcaaatccctaaagaaggtcatggatgacttggaccgagccagcaaagccgatgtccagaaacgagtgagtcctggcagcaccagtggccagagtgtttcctaggcaaaggctggcagaacagccaggggttcggggcctgggcttttggtctgagctgctgttctggacttttttcttgcaggtgttagagaagacgaagcagttcatcgacagcaaccccaaccagcctcttgtcatcctggagatggagagcggcgcctcagccaaggcaacccaggggccagggtcccctcccctagggctcatcagctctctggtggctgacatgtggcctctgtggctctgagcgaagtggttgcctaagggcccacggtctgggattgagattgggaggagcagcagctccctgcatgtgggaggcatacctgggccagggtaggggcagggcccggcgctggggtcctccccacaggccctgggcacagcccctgctctgggaaggggtaggggtgggtggcaggccttctgagggctgcaaatgctcacactagtgagggtccctgctccagcaccgtggcctgagccaggtcctccccacaggccctgaatgaagccttgaagctcttcaagatgcactcccctcagacttctgccatgctcttcacggtggacaatgaggctggcaagatcacgtgcctgtgtcaagttccccaggtcagcaccacctcgcaccagtgggaagtgttaggtcttaaggttgttggctgaggcctgtgtgtgtacagcctgcattcgaaacagcctttctgcccaccggttggttacctttgccagtaccccttacccaggccttcttattggtgaagacatctggttgatacctggctttgccactctgtcctgtcctggcagtggccatggccgccccctgtaccagccgtaaagtctgtctcggcctccagcagtatcacccagggcaaggagtgggtgatggctcctccatcctttctttccctgcattcctccctcaatcccatcttctgtgctgactcccccttcccttcctgtcttctagaatgcagccaatcggggcttaaaagccagcgagtgggtgcagcaggtgtcaggcttgatggacggtaaaggtggtggcaaggatgtgtctgcacaggccacaggcaagaacgttggctgcctgcaggaggcgctgcagctggccacttccttcgcccagctgcgcctcggggatgtaaagaactgagtggggaaggaggaggctcccactggatccatccgtccagccaagagctcttcatctgctacaagaacatttgaatcttgggacctttaaagagcccctcctaacccagcagtaactggaacacacttgggagcagtcctatgtctcagtgccccttaaatttctgccctgagccctccacgtcagtgccatcggtctagaaccactaaccccgcattgctgttgatcgtcacgctcgcatctatagataacggctctccagacctgagctttccgcgtcagcaagtaggaatcgtttttgctgcagagaataaaaggaccacgtgcaatacttaatgccgcatgatctctatccctcttcccaataggggctggctcttttgacagcctttggcgtctgtagaataaatgctgtggctcctgctggctgctgtggtgttcacctagtccagccccagaacccaaaattttgggaacagcccctagggctgcctcaaacgtctgtggaggtggaggccaaataggtggggtgacttggagcaaggcgttcataattcagtagatgaggggtggaggtagttggaagcagagaagcctttcttggagctgctctcccccctcccttccagcaagatggatggatccggctaccctgcacaactgggaccgggccgttctccctccgggcctccaggggcgctgtagtgcctcccgccgctctctcgacagcccatgcgcagccgcgcgtctttaaacaacggaagaaccagtggatgcggcagggcgttgggcggaaggggttcgcacgccaagaaccgccatgcctggggatcaccgccgcatccgcggccctgaagaatcgcagccgccgcagctgtacgcggccgacgaggaggaggcgcccggcacccgcgacccaacgcggctacggcccgtgtacgcgcgcgccgggctgctgagccaggccaagggctc

SEQ ID NO: 16429 - DNA, 2300 bp, Homo sapien
cataagtttgaggctgcagtgagctatggtcacaccaaaacattccagcctaggtaacagggtgagaccctgactcaaacaacaacaaacgtaaagacactttttcttttttttgagacggtgtttcgctcttgtagcccaggctggagtgcaatggtgcgcaacctcggctcaccgcaatctccacctcccggcttcaagcgattctcctgcctcagcctcctgagtagctgggaatacaggcatgtgccaccacacctagctaattttgtatttttagtagagacggggtttctccatgttggtcaggctggtctcgacctcctgacctcaggcgatctgcccgcctcggcctcccaaagtgctgggattacaggggtgagctaccgcgcccggccaagacacttatttaagacagccttccccttcttcttttttttttttttttttttttgagacggagtctcgctctgttgcgcaggctggagtgcagtggcgcgatctcagctcactgcaagctccgcctcccgggttcacgccattctcctgcctcagcctcccgagtagctgggactactgggactacgggcgccagtcaccacgcccggctatttttgtatatttggtagagatggggtttcaccgtgttagccaggatggtctcaatctcctgacctcgtgatctgcccacctcggcctccccaagtgctgggattacaggcgtgagccaccgcgcccggccgccttccccttcttgataaggctccccctcttttactgtctcacagcctcaagtgtttcccttcataatttccatacgcgcttcatggattgtttaatgtgcgcctcccccatcaggctgtcagttccatcccagcagcaacgactgttctgggctctttttttttttttttttttgaaacggagtctccctctgtcacccaggctggagtgcaatggtgtgatctcagctcactgcaacctccgcctgccgggttcaagcgattctcatgcctcagcctccggagtggctgagagtacaggcgcgcgccgccacgctcggctaatttttgtatttttagtaaagacggggtttcaccatgttggccaggctagtctcgaacccctgacctcaggtgatccgcccgcctcgacctcccaaagcgctgggattacaggcgtgagcctccgcgcctggccctgggctattacagcacatcctcagcatctagtacagtggctgctaaatacgtatttcgtgatcaggtatactaatcctttaacaccaagttcggaattaactcacatgcttcaaagcacaccgagaaatacaaactgttttacagaacagcttaagatgacggtctcggtgcgcctggaccggcatcagctgtttagttaattttaagaaatcaaggaatggctggcttacagcaggattgcacccagctggcccatccttcctcccgtgcccccacccgcccctaggggattaaaaccaagggagctaaaaccccaggttggcaaccgtgaggtattggtgctcagcaaatccacccgaggccgcgacactcgcagcgctcccgggggcgaacgcaaggccacactgtccagctcccgctccagcccagactgggcttctccaggccacgcggggcctgatcctggggcccactgcggctgcggagctttccccccagtctgcgggcccagccgctctcctagcaccgcagagctctccgagggcggcctacctctcctagggtcgccgtccccagctcctccctcagagtcccccgccaagggcccgctgcacctattcccgcagacgcgcagctgtaccggcctcagaccacgacctaccacaacccgccacgctccgtccaatcagagcgcgccgacggaaagtgccccgccgcgccttacctcatgagatattattggtcaaccaacatgccagtcaaactgaggacgaatccgttcattagtggattcctgggaaggcggctctaacttggctgatgcaactgcgagaaaaggtgggatggggtgcgtcacatgatcgagttagacccccccccgccccccccgcccccccccgcccccggctcccggaggtcgacattttggtttccataggcaaagtcctaacaccacaattgacatagttaaaaaggggagacggtaacgtgtttggtagaggttacatatcttgctatagttgtttattttagttgctgagtgatacacagccctcaaagagtctgacattgtgcccatggttacacttgtccggggga

SEQ ID NO: 16430 - DNA, 2300 bp, Homo sapien
tctcaatctcctgacctcatgatctgcctgcctaggcctcccaaaagtgctgggattacaggcatgagtcaccacgctaggccaaaaaattattttaatctgtttataattattttattaatgaaggtactatcctagtaacaactctggcagcagaactaaattattgagattacaacctgtattattttattctgaaagtacaattcatacataccttttggctttctattttaagtgtggtggcttagaagtctgactcatttcccagattgtttaagctaaatatatgttatttagggcactgtggatcagaataaacacttgtgtctcctggttttgccctcagctgtgttacttaacctctctctctgccttattttactctgttaaaagcagatagtagtagtaactcatgataaggttgtgaggattaaaagcttagattggtgcctgctgtatactaagtgctcaataaatggtaggtttgatgattactatttgtgagcagctatgaagtgggaaagtaaatcaaatgatttatgtttttactggcttttgggcttgaccttctttttgtgtaggatgctctttttgcataaaaagtagtatttttctgtattgtctgtaacttgagttatgaccagcagcacaatttattacccgtgtatttggatatatcagatgatggaggtaatagtgcagtggttaagagcatgggctttggagttaaatagacacaggtttggatcctgtctccacaacttactattgggtgtgaacttgtgcaaggtaatttcctcatttgtaaaaaggggactccagctgacctcatacacagtttaaaaatcaaatgaaataagcatgtgaaatgtttgatgcaatgcctcacgtataaatacatacatatttttcagacagggcctcgctctgtcgcccaaggaatgcagtgtcacgatcagggctcactgcagcctcaacttcctaggctcaagtgatcctcccacttcaacctcccaagtagctgggactacaagcatgcgccactatgcctggctaatttttattttttatttttttttttgagacggagtcttgctccgtagccaggctggagtgcagtggcgccatctcggctcaccgcaacttccgcctcccgaggtcaagggattcccttgcctcagcctcccgagtggctgggactacagatgcgcgcccggctaattttgtgtttttagtagagacggggtttcaccatgttggccaggatgctctcggtctcctgacctcgtcatccgttggcctcagcctcccaaagtgctaggattacaggtgtgggccaccgcgcccggccttttaaaaaatttttcgtagagacagggtctagttatgttgaccaggctggtctccaactcctgggttcaggtgatcttcccaccttggcctcccaaagtgttgcaattataggcgtgagccaccgcacctggcatgtatatatgtatatgtatatatatatattcaccctcctcccccaggcctataaatattaacttttttttttccaaaggcaaatcgaggaccagatgctgatccaatcgtacctgaactactgatgttatttcttccacaccaaattcaaggtctcccccggacaagtgtaaccatgggcacaatgtcagactctttgagggctgtgtatcactcagcaactaaaataaacaactatagcaagatatgtaacctctaccaaacacgttaccgtctcccctttttaactatgtcaattgtggtgttaggactttgcctatggaaaccaaaatgtcgacctccgggagccgggggcgggggggggcggggggggcgggggggggtctaactcgatcatgtgacgcaccccatcccaccttttctcgcagttgcatcagccaagttagagccgccttcccaggaatccactaatgaacggattcgtcctcagtttgactggcatgttggttgaccaataatatctcatgaggtaaggcgcggcggggcactttccgtcggcgcgctctgattggacggagcgtggcgggttgtggtaggtcgtggtctgaggccggtacagctgcgcgtctgcgggaataggtgcagcgggcccttggcgggggactctgagggaggagctggggacggcgaccctaggagaggtaggccgccctcggagagctctgcggtgctaggagagcggctgggcccgcagactggggggaaagctccgcagccgcagtgggccccaggatcaggccccgcgtggcctg

SEQ ID NO: 16431 - DNA, 2300 bp, Homo sapien
ccacacccagctaatttttgtatttttagtagagacagggtttcaccatgttggtcaggatggtctcaatctcctgacctcgtgatccacctgctttggcctcccaaagtgctgggattacaggtgcaagccaccgtgcccagtctatttatttattttttttgagacagagtttcactcgtcgcccaggctgcagtgtgatggcatgatctcggctcactgcaacctttgccttccgggttctagtgattctcctgcctcaggcttacaagtagctgggattacaggtgtgcaccaccatgcttggctaatttttgtatttttagtagagatagggtttcaccatgttggccaagctggtcttgatatcctgacctcaggtgatccacccaccttggcctcccaaagtgctgggattacaggtgtgagccattgtgcccggcctcatggcttgaaattaacttattgttgtataatattggcaaaatgaaagaggttgggattcatttttttcagattgtaggaaaatgcctagtttctttctagggaagtaacaagggaagagaagcttctttgattctagttaggagaaagcagttctttcatttaatccttattttacaactactaaaagcccaagatatttcttcctatttatttatttgtttatgaggcagagtcttactctgttgcgcagactagagtgcagtgacacaaacactgctaactgcagcctcaacctcctgggctcaagtgatcctcccacctcagcctcccaagtagctggaactgcaggcatgtgcgacgacacctggctaatttttaaatttttcttgtgtaaggataaggcctcgctatgttgttgttttcaaactcctggattcaagcgatcctcccacctccacctcccaaaatgctaggattacacatgtgagctactgtgcctggccaatcctggcactttgggaggtggaggtgggaggatcacttgagctcaggagtttgagaccagccaggacaacacagcaagatctgtctctatcttaaaaaaacaaaaggccgggtgcagtggctcacgcctgtaatcccagcactttgggaggccaaggcaggcggatcacgaggtcaggagattgagaccatcctggccaacatggtgaaacaccatctctattaaaaatagaaaaactagctgggcatggtggcgcatgcttgtaatcccagctacttgggaggctgaggcaagagaatttcttgaacccaggaggtggaggttgcagtgagccgaaatcgtgccactgcactccagcctgggcgacagagccagactcaatctcaaaaaacaaacaaaaacccaagtgctgagattacaggcatgagccaccacacctagctctatttaattattttactattttaattttatttatttttttcctagacagagttttgctctgtcacccaggctggagtgcagtggccctgtcatggctcactgcagcctagacctcctgggctcaagtgatccttccgcctcggcctccagaagtgctgggattacatgcatgagccaccgcaccgtctgttttcttcctttttaacattctcctgattctacaacgcttacataggagagctgcaattcctcctcttggggtacaaatttatgagtgcaggtgcagttttgttacatgcctaacaagattgcatagtggtcaagtggacttttaaccaaatgggttgtcagggctgattgccaacatctggacattttaaattaccaatctgaaaagggaaacagctctgtgcttgttttgcattttggtgactattggtaatggttttctgttttgatatattcaatctgttcaatctgtattagtgcctactctgccactgtgttgggcgggaatctgattttgttctttggttggagatccaagttaaccagagcttaggcattttaagataactacctcagcttgataggaaagcttgctctgcccggggttgaggggtacgggtctgagggcaacagaatcgacagcctcaagtgggcaaagggtggccaaacaggagtggcctccgacgtcactgtggcgcgccgcttccggtctgcagccttgtagtggggctggagcagagcctgccgcgaacccccggagcccacgatccctcgtgccatccctcgaatccaccagcacgagcgtcccacccgcgcctgggaccatggccactgactcatgggccctggcggtggacgagcaggaagctgcggctgagtcggtgagttggcttca

SEQ ID NO: 16432 - DNA, 2300 bp, Homo sapien
agacagggtttcactgtgttagccaggctggtctcgatctcctgacctcaggtgatccacctgccttggcctcccaaagtgctgggattataggcatgagccactgcgcccggccctaatttttgtatttttagtagaggtgaggtttcgccatgttggccaggctggtctcgaactcctgacctcaggtgatccaccagccttggcctcccaaagtgctagggttataggcgtgagccaccgcccccggccctttttttgatttttaatcaacattattgaaaggtataatttatataccatgatattttaaatgcacaagttctcacacaaaaattagccaggggtggtggcgaagtgctatattcccagctgctggggagctgaggtgcgaggatcacttgagtctgggagatcaaggctgcagtgagctgtgaacgtgccactgcattccagcctaggtgacagagcaagaccctgtcacaaaaaacaaacaaaaacagttattcttccttgggaactgcttataaaaaagaaaaagcaggtcagcactgtggctcacacctgtaatcccagcactttgggcggcccaggcaggcagatccttgagctcaggagttcaaggccagcctagccaacgtggtgaaactccatctctactaaaaatacaaacattatctgggcgtggtggcgtgtgcctgtaatcccagctacttgggaggctgaggcaggagaaccgcttgaatccaggaagcagaggttgcagtgagccaagacccggccactgcactccagcctgggtgatatctgtaaataatggttccatgagtttagaaatacaaagtagcatgacttaacaaatttacacatctatgtaaccaggtcccaatcaagatacagaataattctatcacccaggaagttctcttgtgtctggaccaaacatccttctccacaggtaagctctgttagtttttatcagcatagattttatttgtcctattcttgaatctcatataaatagattatacattatgtatttggtggtccttcaacataatggccaggtgtggtggctcatgcctgtaatcccaacactttgagaggccaaggcaggaggatctctggagttagcaggagatcaaaagcagcctgagcaatataatgaagacttccgtctctgcaaaaagtttaaaaactagccaggagtggtggtgcgggcctgtgggcccagctacctgggaggctgaggtgggaggtcaagggtgcagtgagccgagatcacaccactgcattccagcctgggcgacacaatgagaccctgactcaaaaaagaaacgaaaaaacgcattgtgtgttgtgtttattggatggtggaattatggggtttacgggtcttctgttgcgttttggtttttgttttcttacctgttatcgcgttcctaacagtagaaattggcatcatatagtattctcatggaactttcctttgttcaaagccctacagttcagagacttacacatttaatgtgagatatgacaggcttaaaaagaaacgttgggggccgggcgcggtggctcacgcctgtaatcccaacactttgggaggctgaggcgggaggatcacaaggtcagcagttcgagatcagcctggccaacatggtgaaaccccatctctactaaaaatacaaaaattagccgggcgtggtggcgggcacctgtaatcccagctactcgggaggctgaggtagaatagcttgaacacggaggcggaggttgcagtgagtcgagatcccgccacggcactccagcctgggacagagcgagactccgtctcgaaaaaaaataataaaataaataataaaataaataaaataaaataaacgttggcttatttcagtgtgaagtaaggcaataaacggagggctaacagttccacttcgtagagctcagacattttaagaagcgaggaggccgcgtcctggaagggtgagcaaaaagcgcgaggtttgcgcacgaagggaaaggcgaggcccgaggagagacctggcgccgcgcagaatgatgatgtcgcacgctgggtgggaactgacgtcacctgtgctcaccgccgcttccggtccgcgtgaggtgcattctcgcgccggtggcgaggttagggcccgcgttgcgacgtggtgcagcgcatattttcacaagtgggtctcccttgtccgggactatggccaccgactcgtgggccctggcggtggacgagcaggaagcggctgtcaagtcggtcagtagctcagctcctggcg

SEQ ID NO: 16433 - DNA, 2300 bp, Homo sapien
tcagcatcctgagtaactgggactacaggagtgtaccaccaccccgcccagctaattttttttgtatttttgtagaaatggggtttcgccatgttgcccacactggtcttgaactcctgggttcaactgatctgcctgtctcagtttcccaaagtgctaggattacaggtgtgagccactgtgcccagccttcacctctttttttttttttttttttttttgagacagagtctcactcagtagcccaggctggagtgcagtggcgtaattttggctcactgcaacctccacctcccaggttcaagcaattctcatgcctcagcctcctgagtagctggtattaacaggggacgactaccacgcctggctaacttttgtatttttagtagagacagggtttcactatgttggccaggctggtatcaaactcttgacctcgagtgatctgcccgcctcggcctcccaaagtgctgggatcacaggtgggtgccatcatgcccggctgccttcaccattctatcaaatctgcccttcctcccactttcctattcctgttattgggacgttagtagtaccaataggatccaggttgaaaacagaaacctttggctttatctcccttctctcctttattatgttagcaagtcctacccattctaccttcatatcttatacccatcccttaattttcacttccactgcccaacataggccctctatctcggggctatcagaataacttctacactgatatttctattagccatcacttctaacatattctgttctctgtagttcaataaatccttgccagccttgtctaattctgtcaatagccctctcaaaaatccccataccggctgggcgcggtgactcacggctgtaatcccagcactttgggaggccgaggtgggcggatcacttgaggtcgggagttcgagaccagcctgaccaacatggagaaaccccgtctctacaaaaaatacaaaattagccgggcgtggtggcgcatgcctgtaatcccagctactcgggagactgaggcaggagaatcgcttgaacccgggaggcggaggttgcggtgagccgagatggcgccattgcactccagcctgggcaacaagagcaaaactctgcctcaaaagagaaacaactacaacaaaaaaaaagacagtccattatcactaaacaaacctaaagtttaggtcttagatataagaacagaaagccacagtgtatgctgtaattacattccagttgaatgaatattcattactgaaagaacaagtacatgaaaccgttactttacacatcaatgaaacaatttgtagtgcctccttccaacatctgcagtagattgaggtattaaatccaaaagtcaatctgttattctgcaaagagctacaaactaccaaccacgttaagcatggatctaagaaatgttaaatacagagtagtacagaaacatgcgaagaacagtcgcgtaatgaaaaagagaatcagaatctaaacttggctttccttataatcgtcaccgaggaggtcaatagaggaatgacagcatgcatagtggggcggatttaccaaaggatgaagtccttaaccagcccagatggagataaaaagctcgacattggtctctttagctctaagagcaaatcaagggcaagtgactgccctagcaaactgcaggagcgcgttgcccaggggcctccccaacccggggagctccctgtgcttttgggaggtttcgcttgggcccctgctacgtcctcctcgccaggagctgagctactgaccgacttgacagccgcttcctgctcgtccaccgccagggcccacgagtcggtggccatagtcccggacaagggagacccacttgtgaaaatatgcgctgcaccacgtcgcaacgcgggccctaacctcgccaccggcgcgagaatgcacctcacgcggaccggaagcggcggtgagcacaggtgacgtcagttcccacccagcgtgcgacatcatcattctgcgcggcgccaggtctctcctcgggcctcgcctttcccttcgtgcgcaaacctcgcgctttttgctcacccttccaggacgcggcctcctcgcttcttaaaatgtctgagctctacgaagtggaactgttagccctccgtttattgccttacttcacactgaaataagccaacgtttattttattttatttattttattatttattttattattttttttcgagacggagtctcgctctgtcccaggctggagtgccgtggcgggatctcgactcactgca

SEQ ID NO: 16434 - DNA, 2300 bp, Homo sapien
ggctcactgcaacctccgcctcctgggttcaagcaattctcctgccccagcctccagagtagctgggattaccagcgcccgccatcatgcccagctaatttttgtatttttggtacagggggtttcaccatgttgcccaggcttgtcttgaactgctgaccacaggtgatccaactgccatggcctcccaaagtactgggattacaggcatgagccactgcgcctgacgccaaaaaatactctttttttttttttttagacggtctcactatcttgcccaggctggactcaaactcctgggctcaagcaattctcctacctcaacctcccaagtaggtgggactccaggcacatggcactgtgcccagctcatctttattgctttttgttttgttaaatccaagagccagtcaagttttgcttgttgcatttagttgtcatgtctcttaagactcctaaatctagaagaatttcctcacctttattttattgcctctcattacaatgacatcttgaagcatccagggtagtcttttctttttgagatgtagttttgcttttgttgcccaggctggagtgcagtggtgcaatctcggttcaccacaacctctgcctcccgggttctagcaattctcctgcctcagccttcccgggtagctgggattacaggcatgtgccaccacacctggctaattttgtatttttagtagagacagggtttctccatattagtcaggctagtctcaaacttctgacctcaggtgatccgcccgcctcggcctcccaaagtgctgggattacaggcgtgaaccaccgtgcccggccaatctggtttttttttttttttttttttttttgaaacggaatctcgcctcttgcccaggctggagtgcaatggcatgatcttggctcactgcagcctctgcctcccgggttcaagcgattctcctccctcggcttcctgagtagctgagattacatgcacatgccaccacgcccagctaatttttgtatttttagcagagacggggtttcaccatgttggtcaggcttgtgttgaactcctgacctcgcgatcggcccacctcggcctcccgaagtgctgggattacaggcatgagccaccgcgcctggcccccagggtagtcttttactcctaggctcaagtgatccttcacttgatctcccaaattgctgtggttataggcgtgagccaccgtatcttgccccaggttaaatatttttgtggtataaattttcttttttttttcttttcttctttttttttttttttggagacaaggtcttgctccgtcacccaggctggagtgcaatggtgcaatcttggctcaccagcctcgacctctcaggtttaagcgattctcctgcctcagctccctcaagtagctgggacttacaggcctacaccaccatgcctagctaaattttttgtagagacaggtttggccatgttccccaggctggtctcgaactcctgagttcaagcgatccacgtgcctcgtcctcccaaagtgctaggagtacaggtgtgagccaccatgcccagccaggtacaaatattttcgtaagattacaagccaggtgacattgttacttcctgttgcactatatcgggtttacaattttaagaaatttagcttttagctgctaagtttcaggtacagtcttccagatcaaaaatatcttcagctgagcgtggtgcctcacacctgtactcccagccctttgggaagccaaggcaggataatgacttgagcccaggactttttagatcaccctgagtgacagcaagactgtgtctcaaaaagaaaaaatatatactcaaatactttcatttctcaattgttttttttcttccagactcgcaaaacagctagttggctggcagcagagctctcaaaagaaggccaccaggtggctctgctgagtggggagatgatggtggagcagagggctgcggtgattgagcgcttccgagagggcaaagagaaggttttggtgaccaccaacgtgtgtgcccgcggtgagcagaggacgtgtcccacctggtctgccaggctcggggtcccaggcccaattagagccagaaatccttgtatacagggaagtcggatggtctcagggagatgggtggggttggtgacactattcctttctaggagagactgtttggatttccctgaggtggtaagaactcacacatgccaggtgcggtggctcatgcctgcaatcccaaggcaggaaaattgcttgaaccctggagacagaggttgcagtga

SEQ ID NO: 16435 - DNA, 2300 bp, Homo sapien
catcatttctcacccagaataatgtccttactgcaatatgctcgttccattccctgctggctttgtggccacaaatggaggggcagctacgtttcttgaacacagagcctgagaggccttgtatgcagctgctggaagcagccaggagaccccaaaagtgggctggagacttcaacaaggacagggaacagggctgcactgagaggcccaggggctaggtcagcagcaccgctaggcagatttggaggggagctggggagaggcgaggcagccagctttgcaagattcccacggcacacagccagtgctcaggggttcccttctcagcgttcctctcacctggtgtggctccctcacgcttggcatggatctgagctcctttccttatggctgagacccaaactgcctacaagtggccttttctccctgttcttgcctgcaagggcagcatggggcctcaggctgtcagtgctaccagggacgctggcattcactttgtccataatgtacagatggatgtagacaactgccctcagggctgtccgggggcaggaccaagcccagcaaccacacctcctgacacagccaggttctcccccaacggcggagctgacaggactgttcatggttcattgagtggacccagcaatacctcatcgataatccacagtcgagagaagaggggcggtcagagaccggccagccctcccttctgattgggagaggcctctgcaggcactgacaggctccagagagtgctgtggggggcagtcagtgtccatagtcccctggaatcttctctgggctgttttctctgacttttcacctgaaattaactgtacatagctgggctaggaactctctaaatctgaaagcatgtggcttagggaaaatcacttgactcgtttaccttctggctaagaagtgaagactctgggctaatctagtcctccaggccctggagtcccacacagtgatgctatctgtgcagctagagggcagagcccttggtcatgtccaccctctgattaagtgggcatctcctctcctgctagctttggggcttggggtggggctgggacaaagcctggtgcccgtgtgattcatccgcacattatttctcctctctgccattctagggtcgtgctgcggcagcctggcgcccgacatgtgaaggggaacctgccaggggattactgtgagctcacagcaggataggctggccccgggggagtggggatgggcagaacctgggccaggagtattaggaaggagacctggaccctggtagggagctcagcacaagctcgcctgacccagatggtattggacacagtgccccgctgaacagcagctgttcccagcgccagaggaccccacagccacagtaggagctttgcgacccctacgcaactgcagctggggctggggccaccaggagaagggaccagcacctcagatgggaagcagaagggcaagacctactgcggaaaggatctcgatctctgcagcggagttttcccacactcacagagcttcctgtttttgtcctctcagggttggggtctggctcccctcctctggcagaggttttgggccaggaggtgggacaacacttgcatggaacccaagtcccctgaagcccctgtgctctctgttgtgattggagttctagggcttccccgctgccgggaacgaggggccgcctcattgtctgctcatgaaccacaaggaccccgactgctccagactggattatttcaagccgccaaagagggggacccctagagctggcagccagcaatcccaagggactagagggctgcaatggactgacctccccctcaccagggtggcaggagaggcagagcctctgtggcctagctagtgacggagagacccgatgaagccctaagcaggggccccgcctgactcagggacaggacagccactcctgccaacgtgtgttctccctacatgagggagggcgtggcaagggacccctgccactgtcccctgctgcagcacgtgcccctatgccctttgcatgtggtgccagaataggcaggctacgccgtggctggcccctcagcgggctgggaaaagagtggccacggtgaccgtcacccgcctgccggcaccatgaagtgctccctgcgggtgtggttcctctccgtggccttcctgctggtgttcatcatgtccctgctcttcacctactcgcaccacagcatggccacgctcccctacctggactcaggggccctggatgggacgcaccgggtgaagctggtgcccgg

SEQ ID NO: 16436 - DNA, 2300 bp, Homo sapien
ggcggaggctgcagtgagccaagatcacgccactgcactccagcctggtgacagagcaagactccgtctcaaaagaaaaaaaaatacttctgtacccaccacctggattacaaggtacccagtactcctgaagcctcttcagccctccttatttcatctacctctcttccccctccagaggaattccctgaattttgtgttgtttccttgattttctctattattatctttatagagaggcatagaaaatgtcttgcttagctttgcgtattttttagcttttcatggattcatgctgtgatcatttatccatgactactctttttgctcgatataatgttttttggccatattcatccctgttaatgtctgaaaccggagttcattcattttactatatggtacaaaatgcaccacaatttatccattctttttttttttttttttttttttttgagaaatagtttcgctcttgttgcccaggctagagtgcattggcacgatctcccactcctgggttcaagcgattctcctgcctcagcctcccaagtaggtgggattacaggcatgtgccaccatgcccggctaattttgtatttttagtagagatggggtttcttcacgttggtcaggctggtctcgaactcccaacctcaggtgatccacccgcctcggcctccgaaagtgctgggattacaggtgtaagccaccatgcctggtctttttttttttttttttttttttgaggcagagttttgctcttgtcgcccaggctggagtacaatggcgtgatcttggcgcactgcaacctccgcctcctgggttcaagtgattctcctgcctaagcctcctgcatagctggaattataggtggccaccacaacgcctggctgattttttgtatttttagtagagatggggtttcaccatgttggccaggctggtcttgaaatcctgacctcaggtgatacacccacctcaggctcccaaagtggtgggattataggcatgagccattgggcctgcctcctccgagctctttatattgaggtgtgcatgggcttaacaaaatgatctgagtagctgtgaaggggagcaagcccatgacgtggtgggcagctgaggggcacaggtagaaatgaactgtgagagggtcattgccaggtcatttttgggatttttagtgcatgtttgggggcctttgattttttttttagctcctccccatggctccatttgccctcaccacaacaagctgagcatcctgtatttgcagtaacacctggacctggggttcccaaagcaagggcctttgccagatgctctacttctctgctctttcctctacttctctgctctttccagacatgtcaaaaccagggattttcccctccctaacaggcagtgcagttccttcgcgtgccccctgcgttgatctagaatcccaaggagttaatgacttccctgattgagttgcttcctttggaagcctcctgtgccagctctgcccagcccccgccttcagtggccactgcggggctgcccagccagaaaccaggtctccccaggcaggacctctcgctcccatcagctgcaaagtcactgtcttccagggccacctgcctcatgactggctctcctcaggtcacaggaagctgggagcgggaccctgaaagaactcgagttctgtccttagatgttgggcatgcagcaggcaaagggagaatgagaggagacaaggacctggcttcccatctacagactgttcagccaaggccatgcctagagtgggatctgctaaatgggcacagcagaacattggaagaagcacctttgagccagtgctgctggggtctccgtggattagagccaggagccctgatgaggcctgtgggcggggcttcactttcgaccctgagaagccaactccacatctccttccctctcacccttgagccgtgggtagttcagggaggccacagccttctttctgtgccatggcctatcccaaagtcacctccactcacaacgtcgtgaccttaggtaagttcttgtacttttgtgaacatcatttctcacccagaataatgtccttactgcaatatgctcgttccattccctgctggctttgtggccacaaatggaggggcagctacgtttcttgaacacagagcctgagaggccttgtatgcagctgctggaagcagccaggagaccccaaaagtgggctggagacttcaacaaggacagggaacagggctgcactgagaggcccaggggctaggtcagcagcaccgcta

SEQ ID NO: 16437 - DNA, 2300 bp, Homo sapien
gcccagccttcttttcttttttataaagagagacagggtttttccacgttgcctaggctggtctcaaactcctaagctcagacaatctacatgcctaggcctcctaaagtgctgcgattacaggcgtgagccactgtgacccgcctctgtagaagccttttaatgtggagggaggagggtgggtaaaatcacttgtgttgagagtctgccggtgttttgtttgtttgtttgtttgtttgtttgtttttgagacggagtcttgctctgccggccaggctggagtgcagtggcgcgacgttggctcactgaaacctccatccccccggattcaagtgattctcctgcctcagcctcctgagtagctgggattacaggcgcctgccaccatgcccggctaatttttatatttttagtagagacggagtttcaccatcttggccaggctggtcttgaactcctgacctcatgatccacctgcctcagcctcccaaagtgctgggattacaggtgtgagccaccacgcctggcccttttttgtttaagacagagtctcactctgttgcccaggctggagtgcaatggcatgatctcagctcactgtaacctccaactcccagattcaagcaattctcgtgcctcagcctcccaagtagctgggattacaggcacgcactaccacacccagctaatttttgcatttttggtagagacagggttttgccatgttggtcaggctggtcttaactcctggcctcatgtgatccacctgcctcagcctcccaaagtgctggggtcgtgatgacatcactgcactccagcctgggcgacagtgagaccttgagcaaaaacaaagagcgttcctgtgctaaaggggactagactgggaccctgcctttccgggtttggctcttcagggccattattaattatcccacacaagggccatccttgaaagaggataccggtgtgttagcagcaaacaccaacagcagaggttatcaggttatcaaggtagtaaccggcagcatgagcaacacctggagacggggtagcaatgccaattctggggcctgccctagagctaaaagaaccagaagctgagggtgggggcagcaatctgcgtttaaacaagctggccaagaggatcccatacacaccaaaaattcagaaccacttcagcctcacttcagcctgttggagggcgaaactgcagtctacctggagtttcataaaggttttgaaataggtgcggaagttagggaaaggatgggctaataaaagacatggcaaatatttaaaatgcattcactttaccctcaacagcaggaagctacgggcatctaagagagagcctgcaagggggagatgccccggtggatgaggaaccaatagacactctgcccccttttcctcttttcctaggtggggaacacaaagtccagcgaggccaaacccccgctcgcaccgctgatggggtctctctcccctcaggccagggcgcagcggccccaccgcagctcgggctttcagagcccgggcgtgaagccaagctggcctcaggtcgcggctctttgagagcgcgagtgggaacagtgccctccggccgggctcgtcagcagctggccacagcagcatctgagaggcgtcctcggctagtgtgcacctccctaggaacccacgtatccaacccggctcggggccgtctgctccagccgctggagcccggccttctgagaatgaagacttcccatccccctccgtctcccctcctgcacggcggaccccctgagccctagcgaaactacaaagcccacaatccctgggatgcgcgcgctgtcttctgggagatgtagtcctggatgcggggcgcccctagcgacccagcgcccgctggactccatatcccagcatgccggcgcgcgtgcggggggcggagggagggagagacggggaggatgtgaatggggtgggggcagtcgcccctgtcccccacccttcccttcaagccgggcaggggtggggggaggggccgggctgaggcggcggcggcggcggcgctcggggagggttgggccaggcaagggcgggactagcccacggcgggcggacgagagagctgcgagctaacgggtccggacgacggcggcggcggcggcggcggcggcgacggctttctgcgcgggcggcggcggcggccggagcggcgagcatggcccgcgcggcgccgggcgctgactgaggtgcgcgggtgggatgagggcgggcgggatgcagagcgccccgggcccccggctgcccag

SEQ ID NO: 16438 - DNA, 2300 bp, Homo sapien
gttttctgcctgccttggcctcccagagtgctgggattacaggcatgagccacttcgtccggccctaatttatatatattttagagacggggtcttgctatgttgcccaggctggtctcaaactcccaagctcaagccatcctcccaccttggcctcccaaagtgttgggattacaggcgtgagcacctgtgcccagctttaggctccttattaacaacagatttggaaagtacattcttgtaagaaaaattcaaacaatacagataaagctcaagttctccccgcttgtccccatgcttagcagtctctccctagcatgcgttcgcttccagccctgttcctgtgtatccacacactatctgtccataaacattattttttatttgaggggcttcccatacatattgctctacaacttgctgcttttcccttaacatgatgtcctgaacatcactccctactgaacatatagagcatctgtcttgcatggatgtgcctagtttagttttccagttgtaaaccaaaaagcaccagatactggtctcaatcaatttacaagtttattttgccaaagttaagaatgtgtgcacctgggagacaggtctgtacctttctccaaagatgattttgagggcttcaatatttaaaggggaaaggtcagatattggggaaagaggaattttttttttttttttagacagggcctcactgtgttgcccaggctggagtgcagtggtgcaatctcagctcactgcaacctctgcctcccgggttcaagcgattctccttcctcagcctcccaagctgctgggactacaggtgcgcgccaccacgctcagctaatttttgtatttttagtagacggggtttcaccatattggccaggctggtcttcaactcccgacctcatgatccacccgcctcggcctcaccaaagggctgggactacaggtgcgagccaccgtgcctggcctgaaagaggaaatttttaaaaggcatgggtaggtaagaggcaaatggctgcattcttctgagtctttgataagcctttcacatgttagagggggatagaggactagtcacttatgcattcatctagctcagtgaatatgcatttttacataagaaaaaataaacatagggcagaggaagcaatgagatatgcatttgtctcaggtgagctgagagatgactttcagtgctgtcaaagcccagcacctgtgaagataagctataaatttacattgtcactgaaattccacacaactgttttagggtacagatttgggggcacacaaggaatttcctagtgggcaagttgtgagggccaggccatatctagcttttttatctttgtagttatcttgtttaagaataaaatgggaggtaggtttccctgatgcagttctcagcttgacttttccctttgacttagtgactttggggtcctgagatttattttcctttcacatagtaacctagagagagacactcagagtatttccaattgtcatctatgacaatcaatgctgccattcacaactttcccaaaaggtccgcagatcccctccccattacggagttggaaagtttcttcccaaaggatccacgtgatgaaaccagcgcaaacctttccaactgcaaatcgaatggcagctgcttccgcttgggcaaagcgtgatttttttttttcctccatcagtggatttttctccagaggaaagcggaagctcctggtgccgtccagaaggtgttaaaaaaaaaaaaaaaaaaaaacccaaacgagaaaacaaacaaaaaagctacacattaacctattaacctggatcccggagtcccagaaaacgggcctctgtctttaaggcgcttcggtcctctgggagttgtagtttcgtgggtcctggagcggcccccttcccatctcccttctggattgcagccccgctgcccttcaggaaagcgctgccccggccacccacgctggcctatgcggtggctccgaccgtgttttttgccggacgggggctcggccttgggggggcgcggaggtgaaactacacttcccggagtgcaccgcgagggtcgcgcagcctcgcgttaaagagcccgctccgccgagcgccgggcgacggcaggtacgtcagtccgcgagggtcgccgcagcgccccttgcgccccttgcgccccttgcgccccctcagctttccggtgcaccctccctgactgggagcaccgagtcgacccgcgggccgcccgggtcctgacagggaagagtccccgggagctctgcggtgccccg

SEQ ID NO: 16439 - DNA, 2300 bp, Homo sapien
tccaagtgcctgctcctgcagctctgagtgcatatgcgctccccacagctgcccccttctccggggaacccccatcagcttgaggagcctggggggtggggttaggcatttgctctcgccttcctttcccccttgctttgggtggccccaactcttaccccatcctgctgccctcccttcctccttcctgggcacactccctggggaaatcacacccatccacattttggaatgtcagcagacatgctgaccacgtgacccagccatccgccttggtgtccacctggggagatgaaatcttctgttcacacgaacctatctccggaggttcatagcaggactattcacatctgccaaaaactggagatggcccagatgctcttcagtgggtaaatggagaaacagatgcggcccatccatgcgagggatcactgctcctccgaaaaaaggcttgggccacagatatgtacaatgacttggatacatctcagaggcatcatgttggatgaaagaagctaatctcaaaagattatattccattttatttgacttttttttgttttgttttgttttgagggtcttgctgtgtcagccaggctggagtgcagtggagtgatcatggctcactgcagccttaacctcctgggctcaagcagtcctcccaccttggtcttccaaagtgctgggattatagacgtgagccactacacctgtcctggcctttattttattttagttaattaattagagatagggtcttattctgtgacccaggctggagtgcagtgatacagtcatagcccactacagccataatctcccaggctcaagcagtcctcccaccttagcttcctgagtagctggaactacaggcacacgccaccacgcctgcctaatttttgtatttttagtagtgaagaggttttgccatgttggccaggctggtctcgaactcctgacctcaggtgatctgtccacctcggcctcccaaagtgctggaattacagatgtaagctactatacctggcctgttcgacattttttcttttatttatttattttttttgagacggagtctccctttgtcgcccaggttggagtgcagtggcgcgatcttggcccactgcagcctccgcctcctgggttcaagcgattctcctgcttcagcctcccgagtagctgggattacaggcatgccccgccacacccggctaatttttgtatttttagtagagacggggtttcaccatgttggccaggctggtctccaactcctgacctcaggtgatccccccacctcagcctcccaaagtgctaggattgcaggcatgagcctctgcacccggccgacattttctaagttgatgaaactatagctttagagagcaaatcagtggttgtcagggcgtaggcggggaggagaggttgcatgaggaagtttttttgagtgtagatggtgataccaacacgaatctatacacatgttaaaatcatagaattgtatataaaattaattacttttagttatgatggtttaaaaaatagtcacatctacccatattgctgtctcaggaagcccctccgcttggccagaatggagcagccgaagggagttgattggacagtcatcatcctgacctgccagtacaaggacagtgtccaggtctttcagagaggtaggggactccccttcccaccttgcccctaatggagaacctccctccccttcctggctatgtccctccaacaccaggtgccaggccaacctgggttcaaacccagattgcacttctccctagccatgtgacagcatacgtggcatgtcattccttgtgccttagttttctcatctgtaagatgggagtaatatgacttctctcactaagttgggtgaagatctagtggcctcctacatggaaagctaagtcaaggaagatcaaacactgatgatcagtaggcttgcttacgtgctttgggccagggcagagagctggggggcaggtcccagtgtctcttctgaccctagaactggaagtgcggcagaagcgggagcagatccctgctgggacgctgttactggccgtggaggacccagagaagcgtgtgggcagcggaggagccaccctcaacgccctgctggtggctgctgaacacctgagtgcccgggcaggcttcactgtgagtgctcaccagggccacctccctggtctgtgtccctgctggaaccaggtcatttctgagatccccagctcctctggctccatcgccttggccaactcagcattggtctcagtttttgt

SEQ ID NO: 16440 - DNA, 2300 bp, Homo sapien
agggggcaggtgaaggcctgggccaggcaccagctgtgttctgtctccttccccccacagctgggcccgggctccccgccaggcgtgtgggtctgcagcaccgacatgctgctgtctgttcctgcaaatcctggtgagcctgagactacctgggactgccttccttcgtcacagccacagcaagaagccagctctgcccttcttgcccaccctgcctctgggcctgccccgctgccctattagacgggaagctggagggtgtggagaatgaagcctggtggaggcagggcttctcctgctgtgcctcagtctgtctgtctataggatggacagaagcagccctgccccttctgtcccacagggctctgcggaagaactttgggagaggagggttgtcattctcccaggcgaatgtccatttggcttggaaaccgtatttcccttttagaggtgcccaggtgccgcagccctgggctcttgcttccacctggtggggaaatccgtgccttgggtggaggcccctgggagcctcctgactgccccaccccacaggtatcagctgggacagcttccggggagccagagtgatcgccctcccagggagcccggcctacgctcagaatcatggcgtctacctaactgacccccaggtagtgcccctggggacagtggagccggctggggcagccttcctcctgtcagtgggcagcctcctccctgtcagtgggcagcctctcatcctggatttcctcgcatgttcctgaatccaaggagtttcctccgtggcagtggcaccagtgctcccttactctcgccaaaaatacatttcacaccgaccgcctgtccagtctctgtgcccaggctcagggctgcaaagacctttaaagcctgccctctgccatcatggagtagaaatctcaggccccccctgagaatgccagcaactgccagccttgcgtcctcagctttcctttggagaatgcccttgctgccacctgtggctgtggcctccttccagatcccttcctgctccctccgctgattctgtttctccctgcacatagggccttgttttggacatttactaccagggcactgaggcagagattcagcggtgtgtcaggcctgatgggcgggtgccactggtatggctgctgggcccaggttgcggggctttggggaccttatgggacagggagggagggtctgacttccttcgattccttctagaagcctccaggacaagctagagctagaatctgaggacagggtagccttggaattcagggtcttgtcctgagccagaaagcctagaaccaggcgggcacggtggctaacgcctgtaatcccagcactttaggaggctgaggcgggtggatcagttgaggtcaggagttcgagaccagtctgggcaacgtggtgaaaccctgtctctactaaatacaacaattagctgagcatggtggtgtgtgcctgtaatcccaactacttgagaggtagaggctcgagaatcgcttgaacccaggaggcggaggttgcggtgagcagagatcgtgccactgcacttcagccagggtgacagagcgagactctgaatcaatcccctgcccgctgtaaaacaaaacaaagcaaacctcaaaaactcaaacgaaaaaagaaagcctagaaccagaatgtgagcaagttagggagtgcggttgggaggaggcctagagccagactccgggaatgcttccatcatgaggggcaaggattggagaggcatggagatctgggagtggaccatggcgagggtggagaactgggttcaggagaaggcctgacagttgagggtgtcccagaaggtgtcttggtgggagctaccccaagtaagcctggagtctggctgctggagtggtcagaaggtgacactccctgcctggtatggcactcagcttcatgtggcccatctgcatgtgccctccctgacttgtaccagggcctggtccagggccctccatctctgatccttttggggtcccttccaggtctctggggttgtcttcttctctgtggagactgccgagcgcctcctagccacccacgtgagcccgcccctggatgcctgcacctacctaggcttggactccggagcccggcctgtccaggtgactgggggagggcagctaggtggggcctggcttgggggcgaggcactgtgtgacctcaggccagccacttcccctctctggggcagagtctccgcagacgggactgccctggttcagcctcagaacttgggggctgaacccctgccatgc

SEQ ID NO: 16441 - DNA, 2300 bp, Homo sapien
agtcccgcactgggctgggaagtccagggtgggtgggtgcctgcgtctgcccatcgagactgaattcctttctcatgcctgtccttctgcaggggccctgctgaaggcggccttcatctgtgcagggatcgtgcatgtccactcggaactccagctgagtgagcagctgctccgcaccttcgggggcggctttgagctgcacacctggtctgagctgccccacggctctggcctgggtgagcgggccctgcctcctgctacccaccgactgttacagccctccagccttgcctgtgatcccccttcctggcctctgcccttagacggagtcaggcaggcctgggcagggtggaggtgtttcatgtctgctctctcctctccgccctgcaggcaccagcagcatcctggcaggcactgccctggctgccttgcagcgagccgcaggccgggtggtgggcacggaagccctgatccacgcagtgctgcacctggagcaggtgctcaccactggtatgtgactgccctggagttggaggaggtcactgacactttcccaagggcccgcggggggagtggggctcccctggatttgcatgtgattggccaacagccacaagactgtgctgctgttggaaatactttccttctagtcactttgaccttctctggtcgttttcaacctgaaatgttctacctcccaacgagccgtttcacaagcatctactgagtgccagattctgtgctgtgccctttttttttttttgagacggagtcttgctctgtcgcccaggctggagtgcagtggtgcgatctcagctcgctgcaagctctgcctcccgggttcacgccattctcctgcctcagcctcccgagtagctgggactacaggcgcctgccaccacgcccggctaatttttttgtatttttagtagagacggggtttcaccgtgttagccaggatggtctcgatctcctgacctcgtgatccgcccgcctcggcctcccaaagtgctgggattacaggcgtgagccaccgcgcccggcctgtgctgtgcctctcatgcttgttggaaccaggtgctgtgcttcgtgactgtgcctttccagggctgtgctggggtagggctgggcagagctgctttggaccttccgcctgtcctggcatcgtgcccttacttgagatatgatcacctgtgcccccgcccccaccccctggccatatggtgggacagcaagagcccaacaatgactatgatctaatgaatgtcaccagcgccaggcttctcactcctcctggccaccgagccccctggaacccatggccagtgtagagcagctacagcttgtctggtttcaggtccacctcagggtgtcaggtcccgtctccagcacacccctggaaagaaactgctgcaaaggcctactgaagcctgactgtggtgttttctgtcactctgcagctcaagcctcacatttcactgtagtgactcatatcccataatcggtagtcattagcaaaaggagcagatggggaagcattttcagttttcttttgaggtgtaccattcaagttctacatttggccaacggaaaactatttgttgagaacccactctgtggggccccagggataaaatgagcaaaaatggggtccctgccctcaaaagtcctgtggtctcctggagacagacattaatcaataactactcaggtgcatgtgtattacaaactgtgccaagtgctttgaagcagaggggcacagttaagtcttgacatttcaagacttagccactttgcaactaccaggttttggctgcaaagttccagatggcttctgtcttttgcatttcatactttaaacccttgcaggcccttccctaactatcaagggcctgtcccagaagcaactcaagttttgttatttttaatttttttttatttttgagatggagtctagctctgtcacccagattggagtgcagtggtgcgatctcagcccactgcaacctctacctcccgggttcaagagattctcctgcctcagcctcccaggtagctgggattacaggtgcctgccaccatgcccagctaattttttgtatttttagtagagatggggtttcactgtgttggccaggctcgtcttgaactcctgacctcatgatccgcctgccttggcctcccaaagtgctgggattacaagcgtgagccaccatgcccggactagttttgttatttttatgcagctacaaggaggaaaatgatacatacctttcattactgaagatggaaagatgtgt

SEQ ID NO: 16442 - DNA, 2300 bp, Homo sapien
aaaactttctggtatttctgtttcttactcacttccccgacattggtacccccatattacagagggggaagtgggagccaagtggataaccaccaggatagaatccaggttttctgaaacccatccgggctcttgacaggccatagctggctggaggagtagaactggctggtggctcctcacactcccatggcccacgcgtgctcggtggtcttacagcagtgttctcccctagagtgactgcaccaagctcttcagccagggcattggaggggagcaggcccaggccaagtttgacagctgcctttctgacttggccgccgtgtccaacaaattccgagacctcttgcaggtaagccccaggttcaactgctgactgaatcctgtgcctgtgtgttgctctgagaagattgttagctggctcatcgtgtgcaaggaagccaggaggacgggtgagggagcagcacgcaagccctggagcctggagttgtgcaggtcccttgagactaaaggccctgttggtttctcagcagtgaagttgtcacactgacaagccaacatctggtgctctagactttgcacttggccccacaatgacaagagctctcagaagatgctcagaggaagtggagccacatggttgttctgacctagccgcaggtgctgcctaacattgagcattctgaaatctcttgtgagagtttatcagaacagtctcaaggcctcatcgttaccctggacctgaatcagctgagatctggaaaggggcatgttcctggctcctcctttcattagcactagctctgttataacctccaacagggcctgcagaaagcctcagggctggaagaacgccctgcagtcaagggatggggagaggagagagggaagggatggggagaggagaggaggatggggtggggagaggagagaaggaagggatggggagaggagaaggggatgcggtggggagaggagagagggaaggggtggggagatgagagggatggggtggggagaggagagagggaaggggtggggagaggagagagggaaggggtggggagacgagagagggatgtggtggggagaggagagagggatggggtagggagaaaagagggatggggtggggagaagagagggaaggagtggggagaggagagggaaggggtggggagaggagagggaaggggtagggagaggagagggaaggggtggggagaggagagaaggaagaaatggggagaggagagaaggaagggatggggagaggagaggaaagggatggggagaggatagagggaagggatggggagaagagagagggaagggatgagtcgtgccttctgtgtcacatgtctccaccttgtccttgtgcaggaagggctgacggagctcaacagcacagccatcaagccacaggtgcagccttggatcaacagctttttctccgtctcccacaacatcgaggaggttagcctggccacaggcagccatcaagccccgatgacccctcatccctagccccagctagagggagcagagccatctgaacagactagaccttccatgcttcccaggcccacttcccccaccctgacccatgaagactaggttcctcccaggaaacagtttgtccctagtcagaagggctcagaaagacatggagtttgccttgacctaacttattcccttattggagctctttttgccccgcctatgatagacttagaagcgtttttttcctcctggcgtagtgatttcattcctgtagaacaagagatccaagaaggaataaaatgccaggaactttaccatgttatgtgggccactgctacagccctgggctgtttgctggtcagtttctgccagcctgggtgtctgagctggttttaaactagatgagtcagaaggcacagggaaggaagaatgttttacattattttcttagagggatagaggtgggtggcaatgaatggtacttcttatgaggcccatggtgaccagccctgcttcctgacaacaggaagaattcaatgactatgaggccaacgacccttgggtacaacagttcatccttaacctggagcagcaaatggcagagttcaaggtgagcaggggccctagggatccacttagggaattacccacgtcagcccaaaccagcagcctgcagggtctcatcacattccttctggggaccctgaaagcccttccaaccctcacctgtagaaactcccccgtggcctcacgctactatcctcaccacctaagactccagcatagaggcagaggag

SEQ ID NO: 16443 - DNA, 2300 bp, Homo sapien
actcatcgctacttgtgcctggacaagtcggtcattgagctcagccgacagggcaaagagggtcagcatccgaaactgttggtttttagtttagttaaaatcatctgtaatctgaagtaagcagactcgaccaataaaaacacatcagtttttaggaagttttcttttttctttttcttctttttttttgagacggagtcttgctcttgtcaggatagggtgcagtggtgccatcttggcttactgcaacctccgccttctgggttcaagcgattctcctgcctcagcctcctgagtagctgggactacaggtgcacaccaccacacctcactaatgttttttgtatttttagtagagatggggtttcaccatgtggacagagtggtcttgaactcctgatctctggtgatctgcccgccttggcctcccaaagtgctgggattacaggtgtaagctactgcgcccagccaggaagttttcttgtctggtaataggccatacgtaggtcctgtaccatcctggggcaggctttgttaaagcagtctcccctatgtgtggtttcactttctgccatttcagttacctgcagcttcagttattcatggtcaaccttagtccaaaaatattaaggaaaaattccagaaataaacatcttactagttttaaattgcttgctgttctaagtagtgtgataaaatcttgtaccaccctgtctgtcccttcatcacaagaagggtaagtacagtacagtaagatattttaagagagaggccacatttgcataactttatcatggtatgttgttatatcttattatatattattgttaatctcttactatgtctaatttacaaattaaactttatcgtaggtatgtatgtatgggagaaaacatagtatatttaaggttcagtactgtcgatggtttcaggcatccataacggtcttggaatggatcccctacagataagaagagactactgtattcccattttatggaaaaggaaactgaatccagatctactgattctctggccagcgggttctttgcacttggccatattgcctactcataaaatgaaattcttagcctgatattttagatcttccatgatctttacacactctgtttttctagacttgtttaatgttattcacttatgcatccactcattgtgcaagtatttctcaagctcctccatatgccaaggaatatgctacttggaatactctgcaaatattcttttcatctttctgcttctattcatgtctttcattccctttgcctggaatgtttgttctcctgtgcaggtatcagaatcctgcccatctttgagaggtgggatgtcaccttctctaggaagccttttctgattactttaaccagaaatgtgactttttgacacctttcttttttttgagacggagtctcactcttttgccggctggagtgcagtggcatgatcttggctcactgcaacctctgcctcccaggttcaagggattcttctgcctcagcctcctgagtaactgggactacaggcgcatgccaccatgcccagctaatttttctatttttagtagaggcagggtttcaccatgttggccaggatggtctcaatcccttgaccttgtgattcagccatctcggccttccaaagtgctgggattacaggcatgagccaccgtgcccggactttggcacctttcttatgacacatcatgtactgtatttcatcatcttgatttgtgcacaaactatctcttctacctgatcctaacttctgtgatggtaggatcagggctgattcatcttgtaatcatgcatattactagcacagcatcttgcacatggtaagtgcttaatacgtatttgctggatgaatagtattacacaaagtggcatggacctgccacagtactattctttacttgaattttcattttctccctgttgagcagggagcatgattgatgccaacctgaaattgctgcaggaagctgagcaacgtctcaaagccattgtggcagagaagtttgccattgccaccaaggaaggtgatctgccccaggtggagcgcttcttcaagatcttcccactgctgggtttgcatgaggagggattaagaaagttctcggagtacctttgcaagcaggtatggaccctgattgcttggcaggataattgtgtggctgtctgcctgcagattggggcactggatggatccagtttctgtggatactttctctcttctggatatgactccccttcctgcccttgctgtgtagccatgcagga

SEQ ID NO: 16444 - DNA, 2300 bp, Homo sapien
gctaacaccgtgaaaccccatctgtactaaaaatacaaaaaattagccagtggtggtgacaggctcctgtagtcccagctactcaggagtctgaggcaggagaatagcgtgaacccagaaggcagagcttacagtgagccgagatggcgcctctgcactccagcctgggcgacagagagattctgtctcaaaaaaaaaaaaaaatttaactcaacaaaaccctagtaaagcaagtctagcaatatataaagaggattatatactatgaccaagtggaatttatcctaggaacacaaggttgatttaacatctgaaaatcaattaaaagtagtggccaagaccgcaattacttttgcaccatcctaataatacaccatattaatagaaaaaaggacaaaaaacacatgatcacctcatagactcagaagaaaacatttaacaaaattcaatatcctttcgtggtagaaacactcaacaaatttggaatagaggggaacttctcagcctgataaagagcatctgtgaaaaaccacagctggccaggtgtggtggctcatgcctgcaatcctaacactttgggagaccaaagcagtaggatctcttgaggccagaagttggagaccaaaccttggaacacagtaagaccctgtcctacaaaaattttttaaaaaaacaaccctcagctaatatcatacttactggtgaaacgtgtgattctttccccctaagatgaggaacaagacaagggtgtcttctcttactatgtctctagaacaagcaagcatgttttatttatttattgattgattgattgattgattttgagacagagtctcactctgttgcccaggctggagtgcaatggcttgatctcagcgtgtgcaacctccacctcctgggttcaagcaattctcctgtctcagcctcccgagtagctgggattacaggcatgcgccaccaggcctggctaatttttgtatttttagtagagatggggtttcaccatgttggtcaggctggtctcaaactcctgacctcgtgatccacccacctcggcttccgaaagtgctgggattacaggcgtgagccaccacgcctggcgcaagcatgttctaaaaaaaccttaatagtgagttggtggctgtatggttctatccagggcaattaggtaagaaaatgaagtaggccaggcgtgctggcttactcctgtaatctcagcactttgggaggccgaggagaatgaattgcttgagctcaagagttcagggccagcctgggtttgggcaacatggcaaaaccttgtctctacaaaaattacaaaaattagcaggttgtggttgtgtgcacatgtaatcccaggtatttgggaggctgaggtgggaggattgcttgaacccaggaggcagaggttgcagtgagccaagattgcaccactgtactctagcctgggcaacagagtgagactctgtctcaagaagaaaaaaaaaaaaaaagttgggctctgtgactcagacctgtaatcccagcactttgggaagccaaggcaggcggatagcttgagctcaggagtttgagaccagcctgggaaacattgatgaaaccctgcctctacaaaaaatacaaaaactagccaggcatggtggcacatgcctgtgatcccagctagttgggaggctgaggtggaggatagcttaggcccaggaggcagaggttacagtgagccatgattgcgccactgcactccagcctgggtaacagagtgagactctgtctaaaaaaaaagagagaatgatttgatcacgttattaacattgtatgatatctgtcaatggtcttgatcatcatcaataacagttgcgttaacagtagtggtggtgtttgtgagattgctattgacatatggttgatcagattcagctcctgaatctccctaccttcttgaggggtgtttttgaaagaataggacattgtttgtaagtaccaaatctttttgcagaaccgcctctatcaggccattcagagagctgatgacatcttggacctgaagttctgcatggatggagttcagactgctttgaggagtgaagattatgagcaggctgcagcacatactcatcgctacttgtgcctggacaagtcggtcattgagctcagccgacagggcaaagagggtcagcatccgaaactgttggtttttagtttagttaaaatcatctgtaatctgaagtaagcagactcgaccaataaaaacacatcagtttttaggaagttttcttttttctttttcttctttttttttg

SEQ ID NO: 16445 - DNA, 2300 bp, Homo sapien
aattttttttttttttttttttgagacagagtctcactctgtcgccgaggctggagtgcagtggtgcgatctcggctcactgcaagctccttctccctggttcacgccattctcctgcctcagcctcccgagtagctgggactacaggcgcccgccaccacgcccggctaattttttgtatttttagtagagacggggtttcactgtgttagccaggatggtctcgatttcctgacctcgtgatccatctgcctcagcctcccaaagtgctggggttacaggagtgagccaccgcgccaggctttttttttttttaagagacacaattttgctcttgttgcccaggctagagtgtaatggcgctatcttggttcactgcaacctccgcctcccaggttcaagcaattctcctgcctcagcctcccgagtagctgggattacaggcatgcgtcaccacacccggctagttttgtatttttagtagtgatggttttcaccattttggtcatgctggtctcgaactcctgactcaggtgatcctcccgtcttggcctcccaaagtgctgggatggcaggcgtgagccaccgcgccccgcaagatactaaattttaaaacacatcttgctgaggccagacaaaaaaagccccacacactaaactagccaggcacggtggtgtgcgcctctggtttcatccattctgattgcagcacaacagcactccagcctgcgcaacagagagcggccctgtttctaaaaataacaaaacaaaacaaaaaacaccacacacatcttgctgaaaaacgtatcagaaactgctagagttagtgcaagtttatacttgaaaatactcaaagatatcaacgatcacctctccctcaggctgaaactgccttttgtgctcaactttgctagaagtttggtctgggaaacagctgacaagcttagagcttagatctcttttgactagcaaggaacccaactgacattcgaaagtgaattgacagcatcgagttgccactgaaaattaaaggaggcaggaaatagaacgttatgaactgaaaggaattggagaatagtccacacccctcatttgataaaatatcaagggtaccagagatgaagtgacttgtccaagattagagaattgtgtctgagtcttaaaagctaaacctctacaaagatgtgcatttgaccaaaacgctaaaatcacacccccaaatcactccccacaagaggaagtcttaaaacgcttcaagaagttaatctgcaaaggcttccctcttaaataacaggatgagagcgtttcataatttgtaaattaagccaatgcaaaagggcgcttattattttgagaaccaagcaatttggcaaatactctcagactaactttactcccgtggagaaactggtgatcatggatcagggaaatcaacgggggtctagggaggagaggctgcagatcgcccaggtatcagggaagacaagctcggcgcgtccgacagcgtgaaaagagttgacaggactactcatatacccgactagcttccgcttctttgttttcccgcttttttgtatcccccagcaaggagagtttcccacagcccggatttcccgactgaaggctcccactctccctagatcctccatgaaaaagaagaggctcgaccccgcacctcctcgccgcagagccgttcgtatacagcctccagctcctgcagctctgtcagggagcgaatgagctcagcggagatttcggagcagcggccacctcccaccccctcagacggctgctgcacccctgacagcttcggaggcgaatcaaggtccgccatcttggtccccattcggcacttccggtcccgcgaggccccctcttcgttggcgcctatttggggctgcccacagaagtgcccaatgaactctaatggttttttttttttaaagtctacttctaaaaacgtattaattttctattctcctggaaaaagcaaagcaataaagcatgtttaaataatttgtaatgccgtgtggaagcaagacggaagcattttttaaaaattatatatattcttcaggcgcggattgggtgcctttttccgccgcgcgccaccagaatgtccctgtcttgaggtctaatggcggacgccagtatgttggagttggtggtggcttaagttttgaagggaggtagcatccgttggatatccacaccatccttctcgctgcagggtaaaaaaacagcctggagacttccccgggcccggggaggcggagaccggccatatggaagggggaccc

SEQ ID NO: 16446 - DNA, 2300 bp, Homo sapien
ggaccacagtaaaacatgaacgaaaaggaccgatgttgaaagaccagggagtggagaaacaacaaaaaaagcaaaagagaggaagctaggagctgcttctgaatccctgaacagctccccgcaagttacttttcatattttgtagctgatcaaaacagtctactttcccctttccttataactgatacaatccattacaaacctttggaattcattttttcccaaatctagttggattcaggttctccagcgacaccttaactttggatcgtggaggaaggtgcatttcggaggatcagtccagtactagaaaaactatatacgaggccaggcgcagtggtggctcacgcctgtaatcccagcactttgggaggccgaggcaaatgggtcacttgaggtcaggaattgagaccagcctggccaacacagtgaaaacccctctactaaaaatgcaaaaactagccgggcgcggtggcacacgcctttaatctcagctactcgggaagctgaggcgtgagaatagctagaaccaaggaggaggaggctgcagtaagccgagatcaagccgctgcgctccagcctgggcgacagcgagacttcgtctcaaaaacaaaacaaacaaacaaaaaatacataccagataaatttggtaagctttaaaacttcccccacgtctgggccgggcgcggtgtctcacacctgtaatcccaacactttgggaggccaaggcgggtggatcaaggtcaggagatcgagaccatcctggctaacacagtgaaaccccgtctctactaaaaatacaaaaaattagctgggcgcggtggcgggcgcctgtagttccagctactcgtgaggctgaggcaggagaatggcgtgaacccggaaagcggagcttgcagtgagcagagatcgcgccactgcactccagcctgggcgacaaagcgagacaccgtctcaaaaaaagaaaaattagccgggcgtggtggcacgcgcccgtaatcccagctagtctactcgggaggctgaggtaagagaatcgctggaacccgggaggcagagatggcagtgagccgagatcgcgccactgctctccagtctgggcgacagactgtgactccgtcacaaaaacaaaacaaaacaaaacaaaaaaaacttcccccacgtctgtttaccattattacaaaaagcttgtatgattgctcactgcatcttctccatcctccaaggaaacatcatcgcatttaaactctgtcctccattacgcaaacgagaaaatagaggttcagaggaggagacaagttgcccaactaccaaaatacaaattcaaaccggagtcttggctctaaagactgtttccgttatttacgcttttaacacgctccatctttctatcttcccctcggtgtaccatttactctacccagagggagacatccatgcctcccgctgcttgtcacacctcccccgtctcagagtccccagaagttaaaagcaatctccacgagccctattttgagatagaatatgttcccacactgtggatggaagcgagagataactgcaggaagccgttttggcgcctcaaccatccctcggtacctcctcctggtccccagcctctcgggcctagactgcccgtgacccccgccaaagtctcgggtcccccttccatatggccggtctccgcctccccgggcccggggaagtctccaggctgtttttttaccctgcagcgagaaggatggtgtggatatccaacggatgctacctcccttcaaaacttaagccaccaccaactccaacatactggcgtccgccattagacctcaagacagggacattctggtggcgcgcggcggaaaaaggcacccaatccgcgcctgaagaatatatataatttttaaaaaatgcttccgtcttgcttccacacggcattacaaattatttaaacatgctttattgctttgctttttccaggagaatagaaaattaatacgtttttagaagtagactttaaaaaaaaaaaaccattagagttcattgggcacttctgtgggcagccccaaataggcgccaacgaagagggggcctcgcgggaccggaagtgccgaatggggaccaagatggcggaccttgattcgcctccgaagctgtcaggggtgcagcagccgtctgagggggtgggaggtggccgctgctccgaaatctccgctgagctcattcgctccctgacagagctgcaggagctggaggctgtatacgaacggctctgcggcgaggaggtgcggggtcgagcctct

SEQ ID NO: 16447 - DNA, 2300 bp, Homo sapien
atgtagccaggattacaggcatgcactgccacacctggctaaattttttttgtatttttattttttgtattttatttatttatttatttgagacggagtctcgctctgtcacccaggctagagtgtagtggtgcgatctgggctcactgcaagctccgcctcccgggttcacgccatttctcctgcctcagcctctcgggtagctgggactacaggcgcccaccaccacgcccggctaatttttttttttttgtatttttagtaaagattgggtttcaccgtgatctcaatttcctgacctcgtgatctgcccgcctcggcctcccaaagtgctgggattacaggcgtgagccaccgcacccggccttttttgtatttttaatagagacggggtttgccatgttggccattctcgtcccaaactcctgacctcaagtcatctgcctgccttggcctcccaaggtgctggggttacaggcatgaagtgccctgccagtctgggctaattttctttctttttttttttttttttttttaagatggtgtcttgctctgttgcccaggctggagtgcagtggcgcaatcttggctcactgcatccttgacctcccagtctcaagtgatccttccatctcagcctcccaagtagctgggactacaggcacctgttaccatgcccagctaatttttatatttttagtagagatggggtctcaccatattggccaggctggtatcgaactcgtgaccttgtgatctgcctgcctcagcctcccaaagtgttgggattacaggcgtgagccactgcgcctggccagctaattctcttatagtctgtcccatagtttgtttcctcatgattatattgagtttaatatttctgatataattactacatagggagtgatgtataagtgatacatattctccactatgtcacacattgtgtgtacataatgttggtttatctgattgagacattaaattggtcactttgttaaggtggtgcctgcccattgtcttcattgtaacggtattgtttcttttttggtaactgataatggaatttgatggtgatctttgagactaatgaatatccctcttcctgagactagtgaatatccctcttccccggcgtcttttcacctggtggttttggtgtggattctttgaatcatttactgccatctctcccctcaatcccctggattatttatttgctgttaaatatttatctgttctggggttgaactttaggatttaatttaatgtaatatgtagtacgtaagattccagcaattttagaaaaccttagaagaaatttggcaagttaaattcttcttgttaagggataggaagtcactaagttgattagacattgagcacctaactgtgccaggcactgtatttggctttgcaataacaaagtctaaaacttcttgcagagcagagcttactcggtgggagaaatagaaactgttggaaacgttaaaaaacgcaaggcaggtgcagtgatgtgcctctgatccccagctacttgagaggctgaggcgggaggatcccttgagcccaggagttagagaccagtctgggcaacatagtgagaccttgtctttaaaagaaaaaaaattcaaagtcatacctaaggaggtgccttttaggaatcaggcatttgatgtagaacagggtaatttggatggagcagtgtttcacagcctgaaatgatgactctttaaaaaatttcatgtctcttctctgacatttttctctggacacagtttttgccttatgaatctgatcaggctgtagagtggaattgggactcttttggttacccagattttattagatatttatattagaattttgagctgtggggttccagtgctctggctggcaggacactgtggatcaaagcttgtgcctttaggcctttaatgtcatttgtaatccctattggtaaagtgctgaattccagaactaagaagtacccatttctaagacattgattgtgtttttgactttgctagaatgacctggatgaccctgaaagaggaatgatttttgtctgctctgcaacccataaaaccaaatcgatgttcttctttttggctcaaactgagcagggagatatctttaagatcactttggagacagatgaagatatggtaagtagaccatggatggaccagtatagctactctatgagatgagataggcaagacaggtaatactttacaagttaaaaaaatgagaacttagaaagtagttgcccttggaaccggtatatgagtatagat

SEQ ID NO: 16448 - DNA, 2300 bp, Homo sapien
acacaacaaaaatttccagtacaaaaactgagaactggagtaaaggttccaaacttggtgttatgtagagatggattttggttttgttgaaagctactgagacatccatttcagagataaccatgtccttacttgttttatgatagtgagtagtgcttagtcttacaaagccatcttataagacgttcccaaagcatttgatatatgttgacagttctagcaaaataaccaaaaaccaagtatctagcttcttgtcctgtattattccttatgatttggaaattgaacctttactctgtggattcctggtctaaccattagagcatgcccattgggaaagatctttaatccttgtttttcagccaccacagtaggtacatatatatgcaatattaactgaaacaaaagtttcacaaaacagtaattatcctactatatatgaagcaacttcataaattacatttatttctgttatgaagtgcctattgtgcaacacattaaattgattttacgtcctgctaatagggcagaacactactgtaggccatgccaatgatacatcttttttgtttgttttgagacagtctcattctgtcacccagattggagtgcagtggggcgatctcggctcactgcggcctccgcctcccgggttcaggcaattctgctcagcctcccgagtagttggaattacaggcgcccaccaccacacccagctaatttttgtattttattttatttattttttagtagagatggggtttcaccctgttggtcaggctggtttctaactcctgatctcaggtgatctacccaccttggcctcccaaagtgctgggattacaggcatgagccatcatgcctggtcgaatgatacatcttcatttgacccctgcttctgtaaagaatgctgattctgcagaactgatctagtaaccttaatctagctgaacctcatttgaagtcatcagaaccaaaagtatgcccttcatgtgggtgggtgggtggaccagccctgtggcattgagctcttgacaagtgcttaggcagacgggtcctatagctgctactgctaggagtgagtcagccactacattgtgtggtgccttgtcttgttctgtcctttttttttaacctgatttctggttaagggggtgttaaaacaaaaattcaaatgtaaactaggaaaatctcaactcttttaaaaaattagcatgcctttagtcaacatttatcaagctttacgccaaacgtactggatggggacacttgcagaagctgttgtatgttgtagggtgagatacatggaaaatagatggcctttatgggatctgtagaagaaactgagggtttctggtatacctcaagtcctctgacttccttgagaaactcattagtgtttattcaactacatttaattagaaaaagcaaattctaataggattgctcatgaccacaggattgttctgtttctaaatagtgaaaaaccagagaggtcacagaataacaatataaacaacccccaccctccatttcctggttatctagttttcttacatcattcccattgggactaggattctcagcttccaaccctagaatgagttagtctcacagaggcttaagtaatctctattttattcattagagcttgtgttcatttctacataagctgcttttggaagaagttaggggtctttcctagttagaaggagtatctcttcttaggaaggggttgtgtgattgacaactggcacaaataaatgaagctctagctcagtatgttcatgtatcaatattgtagtatttaaaatgtcctcatgtctccgattctcttgctttgtcctctcacttctttagcagatgtctcaagaaaatattgaggaagcagagtatatctgtaggctcttctgacccctagttttcttctggatcattttgctctgtgtgcatgtgtatgtgtgtatgtgtgtaataactacacatagaagaactgccttggaaggtttctgaagagaactcttagtgtttcatttggctttgtaattctaatgagttcttatctaaccaactcccttcttttctttttcagatgagtttgatgcctacatcattgtgtctttcgtgaatgccaccctagtgttgtccattggagaaactgtagaagaagtgactgactctgggttcctggggaccaccccgaccttgtcctgctccttattaggagatgatgccttggtgcaggtgagggttctcagagcttacctacttggcctgctttgttctttcttggccttcat

SEQ ID NO: 16449 - DNA, 2300 bp, Homo sapien
gggactgtaggcgcatgccatcatgcctggctaatttttgtgttctattttatagagacaggatttcaccttggtgcccaggctggtcttgagctcctgggctcaagagattctcccacctcagcctcccaagtagctgggactacaggcgtgcgccaccatacatggctttttttttggtattttcaacagagttggtgtttcaccatgttacccaggcttgtcttgaactcctagccttaggtgatctgcctgctttggcctcccaaagtgctgagattacaggcgtgagccaccacacgcagcccctatcttttttaatgtagagaataaactacaaataaaactccatcattagagatcgggtaactatacttttcagagtacctgggttctgctcattttgcacatagtttggcttatgtgtacatctctgtcccatttgacagaaatttgtaggtcccttatttgctgtctcttgcattgtcatagttttcctgaactgaggtgatttttgttcacaaaggtatccactttattttatgaagcacagtcactacaaataccatatatgtttaggtaattgcagtgtttcacaacaaatttgggattgggctctttattatcattggagtgattaaaaaaaaacttttgacaatcgtttgtgtttcattggtaggaactagaactgctgtgaattgtggtagggtgttgccaaatgggaaggcccttcctggatctctgtgtctgcatcgcagagttttctagagtaggaggctgttgtttaatgttgcctaatgccaacgttagagctccagggattgacgtgtttgctgactgctcaaagtctatttcaacaccagtttctgggtccgagtgagtattaaataactgccttgcttttttgtcataggattttggcattagagaagctcggtgctgtcttcaatcaagtagccttcccactgcagtacacacccaggaaatttgtcatccaccctgagagtaacaaccttattatcattgaaacggaccacaatgcctacactgaggccacgaaagctcagagaaagcagcagatggcagaggtaatgagactaacgttcaggggttctattaaaagatgtgtgaaattatgttgaaaagtttaaactgcccggcactttgggaggctgaggtgggaggattgcttgaggccactagttcgagaccagcctgggcaacatagcaaaactgcacctctattaaaaattttaaaagatagcctggtgtgttggtgcactcctgtagtcccagctacttgggaggctgaggcaggaggatcacttgagcccaggagttcaagactgcagtgagccatgatcatgccactgcataccagtggcactctggacacgagactctatcaaaagtttaaactcctgtaattgttagtatattctttgtttttaaagatctaggcttttttcagcttttttaagcagaggcctttgccccaaagtacttcattttagagcctttcttgtaacccaggactatactctgacctccatttattcacaattaagttccctctctgaaacagaattctcccgtccttgagcttccaaaatagactgtatttcctttatttgggcccaaaagagacagctttcatgttctccacaacaccagctctttctagaactcattgcctagcagaaaccaaatagctacaaccacgtagaactgtatccatccttaaagagtggagacagagtagttttagtaagggaaatcagatgggttggatagaaaagtggagtttccgttgtcatttttctcaagccactagtccaatatttgtcacagctattgttatttttggtgttttctactaatatgtaaccagcaatgtctggatttccctttctgatcttctgtcttccctagtctgtacacctctccctttaatagtcatgtcgggaaatcctggctgggatggctgactttgctgctttatgtattgagaaccccctggagtgttcttgctacctatcctcttctcagccagcccctacctctgagcacgccaactcagttactcgtttttttgggtttaggaaatggtggaagcagcaggggaggatgagcgggagctggccgcagagatggcagcagcattcctcaatgaaaacctccctgaatccatctttggagctcccaaggctggcaatgggcagtgggcctctgtgatccgagtgatgaatcccattcaagggaacacactggaccttgtccagctggaacagaatgaggca

SEQ ID NO: 16450 - DNA, 2300 bp, Homo sapien
tgaattttttgggtagatggaaatgttttgtatcttgattattatagtaattacacagctctataaatgtgctaaaaacttttagaaatgtatactgaaaagggtaaaatgtagtatatgtaaattagccctcaataaacctgaaaaaaatccccaaactaatgacaactaaatgttctagatacgttagtgtttgtagtgatgctgtaacagcaggggaattgccagggtgaggaggaggaggagggggaggaggagggggagggggaagaggaagaggaggagggaggagggaggaaaaggaggagggaggagggaggaaaaggaggagggaggaggaatgaaaaggaggaagggaggaggaaggaggaagaggaaggagggaagaggaggaagaggaggaagtaggaagaggaaggaggtggaagaggaaggaggaagaggagggaggagaaggaggaggaaggaggaagaggaggaaggaggaagaggaggaggaaggaggaagagaaagggagtaggaggaaggaggaagaagaggaagaggaggaaggaggagaaggaaaaaggaaggaggacgaggaaggaggaagagaaggaaggagaaaggaagagggaagagtaggaaggaggagggggaaagaggaggaagaagagggaggaaggaggaagacgaggaaggaggaggaggaagagaaggaggaagaggaaggaggaaaaggaggaaggacaaggaaaagaggagcagcagcaggcagcgactggggctgagattcagggtgactgcataagggattaacttgaacaacccgtgttctctctataaggccctgcctgcctgctgggcacctcttagggtaagggccagcattctttggtgacaccatggatcacacaatgaagaagatgcccaagtcatacctgctctcccccgatggtgtcactctgtagccattttcccccaccagaggggagacagggaggaggcgaggggatggaagagaactaaatcagagacggaattccagcctgatctgcagagcagacacaatggtccagaccttgcagagtccagaggggcagatgggaggaccacgcacacacgctgagccctgtgtggttgtcgaattttgggagcagccaccagcccacagggtttgaattcctgtcacacttcttacaagccgtatgaccttggacaagtgtcttaacctttctgggcctcagtttcctcattgataaactgagattttgcacttccatgagattgttgtgagagattcagtgaatgtaaagaccttagtcctggccgggtgcggtggctcacgcctgtaatcccagcactttgggaggccaagacagcagatcacttgagtccaggagtttgagactagcctggccaacatggtgaaaccccatctctactaaaaatacaaaaattagccaggcatggtagtgcacatctgtaatcccagctacttgggaggctgaagcaggagaattgcttgaaccctggaggtggaggctgcagtgagccaaaatcacgccactgcactacagcctggatgacagagtctgagactccgtctcaaaaaaattttttttttcttaattttttttttattaatagaactgaggtcttactatgctgaccaggctggtctcgaactcctgggctcacgcaatcctcccaccttggcctcccaaagtgctgggattacaagcatgagccattgcgtccggcttgttttcggagtgggagctcgtctgcttttttaacctgtcctttagcctgagtcattcatggactctaccatggctctcgatgtgtgaactcaaaccacctgttcattccttggtcctgcttttgttcaggccccaggctgccagctggtgtcatcataactcactcatgggccagggccgttcggacatcctgaagtcatttctcacgtgagccgtgtccagctgccagggccgggtggtcctgtgcaggccgtgggtgcggtgtgcgctgtggctgatggctgagtggcagcgctgctcttacataatcagtttctctcctcctttctcttcctagagccagatttcacactgagcagctgcagtcggagaaatcagagaaagcgtcacccagccccagattccgaggggcctgccagggactctctcctcctgctccttggaaaggaagaccccgaaagacccccaagccaccggctcagacctgcttctgggctgccatgggacttgcggccaccgccccccggctgtcctccacgctgccgggcagataa

SEQ ID NO: 16451 - DNA, 2300 bp, Homo sapien
ctccttcccacccctgcaagctctcctagtctggcagggcaagccctagcctgctcctgggttgcagccaggcagagcctccctctgaggccctgagggccagggtctccgcattcccctttcctcaggaagagccccagcctccatcgccccatcctacatggaagggagggtcagaagcccctgtgggctggggcttggctggcccagggctgcccgtcaaggggcaaaacctccacagggcccttgggccagggctgaggtttctccaggaccccggggcatgcgttaaccagaaaagccccaaaatcagattggacaactcggtggccaggagcccgacctccctattgggaaaccccctcccaacttggagccttgggccaggctgggataaaggccacactgtttccccaggaggggaggggagcagggggtggagaaaggtggctctgttggccgcacaaggccccattcagcccagggcctggttgtcccaggcaggctagctgggccctgcagcagccacagcctcctcggccctgggagccactgctgctggcctgggatggcagcttccaggacacagggcaggggccccggaggccccagtctacacctggtgtgccttcagccctgccaccccctaccctccacactgtgcctctgcccctggtgggcaggtcagtgccagtgtcctaggcacatgtccgggagacacgatgcctctcattgggctcagcccagatcccctgccaggcccctgggaaaccccgaggggacaggacctgccacttcctgctccatttcccctgagggaggatgtgagccccctgtagcctgtagggtggatgtcctgatgtcagggagggagggcttggcaaaggcgcccgttcccagggacaggctttcctcatgctgatggctctgtccttggtcctctgccctccgagaggacccagagcctccctctccatggggcagggctgctgtcttagaaactgccccaagtctggatggagcatgcagggagcccggcccaggtcaagccctgcaaccaccccacaagaagctcactttctctcccatttgcccggcagagctcctaccctatctgggaggacttcaactccaaggccacgaagctgcattcccagctgaggtgaggtggcccagggcaccccagcaggggaggggcaggcagaggccccccccccgcccaaccaccgaccatccatgccgttgtccctctccccaggaccaccgtgctggctgctgtggccttcctggatgccttccagaaagtggctgacatggctaccaacacccgaggtggggaggcgcgtggctggaggttggggttgccccagggtgggcctggaggctggaaaggaagagtaggggatgggccagggaaaggacgggacgccaagcccagaaccttgagttctgctccttagtggagtgggctggttgtggagagagtgagcccctcgtcacaagaggcatgcaagcaggagtgggtaagtagtgacaggagtgttccccggggattccctttttgctgtgggctgttcatgtgaccccccagcacagagattctccttagggcttcttcccactcatgccctcgtgtccttctaagagcacgcagggtcaggtgagcgcgccgttgggcttggcgccgcctctgccctctggtccgagtggcagagacctggggctcccgctccttcgggccctgggcgtgctcacactcccgcacctgcatctgggcacacctggagggtcgtttggccggctcctggaacggtctttggcgccggcctctcccagctgggagagaggggaggccgccgcaggaggctggcgcggctgggatggcggaggaagagctggtggagatggaggaggccccgaatcccccagggccggcgggactgcggctcggcgggggcagggcgcgggctgcgggctccgcctgcgcggccggggcgccccctcctggcccgaggccgggactgcgcaggccccagcgggccccttcccaccccgcgcttgcctcgccaggggccacgagggacatcggctcggcgctcacacgcatgtgcatgcgccaccgcagcatcgagaccaagctgcggcagttcaccaagtgagtgggcgctgcgggcgggcaggggggcggggggacggggcgtcgcgggggagcccggccctgacctgcgctcccgcccgccctccgcagcgcactgctggagagcctcatcaacccgctgcaggagcgcatcgaggactgg

SEQ ID NO: 16452 - DNA, 2300 bp, Homo sapien
catgaaacactaagggtcgtcacgccctcccgaggagctcaaggacctgcctgtcaggaccagggctgggcctgccaacccagggcagtgttggggccggaggctgctgtgtctgcccaagctcctctcagagtccagtccccaggcctccagcgctgtcagctgcaccctggcattctcacagagctggctgcccacccagtggggggctatagcctcagagaccactcatcctctggaatcaacctctttctaataccctcttggaaaaagagcttgcccctcctccagcacactagagctctggccttgtgtgtatatgtatacatacgtgaacacatgcctgtgtgtgtgtgtgtgtgtgtgtacttgtatgcacgtaggcaccagcacaaagatctgaatgatgcaccccacccccaccccaataaagaaataacagaaaaccctcaacccgagccggcctgctccttcccagctgacacgtgcagctgtccgggggcctcaccctctgtcctggagatcgggtttcatgatggccccaaggagtactggctgccccagggcctggtccctgcactcacctgagtggagccatgggcctagagcctaggtccccacctctggaacctgcaccctcctggagagcaccatgcactgcctgccctggaatcctgaaccctgccttccccaatctgcctttctcatcctgactccctggggcaatgggagttccccactggggacatgggagctgagccccaggagttcctggatgaaagggcaatgcacactgcagaacactttgcagatctcggggcaaggggaggaaaagcccagagcagtccagggaggggcaggtgccccaaccactgctgcagctgaaagcccttcctcaccgggagtggtaccacctgtccccaggctttgggaaccctgggcttggtctcctaatgagcttgtaattggctccctccggcccatggagtaggcgagaaggagcttgtgcctgctcttccccagagtgcgctcccccatcgtgctgccccccagggtgggtttccctgcctggagtctccaggacaggctgcgattgacattgctaccccatgcacgtgtgtgcatcgcacccaccgtggactcaggcagcagagaccaaggacactccagctctgctctgcaggtccgacattagcccccacccgcgaagaaggaggttgttcaaggcccaggagactaccactgccccccaaatgcccagccttgggcaccccatccgggtggcatcggcaccacttggagaaggagccaaggaacttggaagggtccgaacttgaggaaggtctgtgcctgcgatgaaacgtcccaaggcgggcggctccacgataccccgcgccctgctgtgtgcggtgtatgccacccatccagcccatgcaccgaccccatcccgccactgtacccactgcctgtctttagaagcgcgagaagccccccgccccagaccaaaggccagaagatatcgtggagcccctgcccgggggccgaggcccaaccgccagtcccgctcctgcgtgggcagggcgggccccgcccagcgccgccccccgaccctcggtggcgcccgcgcccgtcggccccgctcgccggaccagtctggcagcgcccgggctcggatttcaaagccctggtttctggccgtgaatgggcctgcgcccgcgcggccgttcccacagccccctcccgcgcggcccgccctccttccctccctcctcgcggtcccccctccgccgcgcccacgtgacgcccgatcctcggcggctcggattaccgccgccgtcagtccccgcgccgaggctgcgccgcgagctgcccgcgccgcgccccccgcgccgcccgccagccccgctgcgacatggcccgcgccgcccgccggaggcccgcgaccccggagcgcggcgcggccggccgctgagcgcagcctggaggcgggaggcccggcccggcctcggagcgagcgcccgcgcggcctggccccctcccttgcgctgctccccgcgctccgtgcgcctagccgccgccgcggcccggcccagccagagcatggagacggcggagaaggagtgcggcgccctgggcgggctcttccaggccatagtcaacgacatgaaggtaaccggggcgcggcggggccgggcgcgcggcgacgggtgcgggaccccccggggacgcgtggcggcgggtggccgagcctcgtgtggccgcgcgccgcggtgtctgtgtgtccttgtctgagcgcgtcc

SEQ ID NO: 16453 - DNA, 2300 bp, Homo sapien
caagatctgggcagggcttggcctgatgggtgacaagggcaaaaatgtaacatcagactgccgttttccacacactggtgtttgcacagcacaaaaaggcctgcctgggcatgaacagagagaatgcgctggcctggcggagggggtggagggtcagtgcacctaccgttctgttcgggagacccttgcttcttggggatgagtgccctgaaagaactagaactttctcttagaaggggctggtaggaggggcctgcatttcagactgaggcttcatcaggacctgaggttggagcccaggcctcgatgtctgggaggagcctgccacgtgccattcctggccaagccatctggccagggcagagcaggcagagcctctagggccacgtgggcttggcgaggtcaggaaccaaaaaacccaagaggctagaatgccgtgagtggaggagggacagcaagagggaggctggagaggaaccagcgagaggtgtgagaccctataggccgaggtgaggggctgggtttgtttcagatccaggcggaagccgctagcaaatcccagcagggaggggcatgttctgatgggcctgttttaggattgtccagttggtgtgtggagggtggactgtgggggcaggagaagcagcaggaggcagatcctgagacatggggagatggaccaggcaggagatgctgacagccccctaggcatgggggcgggtgtgtggggcagggtggccgtgtaggttgtgctcccagggtaaggcccccatacgtgccagtggacccagcagagggactgggggtcaggatgactcgtggtttgggcctgagcagctgggtggacagtgccaccgtttactgagatgaggagggggttggcaagtctatggggacaccaagggctggttgtggcccagcaaggtttgaaatgcctgctaggtggccaggcagggccttccaccaggcaagcagctgttccatctagagcccagcaggggctcagggccggagggcatgtgtgggagtcactgattgggaccacagactaccaagaggcacagactagagagagaagagcggaagggctaccccagccctgggggagaggtgggaggaaaaccaggagagggtggtatcactggtggcaagagaagagtttccagaaaactccactattcctgaccttctgtaacacagtcagcattccccagcttctctgggacaccaggaggtctgggtgcccgcttctcctcaccaccagcccctcttccgtccctccctccgcaccctcctcagcctgccctcacatgggcaccaccctgccctctgctgccacaggtcccgcctgccggcctggatccctggagagcgctgcctggcagcggctcagctgttggcctctgtcatggagacggcaccagctgccggcgacgggcacttgtgaccatttgtcagaacgccccccttcctcctgtgcctgcccttctggaacatttctgtcccacagccatggagacagggctcatggaggggttgggggaccgggaggggccaggaagcactgtctgggctctgcagcagggccaccacctcctggcctttggcttgaggctgcctggctgggctttccctctgcagccagcagctccccagaggactagccttacatggctagttccacacactagccttacatggcttgttcctcgtcctcaggctgccctctgagaacttccccctatttcacagataggtattgcccctaattaaggtggaaaaattgtgcggagacattgagatcacaccgctggtagttggggacaccaggcggaggccttcacctcccacctaaccccaggggagcccccggcatggcagggtcctggtggcatgcgcggggagatgaagcggccctcactcgtgcggccgccaccccctccctgtgccgcttgtttctgtttctcgtggtttcttgcccaggcctgcaggctccagccggggcaggctggaacggcctgcctactgtttgcgctttgtggtctggcctctttgttaccaaatgctctggggttgctttggggctgggggtggggaggaatcttctccagcctggccccagagccatggctggcgttcaggggcatttgggaagctgggcccaggtcatgcggagcggaggctgagtccagcgacctaggaggagatggaggtgtttcaggcctcccaccaagaaatgtggctcacgtcactgagcacccaagacctcggggcctccgacgccgtgttggaactgtggt

SEQ ID NO: 16454 - DNA, 2300 bp, Homo sapien
tgcaggaggagggggtgtgtgtgtgtgtgtgtgtgtgtgtgtgtgtgtgtcagacagatggacagataaacaaggcttcatggagcatataagtgagatctggcccaagttacttaacttctccagtttcctcttaggggaaatggggaaaatgacagaacctaccctcacagggttgtctgatcgtgaagatgaactaagatcactcacaaggggcagagcacagggtgtggaacagagcaagccagtgtgaaaatggtgggtctcattagcagtggggggacggtcccagtcctctacatctctgggctcacctgggctcacccaggctcacccaagctcctgccagtctgtgggccttgtgacttgccaacagggaggtgcctgggaaatccagctgattcagccttggccatctccagaggaggaaaaatcaacacatgacttgcaagaaattttggcttctgaggacgcaggaacgctaagtggggtgaaaaccgggggccctggcttggctgcctcgcctagggctgcatggagagggcaccagggctgagagctgggggtatatggcctacagtctctaagcaagatctcacgctggtctgtatctgtgctcccagagatgtgcaccaaacccactgggaagcatgtgaaaaataccagcccctgggcacccgggctctgcttgagggacgactgaggaaggccgggagtgaggcccaagcagctggattttaaaagctccagggaattctggtgacagtcctggtttagatggctctgctgtgtggcttgagccggggctggatagtgtgctcagtcctgcaggcaactcgccctgcagcttggctctaggaggtgtgagtgagagcgcccattcctgcctcagggaaaggctggctgggctggctcctctttgtggggttcctcctaccccagaggccctgccgctgggagagccgcctccctttccaccatgcttctcagcccaacctctgccttcaccaggagctaggcagcaccctcctggcccccaatccattcataccagttactgtgcccagctctgggtcctcactggtccatctgcccagggcaaggaacatggagaggtaaatactcaaaccctcctggcacacagtcctgtcttccctgcaaggaggtggcaaggctggccgcagttactctgggtccccctgtgctctggggtggctgctgtgggcactgacaccacaaggtgggaacatctggaagaatgaggggtgggtagaggccctctcagtgggtacagttctgggactgttaccttgccattcccctctcttccctagcaacgatttgccgccaagcctcattttagaagaccacagtcctctctgaacccccagcagtggctgctggtacctctgctgggcctgggacctagctgtccccgaggaggaaggctcagggccgtggctggagtctagctgctttgctggctggcggtggcccttctccctggcacatgactccctctcacttgttctcagaagcccccaaaagaagctgcagggacagccgcggggagaggggacagagggcagtgtcccctgcccacggcagggccaggggagggtgcctcaggaagagggtccccgggccatcagtgcccacccagctcctctcccctgcaggctgggctcttgcaagaggagtcaagttctttgggcaccgacacggcacccctccattctctgggctgaggccgtatcttactgcgtgatctgattttaaagatatctgtggaattgaggtgggggtggaggggtgtttttgtttgttttggagagtggatggaatgaaaattggagggaagtgaacactgaggcaagaatctgaggaggaaaaacaagtactgttcttatggaagactgtccgcttctgagcaggcagcattagtattccagggagtggagtcaggaccacacagattcagggctggaagggatctcagaccatccagtccaaccccagtaccctgggaagaaaaccgaggtgaggcggtgtcatgtgacctgcctggtcccgtggagagccgggcagcgtgggggcagaggctggccctcctgatctgcacccaggcggcttctacaccaccctgcagcaggcctggccaccggcctcagcgcttctgggagaaggtcagccaggtggaagatggagagggcttctggactgagccctggaggggggctaggggccaccaggtcagtgagcagccagggacagcccatggggcctgggaaggaaggtgc

SEQ ID NO: 16455 - DNA, 2300 bp, Homo sapien
gccaggggattcttccagcccaaaaagtgtgtggaacagaacgcaagggaaggagctctgcaggacgggaaaaagagggaatgggagataaaacagtaaatgctggccgtcagctaagggagtggctaggaaactgccagagatgacaaggaaacactcagaaagtcctggcgtggactgttgtgtgggcctccgcggcagccacgtggctactgagtgcctgttggctactctgaaccgaggtgcaccgtaacggtgaaatgcacaccaggtcccaaaggcttaggacacaaaagagaatagattttgttgggaatgtttacattcactgttatattgattacatgttgagatgctaatattttagatacattgggtcaattaaaacagcattgaaattcatttcacctgtttctcctttttaattgaaaactggaagatgtaaaattatatctgtgacttgcgttgtatttctgcgggacagtggacttgagagaaactgattaagagattgacggggccagtgtttaccgccctagactcctctacctgcacagtactgtccccgtctgtctcaggctagcaaagatttaagtgtttcgatatcctcagaagacaccaggaacttccagccacgtgaccactagggatatcacagtggccacccgcccagagactcagttccaggctctgtggctgtatcacatgcccggagctcctggccaccagaggatagatgtgcccactcttgcccctgaaatgtgcaccatggggatcatcaaaccatattaaatagcaattcctctcagcaattacagagcgcagaatcatgccctttagggattcacatcaaatgagcttcagagaggctgcaggcgagtgaggaaagcacagccatcagttcctgatgcaaatgaataattgagcagcctagaaatgccacgaagagacggttttataccggcaggggactgatctgctggcccaggtccttagaaaatgcaacccctggcctgcacctgtcggcaccatttgggaagtacagtgtagtgcctcggtaggaagggagcccctccccaatatcccgaggtttttctacccatgctgcccccaccttgaaaacccagcctgtgccagggagcagtgctttgggcaaaaaaccaactcaagcctcccagcagcacccgctgtcccgcaggctgcttagcagaactttggggacccgcaggacttcagtccacagaagccagggggcttcctgtgcccaccagaacaaaagtacctcctgaacaatatccgtttctcataggcagaggctgtgtttaccccttccccaactcaaaggagcgcattttggtcttaactctcaagggtgtctctcctaggccaaatgtgctgagtgccctggtgcagtggcaaggcacaatgacaagcctcgatccctgacctcacttgagaaacatccttcagatggccggtgaagggcctggcggaggtcaacagttgttatcgggaccttccctcatacagtccagacctggtggttttgtttttccaagaaagggtctgaacttaatgccttgagcctggtcaggtcagctcagtgactgggagagggtttctcctcctgtgcaagccaggctggtgctggagaaagaaaaggaaaagtgagtgggagcccagcagactggtcctcatcccccaaaacatggttatcatggttccagcccagcagcaagctccaaacttctttggaaagggagagagagaagcccccttcaaacccctgggctgggctgagctgggatggtgggagaccagcaaggatgtgtgggatcaggttatccctgacccccgatccccctagacggtggttagcagtgtgtgactcaggatgtgcaggcccagggtggtgccatgactccatgggagagggctatggtgggcttcacctctgctctccctcccgatcttacccacagcactgaaagagccccagtgacccttcacctcgacgggatcgtgcaggtcctaaactgccacctcagtgacacggccattgggatgatgaccaggattgcagttctcaagtggctctaccacctctacatcaaaactcctcggaaggtgagccctgggcccctccaagccaggggcctcttctgggtccgccttggttttccagggcctgcccatagttggtagcattttggtcattgcccttctagggaaaccctggccggcagagaagtgacaggtgctgcgaggagccctcattgtgtcggggagggaagtggtcc

SEQ ID NO: 16456 - DNA, 2300 bp, Homo sapien
cctcagggctccagagccatggtccttttgaagagcctgaatcaaggtatggggctctggagagttctgtgtgtgcttgtcacaggggtcttgtttattcaagagagccaacagcctttcatgaccccttgttcctcttcctctcccaggaggtccagatggttcctgtgactccagcttcagtagcggcatcagtgtcttcactgcagccaggtaagtggcttgtttcagccagaaggtttgtggaaagcgagcggcctagatctttcctggatgcgggagactacagcaatgacccaaggcaaattctactcgcggctgctgcttttgggacaccctcgtacacaaaagagttaattgatgaaggaatctgaaggacactgagcaagcccaccccacccaggcttgatggatagatagggcggattagaagccactgggggccagacatggtggcttatgcctctaatcccagcacttggggaggccaaggcaggcacatcgcttgagctcaggagtttaagaccagtctgggcaacatggcgagaccctgtttttactgaaaatacaaaaaattatctgggcctggtggcgtgtgcctgtagtcccagctacttggggaggctgaggtgggaggatcacttgagccagaggttgaagtgagctgagatcacaccactgcactctagcctggataacagagtgagaccatgtcttaaaaaaaaaaaaaaggaatgaaagaaaatggattgttcttacttatttttaaatattaaaaaaaaattaagctattggaggtcagtaaacgcaagttataataataaaagtacagctaatacatggtgactgcagtgagacacagttgccttgactcatcgctgtctgtttgtccaggatgatggggggccaacaagacccacaaggggaagtctgttcaaggacagcctgagcatgggcagtcattaatcatgtccaagattaaggataaatcaccggccccaggagctgttgtctcctgtgcgcccaggtcagctgtaatggcgcagtcttccacatgggggcagtgcagaccaggcagcaaaataattctcttccttggggctccctccatactccctgcaaggtgaagggactccccgcggaaggtactgtaacggttctgccctggtctgagtcccctggacttgccccatgtcactttttctttgggtgaccttggcatctctggggctagagtggatggtgggtctcatacaggggtttctttcccctgaacttgacagtgaacctgggccctgggagagccaatcactcatgaagagaaagtgtgcactctaccccaagaggctcttccccccagacccctagctagggttcttccctcatcgatgtcatttgtgaacttatcctcatccctcagcaccctgagcatgttttccaagcacgcaggtgcagccgtttatgaaatgtaccactaggagtcccctacgttgatggaggagatcagcgaatgttgccattctctccttttcacatagctgccacgcgttccagtgcacctgcctgtgctcacccctgtaggctccaagataagagctggcccctgaatgtgtccctgaccttcattcatttactccagtggtgaggcagagaagtagccaggaagttactggaaagaggagtgattgatgtgaggggtgaagttaccagaaagggagggccatggtgcctgagcccaggcaatgagaagactggctgggaataacagctaatgccagtcaacatagccaggcttccagggccccagcgcagtgctaaacctttacgtcggatccttcagctttgtctgagtctcgtggggtcagtagtattactttcatggcagggacgagaagggaggaagaacggggctgctctgtggacagtggatctaggaggggcccggtggatgcagacccgctagggagctgtcaccgttgtccccatcagaggggatgggggctcaggctggggaggagcagcatgtggagaaagttgggtgggtttgagctctgtgttgagaaccacaggactcactgatgggtgggatggggtaggcaggagagaggtgagggaaagactgccttctagaaatttggtgtgagccagacccccgctatcctagtgtcatttgcacaccagggctggaaggaggagcaggtgtgggtggggtggtcaagagctcgttccaggtggctctgagcatcccaggagaaagggggaggcagactcaggtactgggtcctggaactcggggaacg

SEQ ID NO: 16457 - DNA, 2300 bp, Homo sapien
gaccccttttcccagatgcaagcagagcaaacaagcatgtggctgcaagggacacttactgtctgttgaatctaatcatttttaatggacttgcatttataccttttttcatttctcttttaattcattttgattgcatttgatataagtatcagtctgccatacagtagagggaagaagctgatagtctgtgaaacactcgcctccctggtagaaggggatgatgctgacgccatcatccagaccgtactttccctttagggagggctgcacttagtctagctcataagtgccctagaaaaagctcatgctctcctccgtgcctcttgcagcctggtggagttcccttcccaggcgcggagcagccctgcaatgctgctgcccctgcagaatgccacggaagtttctagagtatcagcctcgcagctaccctgtcccctcctccaggagtggaacaaggacccagcgctttaagattggaaacccctggggaaggctgacgggaagcaaccccgtgacccagtcacaacagggaacaggaaccccagcgggtcatgggagaagtccctgaacagaagggtatttcctgaatctgctcctcagccaactccattgtacccactcccactttcccagcctttctcaaatgtgttcaccgaaagggtgatgttcttgctagatgttctgggctgcaccaaggcctcggctgcggatttgcaggaaatccctggtcttgcatccaaccgtgaccctcgcctctgtgtccctcccctgtctgtgcctcttgcagctggcagccgacccagaccccaatgtgaaaagcggatctgagctcctagaccgccttttaaaggtatttgtactttgtccccacttttatttctacaatctgtttctcccgtctgtctgtaaagcttagaaattctgtcattgggaatgttcttcttgaatttaaaatatattttaaatttacatgtactccctggtgtgcagttctatgacaagaatatcgagctcaatcaccactatcaaatacagaactgtgccatcacccaaaatgtccccttttgttgccgccacctagagcaaagaagcttgcctgtcactttccacacctctctggccctgacagcaggggcctgggcattccatccagaccacagagagtagggtcttgccattcagttggttctctcgactttgcttcctgctttcaatctacccgtttttcgtatcccgtggactgggacaggatgaatactccagagacctcttatgcctagctcaggatctgccattttccttggtggccgcctgagcgctggagccagccctgggcaagtgattcagcgaggtcaggcagccctggtctcgggctctcggcagctcactttcctctgatccacaggacattgtgactgagagcaacaagtttgacctggtgagcttcatccccttgttgcgagagaggatttactccaacaaccagtatgcccggcagttcatcatctcctgggtaaggcctggccggacaccgtttctccagcctccagtttggaaaatctgctctctagcacactcttgtcaggccctttggctataggaaccctccatgttctcccttgaatagccattaacacctgataattcaaaaacaccttattcagctttgcccccgaaacccaccatgttggccctgaagggatcaggttcttgttgccctggaagggagtccagttctttccttgtcccagaaaacacctgagtttcctttaaagccagcagtgctacttccagcaatctcactttttctagccttttctgtccttccccatccatccccttctcccctgggcatccgaatttccttagagtcaaattgccattcccctgcacattaaacaagaaatgctgactgtccttgccagcaccctcctcccacatgggacacctgcactgcagggaaatgctgtctcagcagggtccccttcctacagcccagtcccagaggcttggtgagcaggaaacagggttctggagctgacttcccctcctgttcccttcccctggtcagatcctggttctggagtcggtgccagacattaacctgctggattacctgccggagatcctggatggactcttccagatcctgggtgacaatggcaaagagattcgcaaaatgtgagtggagtaaggggcaggaagctgctgcctcctgccacccccagctgtgcccatgtgcttcatgcccacagagaggccgcggcaggagggcaggaaatcacctcttcttcctg

SEQ ID NO: 16458 - DNA, 2300 bp, Homo sapien
gacctaaaggtaggcattggtctgggccttgaataaaaaactggttacttagcaacctgagccagaatataatttcaggagaaaagaatacttctggtaaaaaaaaaattccttattgtttgaattattaaaaactgtatcattacccttgggaaattcagttcacctctaagaaaaagccaaaccaaaaagcaaaagaaacatgaaatatattagatatgcgtcccgtggaaatgcacacacattggagaaatagaaccaaatcattcccattgatttacattttttcagtgtttttcatcaaccatcatcaaaatcctaaaaccaaactttgcaagacatttggagatgtccttggcagcactactactacttgttagcgcacctaccttcattcataggattgtgtcagcaaaggttttaacaactatgaaaaccccacctgtataggagaatacattttttatggatttttctagacatgatatatccatgacttgccgagttttggattagcctttgtattcattttctatggctgcataacaaattaccacaaaactaggagagcaaaacaacacaaatttattatctcacagtttccatgggttgagagcccagtgtgaactggattctcagctcagggttccacaaggctgaaatcaaggtgctggccagctgcatcctcatcaggaggctcaactagggaaagatctgcttccaaggaccctcaatgtgttggcaaaattcattcctttgtggccatatgactaaactccttacaggagagtctctcttccagttcaaatttcttctaatctcttttaagtactcacttgattcggtcaggccgactcaagttaatctctctttttattaattcaatgtctgctgattagggaccttaattacatctgcaaaatctcttctgcgatattacataatataatcatgtgagtgatgcatagcccatcatatttacaagtcttgttcacgctgaaagagggcataatacagggcatgaacacgaaggggtgggaatattggaggtcatcctagaattctgcctacttttgccctttactcattgcgtccctgtttctgttgaggaaaatactccattttcaagactgttataaggcctatatatgcacttttcattcattaaagaaaagtatcaccatgcattctgaaactgttattctttgagctccactgtaatctagcccttgtcctaagtccctgttcactctgaaagcttatgataggaaaggctgatgcacctccctgttaactgcatgtttaccacactccggccataaattgcttttaaatattttgccacatagttgggatttctgtctcaccatgtaatgtgattcccgaagcagctgaaggggctgctttccaggggacctatctagagacccgcactcagcagatctggggcctttctctctgtctgtaaccagccctcctaggcatcagagcatgttaaacacacccccaaatggtggagtgacagacactggtggtacctgagatcttaggtggtagacaggtagtgccatttttaattgagaatttattttgatgtgtcttagaaaaaatatacctattcaaactcatggttttagggcataagcaaagctaaaagagatttaaggtattttttaaagtgagttgatttgaggaaaacattaaatagataatacaagtggctagaatatggtgaaagtgatgacagtgttactgcagttagggaaacgtctgcatctaggaaattggtaagtgaccaactactgaatgaactagtgaattcggtgactattgaataaattatgttaagtgaatcagactccaagaacccattcggtcttacgaacgtctacagaagcccaccacgtgccatcagttgggcgtgagctacacacccattaaagcacgtctcaaaccacactccagctacctggcgcgcagcgcgatagtgtgtgcagtgtgggtggagccttccgagggcgtggccaatccacctgcggcctgcggtgggggcgtggctggagaggggcgggccctcgcgacggaaggcggaagtgctgtagagtcatgtgactcgagtaacatggccgctgtctcgtgagtcccgctagtgccgggcgggagttgttaagcggccagggtcaggtgtgctggagcggggtccgggcccgggttccagggcgaggcggcggagcgtggcaggcaagcctagagcggcgtggtccatgcgccggcgccgggggcagagcggagccgcagac

SEQ ID NO: 16459 - DNA, 2300 bp, Homo sapien
aattagtaatacctaccctacaagggagttataaggacacaactttataacattcccagtctcacacagacatagttgcttgatgtccaggagtggaggggctggggtagacttgagctcctggtgtgctcttcaggatctcacgtgagctgagtttgtttgttcccctttcagaccgactgtacagacttccacgcagaaaaactcattaatgcagccccaggaggccagggaggcactgaagccagtgtggaagtcttattcgagcccagccacctgggtgagaccaagggcatcctgatcctatcatcgctcgcaggtggagagtatatcatccccctctttggaatggctctgcctcccaagccccaaggtcccttctcgatccgagccgggtacagcataatcatccccttcaagaatgtcttctatcacatggtgaccttctccatcatcgtggataacccagccttcaccattcgcgctggagagtctgtgcggcccaagaagatcaacaacatcacagtctcctttgaaggaaacccatctggcagcaaaacccccatcaccaccaagctgactgtgagctgccctcctggtgaagggagtgagactggagttaaatgggtttattatctgaaggggatcaccctttagtggtaaccagggttacctgtatcaaccaaaagctatgcattgtcttagcctgaaaaagaatagagaaaacaataagaattctaaaggaactgtttttattcttctcatacaattatagggcagttatttccctattatgtgttttccaaatatagatatgaaatatctattccatattaaacattataactacacacaacagctctatattttagacaactgaatccttgtgagtccctaaattgagtttcttgacatagccccaaagctcaagtactttgtaataattcccatttttatcaagaaggcacaggtatcacactagtgaccttctactctacaacacttagcaatgcgtgacgctgggtactgcagtttctttttaaaatccaaaatggtttaaaaagcccttagacatgactattttgatgtggcattttattctgctttcacataaaagccaaataaatattttcagagggatgagcagataacattagggcaatccagggacactcccatcactttttctcttggcttttataccatcagtgtccgaatcccacatctgccctacacagaaagttctcactgaagtctaggccctggagaaaggctaatagagatcccagctccccccaccacacatacacaccccgccttggatagcattcagcaggagagcagggattctcaacccatctgcacatcaggaccacctaactctcactctgaacgtgcccagtccccatctgatgtaattggtctggagaggggtgtgggcatctttattatatacatttaacttgtatagcagatggttaaagtctggccctggcatgggtttgcttctgcagacatacacctctgacggagggtccccctgcctctacctgctccccacactcatcccccacagccctcctacaagaggggcaggagactggaagaagatggcctcttgggaatgaatgccgtaaagaagtgggtcttaaaaatggtccctgggccagcagcagtactatcacctgggaatttattaaaagtcaaactctcagtccccatgtcagatcgactgaatcaaaaagtctgtaggtgtggcccggcaatcttttagcaagtccttatacctgtcagaggtggctttcatggagggagactcttctccttcttctgtacctccccacaaccctagcccagtatactctaggaccaaaaaagctttttctagaatgtctgtaaacacagacctttacaatagtcctccctcatcctcaggggatacattccaaggtgcccagtagatgcctgaaaccacagatagtactgaacactccatatactgtggtattttcctttacatacatacctttgattaatttataaattaggcacagtaagacattaacaataataataataaaatgtaataattataataatatgccagcatcactacccatgtgctttggggccattattaaactaaataaggtttccttgaacacaagcattgcgatcccatgacagttgacctgctaaccccaagtcatctactcagtgactatcaagtaggttgtgtctacagcatgcatacgctagacgaggggatgattcacatcctgagcaggatggagtgggat

SEQ ID NO: 16460 - DNA, 2300 bp, Homo sapien
attcaggaggctgaggcagagaattgtttgaacccaggaggcggaggttgcagtgagtcgagatcgcaccacggcactccatctcaaaaaaaaaaaaaacatatatatatgtgtgtgtatatatatatgtgtgtatatatatatatatacacacatatatgtgtgtatatatatacatatatgtgtgtatatatacatatatgtgtgtatatatgtgtgtgtgtatatatatatacacacacacacacacatatatatatgtttgtttggttttttttgagtcggagtctcactctgtcgaccaggctggagtgcactggtgtgatctcagctcactgcaatctccacctcctgggttcaagtgattctcctgcctcagcctcctgagtagctgggactacaggcataaaccacaaagcccgtctaatttttgtatttttagtagagacggggtttcgccatgttggccaggctgttgtcaaactcctgacctcaagtgatccacctgcctcggcctcccaaagtgctgggattacaggcgtgagccacggcacccaaccggaatctgcattttaaaaaccacacagggaaactgaggcagggaagactccttgagaagtgccagagctctaactgtttgttatttcccattactatttcctgtatcagggaggaggaagaaagaaggaagtacacaaaataagttaggaaagggtcaggaaagggaaatgatacttattaaatatctattatgtgctacaaattttatagagatgatcttaatcttcaacatagagtaagtcacagaaagttgaagtaatttaccaaagcatacacagctgatgggagagcaggagtgagatctgacccctgttccaatcgcagcagcaagaactccgggaaccgaggccttaggggcctcccaccctcagctgctgactctgggtgctatttcattcaggtccttaccctggcgcccttccacaacatcacactgaagcccaaagaagtctgtaaactggaagtcatctttgccccgaagaagcgtgtccctcccttctctgaggaagtgttcatggaatgcatggggctcctgcgccccctcttcctccttagcggctgctgccaggccctggagatctcactggaccaggaacatattccctttggacccgtggtgtatcagacgcaagccacacgtcgcatcctcatgatgaacacaggcgatgtgggtgcaaggtaagggagcagtgtctcccaccctgaggctgccccagaggctgctgtccctgtatctgccctggacttgttctgcaagtgcaatcactttttacttctgtcctctcccttctacatccccctgcttccctcaagatgtgacagcagtggcctcactggggtgattgctgctactatgattactacagttgagataacagaagatatttagtccatgcctgtttcctgccttgacatggcacacatcatttaatccaactacagttctatgagaccaagactgctaccaacccatttcacagataagcgagtgcccaaccacagagggaggaccacacagggccatgggataccagtgccacccagaacagaggcaactctcacgggaagggattgtcgccatcccccaggatctgaaccaggaagcagtgcagggaacagttaagaccacagtcccagaaggatttctgtcctagcccagccacttcctagctgtgtgaccttaagtacacgacacatgtgtatgtgtgttcatacatatgttccctgatgtgtcactcgtggataataagatgcagccacttcctgcccttggctcagctctgcaaaggagccaagtccacctacccaggaagtgaccttggcccacattccccagtgcttctgctctgtctggcagagatctttctcctcctaggtgctaggatagactcaagggaggtgaacctcagcctaggcagtctcttgttctcagtagcattgaggacacccttacaacatccataaactctctttcttttcttctttttcttggaaaaggtttaaatgggacatcaaaaaatttgagcctcatttctccattagcccagaagaaggctatattacctcaggcatggaggtttcttttgaagtgacctaccatcccaccgaggtgggaaaggagagcctttgtaaaaacattctctgctacatccagggaggcagtcctctgagtctaaccctgtctggagtctgcgtgggaccacctgcggtaaaagaggttagtagctgctgcccggggt

SEQ ID NO: 16461 - DNA, 2300 bp, Homo sapien
aagctctaggcctaacagacatatacagaacatttcatctaacagcaggagaatagacattcttttcaagtgaacatggaacattgtccaggattgaccagatattaggccataaaacatacctcaataaattaaaaggattgaaatcgtgcaaagtatgttcttcaaccacaatggaaagaaatttgggatgcccagcctaacacatcatctttatcaaatcctcaggaagaaggtgattgatagaaagatgggtgtaaaaccactggaacctgtcttcatctgttttgtgcttctataacagaatacctgagactgggtaatttataatgaatagaaatgtttcggctcatggttctggaccctgggaagttcaatatcaagttgccagcatctggtgagggccttatggctgcatcgtaacatggcagatggcatcacatgatgaaagggcaatggttacgggaagaaaggtcgggggtggggcaggaggaagagagagacagagagagagagcaagaaggagtgaacttattcctgccatagcaaacgcactcctacggtgatggcattagtccattcatgagggcgatccctcatgaccaatcacttcttaaaagtcccacttcccaataccatcacaatggcaattaaatttcagcatgagttttggaggagacaaacattcaagccatgaaaaaatccaaggtgcatcactggtcattgagagttcgggaagctccactgttttcttggcctgaaactcagcagcaaagttgcagccatcttctctgagaaaagcccggtttgtggcttcagaagggacctattccttttgagaactttttcagaacttacatttcttagagcaaacagaaacgtaacatgttacaagatctttctactctggttggcagaagagttgaagatgataaatttacatccttttcattgaatcagtcacaaaatgtaaacactttaaaagccttggacatttatctgtgtaacaaacctgcatatcctgcacatgtacccctgaacttaaaagttgaaagaaaagaaaaataaaagctttgaataagaaaatgtttttaaatgtataaagttgtttatgatagcttgtaccaatgactgctgacttattctaataatgtttaaaatgaatgtttattctactgtttattctaataatgtttattctaatgatgcttagaatgaataatagataatttatttgaaatcaattatcaatttgtgaaaattcacattatgaggagtttgtgaagagcaaattaacttcatgtaccaatgagtcacatattaccttgtgattgagagtccagatgatgacctgtgctctttccatctttccactctttcatccttggcatattagccttgttctccttcttgtcatctcctggtcacaagatgaccattctacctgacatcctatgtctgcattccagagtgaaaagaaaggggaagagtgtgaaggcaaagaacttccccagaaaggctttgcctctttattcaagatagaacaccctcttgtcctcttctgtttacatctcaatgactggaactatgtctgatggccatcctgagcttcaaaggaaggtgtaaaatgaagcatttgcacctaggcacatgggcatccaatcagagtcctgctaggaaggaagccatggggagcggatattgggtagtaactagcagtgcctggtatacccctgagccttcaagctgaatcattgctgcaagagcaaagtgggaggcaatgtagggcctgattacagaggaacttttcttcaatacacaaacttctaacctactgaattggaatctctggaaatggcaccctgagacctgtatttgttaaagcaccaactgctttcctgcttcacctgaggacttaagagccctctcctcctacttctcctaatcatggtccccctgccatttcctcctcacagatcagccatggtccaacatttatgtgcaacatctcaggctgtgctgtgagcccggctatccatttctccttcaccagctacaactttgggacctgctttatctatcaagctgggatgcccccatacaaacaaaccctggtaattaccaacaaggaagaaacacctatgaggtaagcaggcttccagagcctccaaatgattctctagctgcttgtgggtcctacagattccacacaggtgaagccctgccaagacaaaaaaaaaaaaaaatgattatgggaaagagtcaaacaaaagtgggtatgaatcctaggtccctgtccc

SEQ ID NO: 16462 - DNA, 2300 bp, Homo sapien
atgctacacataccacacatcttcactggtagacctttagcttaagtcttgataagcagttgagcaagtcctcccaccttttccttcttcaaaaatgtcaatgctaatcttttagttgtttcccttttccctcaggtgtccagaatcacatttgtaataatctttggttcatgacaggatctcatctttggtccatgtgtgcccttcttttattcattccttggttagtttttttaaaaacaatataatacacagagacaaacccacacccaacacgggaagtagaatattgactacctgtgtaattctcagccattccactctctgccttcatcctagaagtaatcactatcttgacttgacttgtttactcccttggtttttgttttttgttctttttttaacctatgcacactaaaaggtatatcaggccaggcacagtggctcatgcctgtaatcccaaaactttgggaggctgaggcaggcagattgcttgagcccaggagtttgagaccaacctgggcaacatggtgaaatcccatctctaccaaaaattagctgggcgtgatggtgcatgcctatagtcccagctactcaggaggctgaggtgagaggatcatctgagctctgggaggtcgaggctgcagtgggccgtgatcgcaccactgtactccaacctggaatacacagtgtgagactctttctcaaaaaataaaaataaaacatatattattagttgtagttttaacttttaaaaaatgttattgtatgtgatcatccatattgttgcgtgtggctgtagtgtatccatttcacttctacataaaattccattatgatttctcccttctccttttgaaaattatttggggttttgctatcacagatgtattattcacatggtgttcatttgtaagagtttatattcctagaagtggaattgctgactcattggatatatgaatgttcaacttgccaagataatcccccagtattttccagagtagctgtaccaatttatactcctacagcagagagcttattgatccatgtcctctccgacacttggcattgtcagacttcttgatttttatcatttgaatgaatgggaaatggtctcattacgagcctattttgcattgtcctgatctctgatcacaaataaggctgagtatttcttcatatgattactagtcatacaagttatcccttgcaggaatgccttttcatgccttttgctcatttttcaattatgatacttatattttgtgtgagttgttttattttttataaactcttctgttcatattatttgtctgcaaatatccttaccaaatttatagtttatcttttttttttttttttttttgagggggacagagttttgctctttcgcccaggccagaatacagtgacacaatctcggctcactgcaacctccacctcctaggttcaagagagtctcatgccccagcctcccaagtagctgggattacaagcatgcaccaccacacccggctaatttttgtacttttagcagagacagggtttcaccatgttggccaggctggtctcaaactcctagcctcaagtgatccacccacctcggtctcccaaagtgctgggattatgggccgtgagccaccatgcctggcctagtttatcttttctgttattaattttaatatcatcaagtttattaatcccttcttttatatgtattactttttgtgtcttatttttaactctttcctcccggaaagatgttcacttatatatttttaagacttgtttttttgatatttcagctcttggcccacctggattttatgtatgttgtgaagcaaggatccaatttcatatttttcatctagatgactaatcttactagatccctttttcatttagcctgtctgttccctagtgatccaccaggactttattgtcacatagtgtacctaaattttatatatgcctagaatgtttctggtctctctattctattccattgtcagtttttctgtccctgtgctctgcatctctgaggacacagctgcctttgttacaggtgatagagacggatccggaacctgctcactcagtactagaagaaaactaccaagaactgcagcttcaaatcagtgccaatgtggatttcgcttcataccattgccaagcaagagatgtgcgctttaaggaaaccttggtttaccagacccgagtgtttgagtgagtcatcaaaagtctcgtgatactagatggaaaagctctttcattccatcattcactcactcactcat

SEQ ID NO: 16463 - DNA, 2300 bp, Homo sapien
atatttacagggaattgaaaaaaaaagggttttcccagcagtaacgtctcgtataactatagtacaacatcaaatccatgaaattgacatttgtacaagccacagagcttattcagatttcaccacttttacatgcatgtgtgtatgtgtgtggtgtagttctgtgcaattttatcacatgtagatttgtgaacccaccaccgcaattaagatccagaactattccattaccaccaagattcctcgtgcttcttgaggaaataaaattaaaaacaaaatctccctccaacccagaaaatctatccacaaaggtagaagagaaagaaaacaattttattattgaataagtattaaaccagaatgtgatgcccatcacaggcaatctgctgagagattgcaaagacagaaggaagtctgcccctcctatagagccaaccagatccaagccttttcattcctgttctcagagtaaaaaatagctagtctcaagtaagaggacttgacaccatcatttgtcacacatagtttatcctaaatcgacatggtaattgaggtgaccaactgtgttagctaattggctttatccaaaggaaaaacaaacttgtctttctagcagggccccatggaagctaggctcccatcctctcacagaaactgggagtagggacttcacctttcttgttgattacgtgtcaaagagatggttcccaggtccttgagaaagacacttctggctcctaaagctggcaagaggcttatttcacttttaaaaagatttatctacatttcaaagcgataacatttcaaagaacttaaaattacaaatgttctaaactaaatactctaaggggaggaagagaagtctcttcccttattttcaacaaggagaactaagcctcattttccatttgtgtttggccttacatgtgcccaggttataaccacatccacccctctctccctgtcccttacctctggcagccactcatctgttctccatcttgagccttttgttatttcaagaatgttatataaatggaatcatacagcacatcgccttttgagattggcttttttcattccacataatgcccttgtaatccattcaagttatgcacctcaataattcattcccttttactgctgagtattccatggtgtggatataccgatttgcttacccttcccacgcccttcccaggaaaaatgtaatgctttaaacataccatgtatctgtttatgttctgtggctctttgggggccgcaaaccattgtaatatttaagatattttccaccaccctccaagaactaatttttgcctctttaggggtggtattgtccctgttgagaatgcatgttcctaaagaatttgctgacttgctcttccttcttgcttcaggtaagtgctcatctccagatggaggtagaaagacttatagtccaaagctatgtcctagaacatcagaaaacaaccacccctgatcctatggatgacccctgcttcagccatcggagtcgccgcaaactggccaagtgagtggtttccagtgactgcctttctgtgctgtgcttgtttcagagtgtagcagagcaagcagtgctgcctcgtgcagcacactcccggaaacactggctgatcacctcgcaatgaaatccactctcctcacttatccgccatcccctagcatcaagccaactgggcagctttctgcctcttagagtgagaacattatagctatgtctaatggacaggcttcacttcaggtccataagggcccatgctgaacatgttctgagataatggccaaaacagtggtgtgaatctctgggggagttaacgttgtttctagtctccatttgggtagccatttgttgttctccactctggagaataaaactgtgcacaggaggtagaaaaaaaaaatcagactcactcacttttggaaaagtagccttccaggtttgaaagtgactagtaaggtctattaaccatttcagaatccagctaccagagtacatcctggactttggctacatcatccttggcgaagtccgaacccacatcatcaagatcatcaacaccagtcactttccagtgtcattccatgcagacaagcgtgtccttcatgagacaggtacccaggctggggagaccctttcctattgcacttggtcatttctctcaaggaacccatcagtactgtcctcctggagcagcttttgtgcctctgggatcagctaaaaggattcttgggctattcagtgatcctctgagcagtcattctgacccagtgggggc

SEQ ID NO: 16464 - DNA, 2300 bp, Homo sapien
ggaccccttgcccaaagaaggccaaatatataaaacaatggaaatgtgagtcattacccaccagacagctcttcaaggagttctgcttctagtccttttttgattaaaaagtggtgactgggggccaagagacagggaagagaggaggagagaagctttgaaagtgactaatgtggttattagagaaaaactactatgtgacactgacaaatgtatctcgcttggggctctgcgttttctgtatgtaaacaagctctctgttttgaattgtgtgatgggctcctccgagcaggtgtgttgtacctgccctccacctggtcaatacagaggtggactttgggcactgcttcctgaagtacccgtatgagaaaacactccagcttgccaatcaagatgacctcccaggattctatgaggtccagcctcaggtgagttcctttctccttcttcagtattaattattcttccattgagttcccttgatgagaaagagaaatccctctgaagtgccacattcctgaacacatgaccttaagtaatgctgatttttaacccttagatagtctaaggatcgggttataaagtcacagttggattgctagctgcatgcctgagcagctgcaggtgtaaatcgttgttaatttcccagagaaattacccttgataaacaagggaaagtgtcaattaagccaacatgcagaattgcatctgcaaataattgcctgtgaactaaccatgcatgggaaatgagctaggagttttcattatgtccatggctgtgagttgaatggcatcagtaagtaatgcaatatttataagtagatttgttggaccagaaagctagagacaatacaggaataagaaaggaggaattatctcttcatgttttatgaaatgtgtctgtccatatgccactacacccagctaagtgggagactaaggagttaaacacagatggataaacaattttttaaaaatctgtacagattagagtaatggaaggttactactgagatgcagtttaccaagaatgcatttgggtataaaactcagttatagaattacaatattctaactaaaatatatgcaaaaatgtcatatgggggtttatttggctacaagatcaatggaagttaaaacagcaatatggaggccacagaaccaaggcaagtttaggctgccgcagagaattaccacctttaggtaaaggaaggtgatagctgctggtcagaacacagccagaattttgtcttcagatgttgtcattgtatttttctaatggaaacttgaagacgaaaaagcaccatgttcgcagtaaccaaaatggcaatccatggcatctgcaaatccaatcatatgtgtgtttaatctgaaacagaatagaattagctaggataacacagctacctttcacaagtcacggggctgttacgtaagagagaaatagaatggttctatgggtttctctgagacagaactagaagccaagggttagggtgacaggagacaaggtctaacactcagatgctccacagcaggccaggccagccctgcacagtgcatgatcatttcaagaactcagagtggagtgtgcatctggggtcaggggaagttgtttctgcacagcaggactgggcataggatgaggcacttgccttgggcacaaaatttaaggggaagccaaacactcaagatacttagtatttccattacatattgtaagaaatcaaaattaattccaaaaaatccataataaacaagataccaaaacctaggtaaagagatcagtccgacctcaggctgtcataaggctcggcggagcactgcggcacagggaggagttagactgggccatgttaggccagaccagatgcagagagactgtggcgtaccccaggcaggtgacacctgcatgctctgtcgtcctccccagcagcagaggctctgagaaatggttcccagagttatatagtagcattttaaaaattttatttgcgttcttgatgcataaaagctggtaatatggtgcagaacagggttctgagaaacacaaattggtcaatactggacagttgttcattcattcattcattcctcactttaaaaactgagcatatgctttgggtcagaaagtggtcatgtagagaggagaggcccagctgtaagctaagaagttgtcagcgggagatgcaggtggcatggtgctgtccagtgcatgctgtggaaaaggactgcacaggatgctccctggggacagaggaaaggttcccaccctagggcccttgaggaagagagggaga

SEQ ID NO: 16465 - DNA, 2300 bp, Homo sapien
gcctcagcctcccaaagtgttcggattacaggcgtgagccactgcacccggccttctcctgactcttttatacactcagtgtgcggaagatttaagagttgcctaacttgttttacttctaaattcttcatctatgttctttatttgaaatttgctatttatcatgcctctaccaaaatgtctattttaacatctgtaatgagatttcacttgtttattcaaatagcattaagctcccactagaccagcacagtccactagcaatataatacaaggtgcatatgtaatttaacactttctagcagccagatttaaaaaaagaaaaaaacaggtgaaatgagttttaataatatatcttatttaacataatatatctgaagcattatcatttcaatatgaaatcaatttaaaaatactaatgagatattctacattcttgttttacactaggtctttgaaatttggagtctacacttactccacattccatttaggaccagctacacattcagtggtcgatagccataaatgatgagaggcaactgtagtggagcagtagtacagcagtagactgtaagttctgtaggcaaagttggtgtctgtcttgttcattgttataaacaacagtgtttggcatagagtaggcattcaatattgtgaaattgaactaaatataattgaaagaatgaagacattaccaagggaatccttcaatgtttccccacagcacttacagtctaaatcattcaattctgcacgcaattagttggcccacatagtttgtaattaaattattccacaagcatttaaggttcacaaaggaggaagcatcttcatcttgttatctgttgtatctcccagtcaaccacagttcctagtattgtgatgtgtagattcatgcaatcaacaaatatttatttagtgtccacgccaggccagttactattttaggtgctggggatactataagggggacacagtctctgttctcatggagctcacagacaataaaaagttacaagagctttgaaggaaataaataaggtgacatgagagagtgtgatggaggacagagcaaggaagtacggaggagaaggagacagtattgtgaagagccagggaagggcaatctgagtgtgtctttttgaggcagccacattgacttttcattttctcgaattctccaaactcatttctgcctgtaactttctattcctttttcttgtgctgcccaccctctcccttgctcttctatagctggtatcttcccatgtctcagctcaaacgcaactgtctcctcaaagacaccctccctaaccacctgtctactgggctcatcacccttgacacttcctatcacatcctgacattttgtttagtaccacaacctgaaatgatcttgtttatgcttctatgaaattgccttgacaattgctatctttcaatgctgagaaaagtgtccctatgacaaatatatgacccacaattagtgatcaatagatatttattaaatgaatgaatgactgaaggtcaagagttaaagcatttgggagatgtctcaagtcatggtttgaataaatgtaaatgaagtctaggaagaaccacactctatttgtctggtttctctgagaaggaagatggggttaatggatgtgggatttatactcttgcgccgtctcgggcatggggcaacctgagttttggttccagctcctttgagaatctacagctatggaccatctgaccgggtaaatggccacaaacttttgcttataacttaagggggttcgtggacctcctgaagaggtcaaaggaccacaggttaaaaattcctgtagagataagagatttccacagcaacactgggaggcaggaggcaggtgttcaatgagataatgcacgaagcatctttaaagaactaggcctggcgaagtgtggctttggggagaggtggtgtccgaagaatccttggaaaccaaattcttttgcacctagcagctggggcggtggttgctattgacgcttgcctcctccaatcatcgcgcggcttgctaggctgtgcggctccgtggttaccgtggcaacggacggcaacagctcgggcggcgcatggagagtgcgggcggcttcaagctgggtatggagcccctcagcggcggcggggtctgtgagttggacgcggggtcttggcggggaatggaggtagaataaacgtgggacccggagtgcaccaaggtcagaggtcctcgcagagattgtggggtcaaagtgtgagggacatgggggctaaccggggcgtc

SEQ ID NO: 16466 - DNA, 2300 bp, Homo sapien
ggtgatccacctcagcctcccttgtagctgagattacaggtgcacaccaccatgccaggttaattttttgtttttcagtagagacggggtttcactatgttgcctaggctggtctcaaactcctggactcaagcagtctgcccgccttggcctcccagaatgctgggattacaggcataagccaccacacccagcccgtgctttctttttttttttttttttttttttttgtgagacggagtctcgctctgtcacccaggctggagtgcagtggtgcaatctcggttcactgcaagttccacctcctgggttcatgccatcctcctgcctcagcctccctagagctgggactacaggctctaaatatttttagttttaatatagttcaatttatacatttttcctttatgattagtattttgtgtcctgttataaactttttgactacttcaaggttgcaaagatgttctcttatgttttcttattaacttttaaaatacagactgacaatccaaatgaaatgtatttttgtttatgatgtaaggagggtccaaatacaattttttttgcatggagagacacaaatgacctaccactattttgtgaaaatataatcttttctccattggtccatgttctggaagacttgtaaaaaatgaattttacatttatgtctatatatctatttacataaatggttaaaaactctacacataattctaatattcttctattttcatgcaatactgttgacacatacagcctattaatggctgcatataatgcatatatgtgcattatatagatgtactgtaataatttaattaattctcttaaagtagacatttagagtatttccatttggctatgttattgagatgctgaaatgaacattttgtccaaagtgagtgccagctgtttaattatctcctaaggataaactgcgaggaggaggaattgctgggttaaaatgcatgtcctctttttttcccgagacggagtctcgcactgtcgcccgggctggtgtgcagtggtgagatctcggctcgctccaacctccgcctcccgggttcaagcgattctcctgcctcagcctcccaagtagctaggattacaggcgcccgccaccacgcctggctaattttttgcattattagtagagacggggtttcactatgttggtcaggctggtctcggactcttgacctcgtgatccgctcgcctcggcctctcaaaatgctgggattacaggcgtgagccactgcgcccagccaaagtgcatgtctcttttcaacgtttgccttctgggctaggcggcttggctcatgcctgtaatcccagcactttgggtggccgagaccaacggatcgcttgagtccaggagttccagaccagcctaagatagggagatgccatctctctaggaggatcgcgtgagcccggggaagttgaggctgcagtgagccgagatcgagccactgcacaccagcctgggtgagggtaagaccttgtttcagtaaacaaacaaataaataagtttgccttccgtaaggtttctaataacgtttttcttccatccacagatgtaaacctgtttccccatagtcacaccaacagtggtcattaccaaggttttacatctttgctaaaccgagtaaaaagaaaacttgctgttttcatttccattcttgtctaataatagtttaaacagttttgtatatccttagtggctatttgtttgacttttttgttttttgggaggcctgttctaatatttgctcattttccttctggggttgttggcctttttcttattggcttattaagcaacataattaatatatattatgtcatgtatatataaacaatcttatcttgcagttccctagtttggcttttaacctatcgtcttttgagctgcagtttcaacccagtctgtacaggaagtaacaactgtccagaagagtctgaaagcccttggggccagcagccagtgagcggaaccagcacgtcctgacagacaggtttgccccgtcccttccctccctccccctccccctccccttcgcctccctgtccctctccctttcacccctcttcgggacggagccaaagaatgctccgcctgcgcgcgccgcttccgttgccatagtggccgggggcgggaggctggcgcctcccagcttctgtactccgcgaagcaaaacctagggagctgaggcctaggcgaggcgagagtcgccggcgtgcgtaacgttggcgcacgtgactccggcccggcctacagggcgcgtgcgcag

SEQ ID NO: 16467 - DNA, 2300 bp, Homo sapien
ggggtcagcccctccaggatccattcattagctaccccaggggaggtgatgctgactgagaaatttcttgccaagccaaccactgatcactggctccatgaagggcggcaggagccctaactcatttaatcctcagaacaattatattattattattattactattattagagacagagtctcgctctgtcgcccaggctggggtgcagtggtgcgatcttggctcactgcaacctttccgcctcccgggttcaagcgattctcctgcctcagcctcccaagtagctgggattacaagcatgcaccgccacgcctggctaatttttttttttttttttttttttttttttttagtagagactgggtttcaccatgttggccaggatgatctcaatctcttaacctcgtgatctgcccacctcggcctcccaaagtgctaggattacaggcatgagccacggcacccagccaacaattctaaaaggcgtatgcccacatgcccattttgcagaagagaaaaactgaggcagagacaggttatataatttgctcaaggtcacacagcttattctgggattcacacccaagcagcctgattcttgagtgcctactcttaaccactgagtcatcctgcctccctagggactttggtgaatctctcagcaaggtggatgggtacctctaaagctagcttttgatgacttctccccccagtctgttcctgcaagtaactctaaacacattcaccctaggcaaagaacaagtggttttggaacctgcattctctattgcccctttgagactcgctctgggcttggccctctctccaagggacaaccctctctctgtctcctcctgggttcccctctcccccagcgacctccttttcattctcacttacctccttgcctttcactctcctcttggaaggtggttcagctaacactcattagcacatgttaaagatcgccaattcatgtctcagtcactccgtagcaggagaggggagaaaggagggatgatgctgtcactctgtgggtaatgtgtcttaccttaccacaccacaaggccaggacagacccctaagggctcagaccgcaggagagaatggggagagggcccagctccctgctggggagtcctgtctgctgccctcaggatgtgcgctcagtagctgcgtctattttctctgagaccagctcagaacatccccaagacagagttggacgttgttctctgtccactggagcaggcacattcccacgatgtccctaggtgggcgtggttaagacctggtacgggttgatctagttctgccaccccctggccaaatgtctaaaagccccccagagcatggccagcgtgaggcaggtaccaggggtggagggaggctccgaggggacggatatacgaagacccaaacagacagtggaagccccccacccccaccccacaccacttccatcggaatcctcccggggcactgctgattccagctgctccccactaaagccttgagaactcttggctgctctgcaagactgagccccatgaaggagccacgtgcggcgtggaaagagtgctgagttcaaattgtagccctgccactaatttgctgggccagtcacttaatcatctgaagtcacaagtacctcatcagaaaagtggtcccagctcttcctgctgtggaaggatcagaagagaggaggcacgacagagacctagtgaactccgaagcccgagtgctaaatatttgtcaagtttgtgttagtattactattagtgttgttactgctgttattattattgctactgccagcaataataagtggtggatgtactcaagacggtcgggagggaaggcaagggcagcctctccctcattttcaccgaaaatcctccgggtgtccctggccccgcgccgaggggtctcagcgcagaggtaagggccctctaggagtccgggccgagcctctcgcgccgccgcccccgccgcgccgcgccccggtcggattccctgagcgcgcgcgcccccttctggcggccgggcgcaggcgcaggctccagagcgtatataagggcagcgtggcgcacaaccccagcgcgagtgccagagcccagccggcgcggagcgggagcggtgcaggctgaggtctccgagcggctcgccatggctggcccgcagcagcagcccccttacctgcacctggccgagctgacggcgtcccagttcctggaaatatggaagcactttgacgcagacggtcagtaaagctcccaacttctgtgcccattggcac

SEQ ID NO: 16468 - DNA, 2300 bp, Homo sapien
gacgaggggcatcacaggtctctaaagctgtcctgctgccatccaggagtaagtatgtaagtcctaataaactcatctacttgccaagctggactcgtccaaggcattctttggtctcttggctccctcccaaggggatagtttttttttttaaatacgattccaggttttttcctgttatgacattatatagattttctacataatccttgattacttttacctaattaaaccaagatggccagtgaagaactaactctcacaaaacactgagctcagatgtgtcatgagcaaattctttcaatgtttcggaaatgagtaattctaacactatgtaaaccgtagcagagcacagcaaagtaagtttcccaattctttttatggtgccagcacaatactgatgcaaaaactacagaccagtctcatttatgaattctaatgcaaaaattctatcaaggaatagactccaatagttcattaaatacatcatgagtaagtaggattatcccacgaagatactaattagtatatttttcacattaataaatcaaagaaagataaacacactgtccatctcaacagatgccaaagatgtttaacataattcaacatttgtgcctaattttaaaaacttacacactagagaaactctcatatgtaggaagtacgtacaaaaatattatcagcacattttaataacaaaacactgaaaacaacccacatgtccattgaaaatacatcgataaattttcatacagtttttacaatggaacattacccagaagctacacacagaatgaatttggaaacttaacattgaattatgcgagtcccagatgacttatacacacaatggtgccatttatatgaagctcaaaaaaaaaatttaagtacattgcttacagatacatgcatatgtaattattttttaaaataacagggctacaattaacacaaaagtcaatataactgttacctctaggggttggaggctgggagttgggttgaggaggaggaacacattgataaattcagcagtactggcaatcttctctttcttaattgggtggtgtgttcatggatgtttactactatatatgtaacatataaatatatattttaaataaatatataaaccagcaaggatggggtgaaattgaggacccaaaatgtaatacaaagaacagccaatgtgcttaactatactacagtgaacataaccacacttaagtggtaggaaagaaaaggggtaagcaactttggaaaacagtattttgactaaataccataagagtaaagacaaaaagacctgtatccaagtactgtactttaggtagtaaatttgcttttcatgggggtatgaattagcgattctgagactactaaatatattctaaaactgagtgaattcgtaattacgttgtagaagtcattcccaggtcactgtcaaccctgagccgagagaagcagggctgagttaccttttgggactgacactgctccaggagacaatgtcctccaaaagccgggctgcttctgctgccgggtgactgggaggggctctgcgctcccactcggccctaattcatgaccctatgtcaggagcctgggagcacacggtccatactcgggatgcacataggttaatgttcctgccagacctcagcatgtcaaaagacttgtggtatcacctcgggccgcttcacgcccgcaaatattccatcttttagctgcaccgacacatcttcccccgtcgaccaagtgctaaatgctcagggcctcgtggctgggacagcaacgtgcgtttccccttccaatgggcgcaagctattgagccacaaagaccaaagctggagtcgaggagcgcggaagagcaccccgggccgccgccctgctccctctcccagcctgggcctcctggcagcgtaggccacgggagaccctgcagcacccagggtgggagtgcgtctcaaccggacccagagcctgggggacagggcacggcacacagcgcccggagccctgcactcacctccgtagcggactgctccccggcgctgccggaagtgcgtcaccaggcggccgggcctctctaggagcaaggtcgctgcgcctcggtggtggtcacgcccggccagctgtggccgcatccctgtcggctagctcgggtctggcccacggtgactgttacccctggggaatggggcaggtaagaatcagagccaagcggggacccagcccggggaggtgaagctgcaggtgcagccacgtgtgggagtcttggaaatggaccagtggat

SEQ ID NO: 16469 - DNA, 2300 bp, Homo sapien
tttaaggacacagcatcacattttcttacagcctgtttgccagaagttggtcacatggacacactttgccttaaagaatgctgggaaatgtgtgctttttccctgagctgtcatgtcccttgctagagattctgtaaccttataagaatggaagaacaggggctgacagacaagaactgatctccatctctccagacctaccatagagcttttgaaacttggtttgtgcattattatctcatttttctgatatgtctgaagtaggagtaggagctttgtggttatttagagagctttattttctcaactgtaaaattaggcaatgggtttatgatgcaaacatttggggccagcatttatgtgatctgattccttcctatttctttcaacaagtcctcactcctgatttctgaccctagaaagaagtgaaaaccagaacttattgacaagagcaacgtaatccccagctattactctgcccaatcattttcttaatgaactcattttggaaaacagtgaagatcagggtcagggcaaggcagagaagggcacctggccatggtcactgtcaaggtccaaggcataagacatatcctacccttggggacacacaaagtaggcttctgcctaagagttagggctggagcctttggaccattgtcaacaacaaatgtttattgctctccttctttctgccagttattctctagctgaggatgatgatgttgaacaagatagatacagtgtctgttccctgcagccaccagagaagacagacatataaataaactatcaccattaagtaagtacacagtgctgtgatggcacataaatgagtgtcctgccttattctgggtgatgagggaaggcttgcttcccatgcaaaatgggatttgagctcacacttccagtaacagtcaagatggagggtaggaatgggaagggaagggcattctagatttagagaacagcatttttagcatgtagggctgaggtagagtcagggaatgaatgggagtgataagaagccacagaggcaagtgggagccaaataccagtctccagtgcagcagcgttggatggatcagagctggaaggaagaaaagcccacattaccagggttagggggtgtgtgagggggtggggattttaagggtcgtccaatccagtggcatttagtactgtctcccttcccccagggctcattttggaattttatggtaggtattttgttatatttggtgtcagtggtaacattgctactagcgttgtggataggagccaggatcctgcaatgtacaggacagtcctgcccactgaaaaaatgttcacactttcaaatgtcttgctgaacattcaggtaggtgaaaattctatttctaaattatctgaatctaaacctgttttctggataaacatgtatttttgcacagttttaacatacactgatcttccaggaatgtaattattgtataatcaagagacgattgtcctgtgtttcattcagaacttcacgaaaacatgtttgccattttggatcataattttgtgacttttgcaacaatgtaagtcacagctttgtggctgtggcactcagacaacgtctatgtgtaaaggcgaccaccttattaggtctcctgcagcagccaagaccaaacacattgaagtatgtgtttttaaacgacagatgacggtcctcttttttttctctttcattacacttaaggcataacattagtttttaatatgtaggtgtgtatgttatgtatgattttctaggccattatatatgaatatcaggtcaggagaataagatggacattacaaactatttgttagaaaaagggggcattgggtgtgacagcgcgccatccactggtccatttccaagactcccacacgtggctgcacctgcagcttcacctccccgggctgggtccccgcttggctctgattcttacctgccccattccccaggggtaacagtcaccgtgggccagacccgagctagccgacagggatgcggccacagctggccgggcgtgaccaccaccgaggcgcagcgaccttgctcctagagaggcccggccgcctggtgacgcacttccggcagcgccggggagcagtccgctacggaggtgagtgcagggctccgggcgctgtgtgccgtgccctgtcccccaggctctgggtccggttgagacgcactcccaccctgggtgctgcagggtctcccgtggcctacgctgccaggaggcccaggctgggagagggagcagggcggcggcccggggtgctct

SEQ ID NO: 16470 - DNA, 2300 bp, Homo sapien
tctattaattttctattgctgctgtaacaaattgccatgagtagtggcgtaaaacaacactaatttatcttagagttttggaggtcagaaatccaaaatgggtcccactggtataaattcaggatttagactaaggagagaatctgtttccttgcctttttcatcttctggaggccacccactttccttgacccttggccccttcctccatcttcaaagccagtgaggttgggccaagtccttcttgtgctgtcatttttgtgattctctttcaattccctctttcacgttcaagaactcttatgattacactgggcccacctgaataatccaagataatcatctttttttttttgacagggtctcgctttgttgcccaggctggagtgcagtggctcaatcaaggctcactgcagccttgacctcccaggctcaagtgatcctcccaactcagctagtagctgggactacaggcgtgtgcccacacctggccaatttttgttcctttttggaattttttttttttttttttcggtagagacagggttttgtcatgttgcccaggctggtttgaactcccaggctcaagtgatctgcccacctgggcctcccacagtgctgggattacagatgtgagccactgtgcctagccccaagataatcttaaagttggctgactagcaatcttaattccacctgcaacctcaatttccctttgtcatgtaacttaatgtactcacaggttctagagattaggacatatacatctttgaggggaacaaaacaccattctgcttaccagagggaaaatggagagtgactgctgatggttatgaggttcctttggggagatgaaaatgtcctgaaactgattgtggtgatgtttgcgcaagtctctgaacacactaaaacctatttaattttatactctgcattgatgaattgtatggtgtgtgaattaaatgttaataaggcaggtgtgtgtgtgtgtgttcagtatttttgaaactaaattctttcaccttcttgcctgaaaccagctcctcttcttcaattcctgatctcagctaatggcaccttcatctatcaggtcatccaaaattcatggctattatagattgctctggctgccttgtattcagtcattaaaaaaaaaaatgtccaccgttttcacttcctaaatagttacttaatatatccctccttagacctggtctttctttctttttgtttttttttgtttttttggttttttttttttttgagatggagttttgcttttgtcgcccaggctggagtgcaatggcacaatctcggctcactgcaacctccacctctcgggttcaagcaattctcctgcctcagcctcccgagtagctgggattacaggtgcccgccattacgcctggctaatttttgtatttttagtagagacgaggtttcaccacgttgaccaggctggtctcgaactcctgacctcaggtgatctgcccgccttggcctccgaaagtgctgggattacaggcgtgagccaccgcgcctggcctgctgacctggtctttcttaacgtgtctgggtctttacctctaaggaggacagcttttttgtgcaaagaccctttggcagtctggtgacaccttcaaaaccaatgaacatacaattaaacagttttttagaatttgtgatacagaaatataagtgcagctttaccaacgtgatgaaatgtaatgacaagacttgaggtgggcccgataacaacaaggacaatttcaaattagtgacgagaatagccatattctgagatctgcatcaactgtaatgtgatatgaaaatatctgtgatttctatcggtgacagtcacagatacggctgatactacagtagtttgttgccaacatagaagaaaatgctaaatttcggttagagattagcgaaaacaatgatatactttctttcctattcaaggtctctgaggatccccgggtggaaactcctcccgggagtaaaaccacacaaccactgagaagaccgctccggcatcctagagagtacgcgtgtgagcctgggtgcaaggccaaagtagtgacgcacttccgttcacgcaccgctttctgtttttcctgaggtgagtgttggggtttgtcgcctaggagtccttgctaggctcaggcactgcacctctagagaaggctgtcggcttcgtccctgctgcctcagtggagggagacagggcggcccctccgggaccggggagcggaggctgctcgcgggccggtcccggtctccctctggtgccttcg

SEQ ID NO: 16471 - DNA, 2300 bp, Homo sapien
ttgaaggcacagagaatctaggtaacttgccccaaatcacagttaataaatggaggcttggaaacattagtttggcttaacatatttcaacttcttcactatgagacacagaactacgtatctgaggcagtgatagagtgcttatgtgtgtatactgaggccaaactatcatggtttgaattctggctctgccacataagagctgtgcatgactttgagcacgttatttaatctttctgtgttcagtttcctcatctgtaaaatgggactcgtgtcatcttatatggttctttggcccttatttcagaatttgatgatttttcctcttacagttactgttgctcttctctctctctcttcctgaagggactgaggtcagaaagcttgtgtccacggtgtgagagcatagaaaggcgtattgggacttggaataccacttagtatattgttctggaaagccagtttgacatggtggaaataatctagggtttaaatcttaactctgatacctattatatgctgtggccttactgaaactctttgagtcttggttttctcttactcatgattcattctgcgttgagtgcttgtattatctgtcccactctcccttatagtaagggagtataatcatatatgtccaactctttattcatcaaaaaatgattattgatcatgaactgtgttataaacactattctagaaactcaggatacagtcatggacaagatagaaaagcctctttcttgaggagtttacactctgcagaaagcctgagggttgctcttgaagacctggatcatggtcccatttgtctggacttgtgttgctgaagtcccaactgaacagcaagtccaactagtcatcctggaagtcctcagctcatgatgagctagctattttagcactctgatcttctaagaaccaaccctgaactgccaccaggctttgcttatactatctagtctggtagtaaaaagtgtacagatgcccaaacccactgaggtttataaccattttcaaaggttttaataaaaagattgaatactggattaactccagagcctattcaggctcaattcctaagctattaataatcgctaatatctagtgagtgtaataattactaatatctagtgagtgtttagtatgtgctagacattgtactgatttacatgtactaacatctaatcctcacaacaatccggggaataaatactattattatcctagttttagaaataaatgtgacacttacaggttaagtaatgcaccaaaggtcacagagtggtcctttggcctttgaaacaaagcatcctgatgccaggctgtgctccttaccactatgtcatactgttgtaaaggagatgggactaagaagctctaagtccccagtttgttttgtaattctgtgacagtgatcacaaacgttttgacagtccagcaaaatcctggccagagttctcttttgtggacccagaaagccacaggcactaacactttagagctatctctcttagcccatatgccctgcgcttttggcattttctttatcatttagaggggaaggagggcaagggtctgaggagccttgaatggtgacttggactccaggggtagtggcaaaccattggaggttacagtgcatggaattaaagacagcttgaatggtataatctgactggctcattttacagaagacaaaagctgctcagagacacaagggtcttcctcaatggcccgtgagtggcagagcttgtgaaaggaagttgattcactgcgagtgaaccagaactcagaaagaccagtaagcaaccaggaaacaccggccaccatctaggcctgtggtgatggcggttttatcacgaattccttcctgacaatcaactgctcccgggcagaagcgatcgctttcttgacccacccaaatggacaatgacccaggcgtgaggttcctgaggagagaaaaaagtgtgtacaaggaaaggaagaggatgtctcccaatcggaaacaccgagatgcggaaaagttgcaccgtagaaagagcagccgtgctcatgacgcacttctggcctccaagcgccccacaagcgtgacgcacttccggcctcctaaccgttctcgctagcggtgcgcttctggcctgttttgagtccgcgctcaaaggtgccaaagtgcaaggacccacagttgggcggagcttgggttgggagtgagacagcatagcagtccaggctggtcctttgagcgcagctcaaagaaggggacggggagggcgtcactatacaattgtggccgg

SEQ ID NO: 16472 - DNA, 2300 bp, Homo sapien
ggtaagtgtggaagtgaagaaactgcaatctcatttggagtgatggtcagggtaaggtagcaggagtaggtagtataaccagcagaaagatccttttgacccctgagaaaatcagagtctaggtcagtagctgaccccaggtctcttcaccactcaggtgggtccccagacagtaaagatggtaaacttccaagggcaaagatgagatcagcgactccgctgaatagtggtccccaggagacaattgtctaaatcacttcaagtacacacagccttttgtacggattttaaacttgggattccttggcattgcacatgattttgtgtttgtatatgagcaattgtacatttttctacagaggtctatatctgttatcagattttggagactcaaaaagaaaaagattagatctcttacttgactgcacgatccaatatggttgcactagcacgtttcaggtggacagtggctactgtatagtgcagatatggaacatttccatcatcacagagactgttattggacagtgctgccttagagacgtgggctgcaggacttccacaagaaggcctggatatcagacaccagcattcaaatttcttcccagtgctgtggaatgtggtagacccttggaagtccagtatctgaacatgctggtcaccaccgtatactagtgaccagaggatgcctttcttcagctgcttggcattctgccagcatgaattcctagcacgggaaagatggcaggtgatctgaattacttggggttatggtgtatttgagtgacctcactatatttgggaaggcgctggaaaaacacgaaaagaatgttagaaagggctggaataaaactacaggagtcccctctttatccacggttttgtttcccagttttaactactcatcatcaaccacgatttgaaaatattaaatgggaaaattacagaaataaacagttcatttattacatactattctgagtagcatgatgaagccttgtgccatctcgctgtgtcgtgccagcacctgaatcatctctttgtgcataaaagcaaaactaccgactgcccagttctagtgcttccagttacacctctgcccaaagtccttcactggaggaagagaaatttctcttctctctgccagagagaaacaggaagggaggaagagccacacaattgaaatcaagtcaaggcaagcaccacaggttcttgtcatttgtgcttagcggacttagctgatggaaatcggcaaagatcatcccaaagctcacacaactccctgcctgctctctctctcttccaaggtctggaaaaggaagtggcagctgagttgcgggggtgggtggcggtgggaaggtattattattcaaccactttttaactcttatattgtcatattattgtgttaggagcttcatacgcattaatcctaacattcacaacaatactgtaaaatagatattgttacccttatttaacaccgatgatattctagggctcaaagaggtggtatgacttgcccggcaagatcttggacttgaaagtctgaggcttccattctccaccacaatttacgtttattcacgggcatccattgtttcagactcatgacaaccgtgtaaagtagcacggagtaggtaagtgatttgcccaagggcacacagcaagggagaggttgtaatctttaatgataatttgtttctttttttcttaaaggggacttttttttctcctgtaccaccaagccagtacatctatgtcctcccagaaaatatttattacctcttgtagcaagggtgaagatattgaatacaacacagaggctgagaaatgttacctccctagacccagggtggagtgagcaggcaggtgtaatgcaagaaataactttcacattttctccttggagataagaacaaggtctaaaaatcaggtttgagattttgtagcctttcggcttgtaagtgtcatgaaatttccctatcagcctcatctactagctccctgggtctctctctctctctttctctttttccccacctccccactctgcccatagggagttgaccttcacagttgcctttcagtagtcaacatgccaggatgcctccagtctgggggaaaatgcttcctcatttgcttctcccagcccacctcaagcagtctccccaccccttgagtctcagcagtgttaaagctgttactttcacagcttcctgggagcgagtgctttctcaagcccgtcttgcaaggtgggtccttttttgtttttggcagaagggagggacagtgaaatg

SEQ ID NO: 16473 - DNA, 2300 bp, Homo sapien
acagccttttgtacggattttaaacttgggattccttggcattgcacatgattttgtgtttgtatatgagcaattgtacatttttctacagaggtctatatctgttatcagattttggagactcaaaaagaaaaagattagatctcttacttgactgcacgatccaatatggttgcactagcacgtttcaggtggacagtggctactgtatagtgcagatatggaacatttccatcatcacagagactgttattggacagtgctgccttagagacgtgggctgcaggacttccacaagaaggcctggatatcagacaccagcattcaaatttcttcccagtgctgtggaatgtggtagacccttggaagtccagtatctgaacatgctggtcaccaccgtatactagtgaccagaggatgcctttcttcagctgcttggcattctgccagcatgaattcctagcacgggaaagatggcaggtgatctgaattacttggggttatggtgtatttgagtgacctcactatatttgggaaggcgctggaaaaacacgaaaagaatgttagaaagggctggaataaaactacaggagtcccctctttatccacggttttgtttcccagttttaactactcatcatcaaccacgatttgaaaatattaaatgggaaaattacagaaataaacagttcatttattacatactattctgagtagcatgatgaagccttgtgccatctcgctgtgtcgtgccagcacctgaatcatctctttgtgcataaaagcaaaactaccgactgcccagttctagtgcttccagttacacctctgcccaaagtccttcactggaggaagagaaatttctcttctctctgccagagagaaacaggaagggaggaagagccacacaattgaaatcaagtcaaggcaagcaccacaggttcttgtcatttgtgcttagcggacttagctgatggaaatcggcaaagatcatcccaaagctcacacaactccctgcctgctctctctctcttccaaggtctggaaaaggaagtggcagctgagttgcgggggtgggtggcggtgggaaggtattattattcaaccactttttaactcttatattgtcatattattgtgttaggagcttcatacgcattaatcctaacattcacaacaatactgtaaaatagatattgttacccttatttaacaccgatgatattctagggctcaaagaggtggtatgacttgcccggcaagatcttggacttgaaagtctgaggcttccattctccaccacaatttacgtttattcacgggcatccattgtttcagactcatgacaaccgtgtaaagtagcacggagtaggtaagtgatttgcccaagggcacacagcaagggagaggttgtaatctttaatgataatttgtttctttttttcttaaaggggacttttttttctcctgtaccaccaagccagtacatctatgtcctcccagaaaatatttattacctcttgtagcaagggtgaagatattgaatacaacacagaggctgagaaatgttacctccctagacccagggtggagtgagcaggcaggtgtaatgcaagaaataactttcacattttctccttggagataagaacaaggtctaaaaatcaggtttgagattttgtagcctttcggcttgtaagtgtcatgaaatttccctatcagcctcatctactagctccctgggtctctctctctctctttctctttttccccacctccccactctgcccatagggagttgaccttcacagttgcctttcagtagtcaacatgccaggatgcctccagtctgggggaaaatgcttcctcatttgcttctcccagcccacctcaagcagtctccccaccccttgagtctcagcagtgttaaagctgttactttcacagcttcctgggagcgagtgctttctcaagcccgtcttgcaaggtgggtccttttttgtttttggcagaagggagggacagtgaaatgtgctctgagtagggacggttatgcaaaagcaagtaggaggaggaagccaagaggggagttggtgagtcagaggagaaaagcgcatggcccggctagcagtgagcctctcaaaagcagcagggaagcccaagccacaaggtaagaagagaatttctgtgtacgactccaatgcagagccattacccagagctgctggagcaagagtatcagataacctctggcagctaagctagagattacagtggcgaaggcggtttgcgcagagggg

SEQ ID NO: 16474 - DNA, 2300 bp, Homo sapien
tttattatcatatattttattatatattttattatatatatacggtgtactgagtaaaataaaatacattttatatatatatatacatatatatatatatatatatatttttttttttttttttttctgaggcaaggtctcattctgtcacccaggctggagtgcaatggcatgatcacagctctctgcagccttgacctcctgggttcaggtgatcttcctacctcagcctcccaagtagctgggactataggctcatgccaccatgcctggctagtttttgtatctttttgtatagacggggtttcactatgttgcccaagctggtcttgaattccttagctcaagtgatccatccaccttggcctcccgaaaggctgggattaccaaaggtgtgagccaccatgcccagccccaaaatattctttaaacatgtaatcatacaaaattatatgagatattaacattctttttttatactaagtcttcaaaacctgatgtgtattttacaacacatcttaattcagaccagtcacatttcaagtattcaacggccacttatgactagtagctacaatattagacagtgcaactatagaccacgtttactctccatttttttagcaactcccaaaccagctttatacgtattgtaataaacatagaaaacatttggaagggtacacaagaaatgactaaaaatgatttttttatataaaatgagaatgcagggagggaaggtgatcagggtttaattcacgtacatctctatttgaatttattatataaggatatatcatatttactaaaaatgtaaaagagaaatgcttattctttgcaacacagtccttgtatagaaatctgtcttaaggaaataatcaaatatgtaaactaacatttatgacaaggatgcccttggcccaagacgtgaataattttttctagtgtatccatgctatagacgttacctgccattactgtataagaaaaaacatagtgtacctagggctcagtactacccatggtttcagacatccataatttcaggcatccactggaggtcttggagtgtgctccctgtggataaggggggactactgtattcaaccccactggaggcttgactccctgaaaagtgaatggagaagaacaaactgatgtgaaaaatctttgtcttccaacaaataaacagacaggatctgagccctggggagatcactgaggcttctcttaacccttcagtgggtggtattttccatctgctcacaggaatgttgagattttggctgtggaccttgtgttttgcttagcaaagttgttttgtgtggatcgcacctgacattttaaattcttccaacaaccataggaggtaaatgaagaattcatgcacagtgcaaggataaaactgcacaggtttcagctgccttggacaccctgtgcttttcagctatttgttgaatggaacttaagtgcccaatttgttctgattggagcaaaactttgtggactgacaaggatgggcgtccaagatgtaggaagttaaaaaaaaaatgttgccaaacaaggtgtagagcacgatcctatctgtgttttgaaatctatgaaattatgtatctatgcacctatatgtaatgtatctatctctgaatggagggaaagagcctgaccattaccaccctctacccctgggagtgagaatgaagtgtacagggagcaggtgcaaggaagaatgctcacttcttactttatatatttctgtactgttaaaattttaacaggctgttttgtaaaaaaaatttaataaaagctatcaactgtaaccagaagtactttctgacagtagatgttctcaaaccatctcaccaagtgcccagaaagagttaacacaggagaattccagatgtttgaagtgaggacaaattcctgctttgagggtgggaggtgggcttagggatgagaggcaatgacgggggagaggaggaaagaagctgaggggagagctggctgctgagttgtcattccaaccaatggcatgaaagtttcaagcccaacgcccatttgtggagactatttcaggagttaggatttgcatctgagttcattgcccctgtaacctgtcaaagaagagctaagggagctttcggggttggcttcttggaggctgctttctcctttacttggaaggtaaaaatctcaagcccaagctgatcaggcagtggtgactgattgagctgttaatttttttctttttggtgtattgatttctttttccagctagggctgtaacatgcttatgggat

SEQ ID NO: 16475 - DNA, 2300 bp, Homo sapien
cctagggactctgcctaaggcctcttctccattctactttcctcctttctctactcccacagagcatctccagcccaatcctctccccatatttcagactcatatattcaactgcaactagacatctacacttggatgaattatagccatctcaaatttaccatgtccaaaatggaactctctaatttccccgcaaatctggttctgtccagtctcccccgtctcagtgaaaaaccccaccattcacctggtcactcctcccctcccctcatttccccacatctgatccatactgtaaattcttccccaaaactacaacctggatctgtcaacttgtcactgtctccatggccaccgtcaccctcacctggactccttcagcagcagctttgtaactcatctcttccctctactctgggcctccatcatccaccctcctcacagaagccagagtggtctttcaaaaatatcaatcagaaaggtttactctcctcctcaaaatcttcaatgttctcccattgtttagaataaaaatgcacactgtcgtctacaccatctgcctggtccacttctccagcctcaattcatgcccaccaactctactcccagggacctccttgtccagctcccgcgttcctcaaccttctctctttctgggacattttctcagccttcttgtcatccagaactcaattcaaacgacatcttcccaggtctatatgaggaaacctgcccttcccattaaactttagacactgtcttctttgtttactacctgttttcccttttcctgacacactagaatgcaatcaccctgcaagcaaattttccactatatctccagtacctgctaaagcaggtgctcatacatatttgctgaaagaattaattaccagatggcaattgtatatattttgtaatatccttacttggcagaattaaaagctgccaattttgtgtaagtccccattttaaaaaacagggctatttgtaagcccaggactattgtgatagatgaactggctgcaagccccttacaacataggtgttataaggaaaacaggagaagggagaaagagggacagtggatgggtggagggagaagtggaaggtgggtgactgggtggatgtgtgggtaggttagtggccagatggatggatgaatgggtgagtggatgaatggtggatgggtggatgcgtgggtgggtggctggatgggtgagtgggtggatgaatgggtggatggatgggtgagttggtagatgggtgggtgagtgggtgggtggatgggtggatgagtgaatgggtgggtggatggatggtggatgggtgggtgagagtggatggttaggtgagtgggtggatggatgggcaggtgagtgggtgagtgggcggatggtagatgggtgggtggatgggtgggtgagtgggtggatgggtggatggatggatggagggtgggtgggtgggcggatgggcaggtgagtgggcgggtagatgggtggtggatgggtgggtgagtgggtggatagatggatggatgggtggatggttagatgggtaggtgagtaggtggataggtggatagacgggtgtatggatgggtgagtggttgaatgggtggatggttggacgggtgggtgagtgggtggatgggtggatggatggtggatgggtgggtgagtgggtggatgggtgggtgagtgggtggatgggtgggtgaatggatgagcgggtagtgggtgattgggtgaatgaatgagtgtctggctgagtgagtgagaggatgggtacctctgggaaggtaaatccaagttgcagtgtaagttgagccaggggaggtggccacagttggctcccttaggccgcccacctcgtggggtcaccaaggggttacttcggggcagaaaggtgcggctgtgggtcgccccgcccgggtttccagcagcagcaccccagcccccacccagcacacaggcacccctcccgcccgggccccagacgcgctcaggccgccccctgagggcgcccgttctcaggtgagctcccggactagcgcgcatgcgcacaggtgagtgcccgccccgcccccgggcttggccacctgcccaagaaacttgttggttgttgccctcaggtcgctcccgggcggggacacggaacccggccatggaagatccgtcgggggctcgcgagccccgggcccggccgagagagcgggacccgggacggcgcccccacccagaccaaggccgcacccacgatcgaccgcgggaccgacccggggacccgcgcaggaa

SEQ ID NO: 16476 - DNA, 2300 bp, Homo sapien
ggcaggcatcatcacacccagctaatttttgtattttttgtagagacatggttttgccatgttgcccaggctggtctcgaacccctgggctcaagggatctgcctgccttggcttctcaaggtgctgggattacaggcatgagccactgcacactgcctgctacctctcattttaaataaaggtcaagataaagtcattttggaagtttcctcttcatctaccagaaggaacatttatttatttatttaagatgatatcttgctctgtcacccaggctggaagtgcagtggtgtgatcttggctcagtgcaacctctgcctcctggcttcaagctattctgctgcctcagcctcccaagtagctgggactagcgctgccacacctagcaaattttttgtatttttagtgcagacagggtttcactgttacccaggtgggtcttgaactcctgagctcaggcagtccacccgcctcggcctcccaaagtgctgaggtggcatgagccaccgcgcccggccatttatttatttatttttttgagacggaatctcgctctgtcgtccaggctggagtgcaatggtgcgatcccagctcactgcaacccctgcctcgcaggttcaagcgattctcctgcctcagcctcccaagtaggtgggattataggcatgcgccaccatgcctggctaatttttgtatttttagtagagacggggtttcaccatgttggccaggctggtctcaaaactcctgacctcaggtgatccacctgcctcggcctcccaaagtgctgggattacaggcatgagccaccacacctggccagaaatggttcaacaaccatttattgagcaccttcaacatgcttttatacctcagttccacgagacacacacctccctaggccagcatggcagaaatgaatcaatgtcatgctatataaattccccggtacaccaaaggccacaagagtatgttagtatgttagaacacattccagtgtgtgattcagtggggctgagttttgcctctgctccttaaaagttttgtgacttcaggcagttacttaacctctctaaggctgtttttctcattaaatgttaatactaatatcttttatcaaaggtcttctttatcacagtactgtacatacctggcacacagtgggcattaactctttcataaaccacctaaccttgaagcttgtctccttatcggtaaagtgtgaacaatacacgttggcctgtctgactgacaagtggtagtaagagaagacttgctaaagcatcgtgaatgttataaagccgtaagatgtgggagtgttgttacagtgatggctccattcccttgagaggagctgcctctccggagcagtactggcgctgggcctgggcacaaggttggggtcagataggccaaagtctccattttatcaaccaaaggacccagacgtgggcaaggatctaataaggacctatttcggggaatacatgctaggtgagaatagtggctggggttggtggtatttctctggagggtaggtggagagtgggtcgcttgattctggctgcagttatacttctcatctaccactgagtgaaaattgtgtgggactctagccactgccttgggctaagggtgatggagtggagacacttttctgaggcaccacaactttttttttttttttgagacggagtctcactctgtcacccaggctggagtgcagtggcgcgatctcagcccattgcaacctctgcctccccggttcaagcagttctctgcctcagcctcccacgcagctgggattacaggtgcctgccaccaggccggctaattttttttgtattttttgtagagacagggtttcaccattttggccaggctggtcttgaactcttgacctggtgatccacctgccttggcctcccaaagtgctgggattacatgtgtgagccaccgtgcccggccaagacaccacaacttttaacctagcgatgtagatctccagttgattattttccaagctttatttttataaaagtataatctagatcttttccgcttaggtaggaggcttagcttcgatcctttgtcctgaacaggttccataagaattcactactaaaaagcaagaggacaattagcaaaaagaccataacgagaatgtatatttctagttgcatctgatttgaactaatatatttggggcaagctgtaaagtataagaataggtataaaacacgtaagattaaaattactaaaagaactttatttttaagattcagtgttagtgatctgt

SEQ ID NO: 16477 - DNA, 2300 bp, Homo sapien
tatttttctacaacgtggagaaagcaatattgtcttcaatttagaaatggagaaaacagaggtgagcagaagtaaatgaataggagacgtaaaaaactgtttagcccacagttgtctggcttgttctctctttagcagcttatacatctcttaatgtataatacagttgattggatagtcttcaaaataaaatctttggaaattctaaaacgtatttaaaggaagttttctttatgtaacatttaatggagtattgatgcagttgttaatctacaaatgtttgttagcaatgcataacgctgcatttggtccttatggtagtctgaatgaaattagtttacaaccttagaatctttagtgagtaacttagctgtagcgaactgtcagtggtatttatttaatacaaactctggaaagagctttgttgagaccacagcacaagcagacacacagtacctgccattagcttaaaagctaattcgttatgtaaaacttatatttcaatataaaaagtgaatcagggattatggatcatacaacatgaagaagacctgagaacacacaagtttagtaataatagctgccttttattgagaatgttctgtatatactaaacactatgttagcaaattttaaaattataccatgttttatctactagactggcaaagattaatggatttgtaatattcagtgttgacaaaggtgtgacaaactggcattcttaatagtcttcttgtggaagtatagtttatttttttttgaaatgcagtctagctgtgtcgccaggctggagtgcggtggcacgatctcagctcactgcaacctccgcctcctgggttcaagcgatttctcctgcctcagcctcccaagtagctgggattacagccatgtgccgccacactcagctttttttttgtatttttagtagagatgaggtttcaccatgttggccaggatgttaaccatctcctgacctcgtgatccacccaccttggcctcccaaagtgctgggattacaggcgtgagccacctcgcccagccggaagtataatttcatatactctttcaagagctcagtttggcaatatattaaatctctaaaaaatgtatatcctttgatcccacaaattctgtttttaggaatgtaccctaaggaagtaattggttaaggatacaaagatgctcattacagtgtctataatagcatgtgtatagaaatggaaacagcctatatgttctttattaggggattatggaattggctgaatacataatgatgctattaaaaccagacaaaaaaattttttttttcttctttgagatggagtctcactctgttgccaggctggagtgcagtggcacgatctcggctcactgcaacctcagcctcctgggttcaagcaattctcctgcctcagcctcccgagtagctgggactacaggagtgcaccaccacacccagctaatttttgtattttttttttagtagagacggggtttcaccatggtggccaggatggtcttgatctcttgaccttgtagtctgcccacctcagcctcccaaagtgctgggattataggcgtgagccactgcgcctggcccagacaaaagtttttctaaatggtgtcttcacagttcaaaaacatgtgaacatgatattcagcaacatcctttcagtaggcagtttgagagtaaaagatgaagttaggttagaatcaggcactccagaagcctgggaaaacaaccaggcttgtactttttcctctctacttggtttgcatgagttgagtaaaaggaactttgggttggataggatcaattagagaaaaactacgtggagatttttttttttttcccatttggaagcttagaatggcagcattccatactgaggtgacatgatggtttctatataggaaggcagcaaataaacttaaaggaggtgatgatctgtgtgtgttctgtcagtctcagatacttgaatgcatctgcaaatagtctggagtctttaccatccgcctgcactggagaggagagtttgagtatgctgcagctgctttatctgaccaacaatctcctgacggatcagtgcatacctgtcctggtagggcacctgcacctgcgaatcttgcaccttgcaaacaatcagttacagacctttcctgcaaggtaaaatgaatgcaaactttgatcatttcaaatacacaacattaattctatatttgtcagaaaaaatatagccatctgactatgactctttgtttacgttcactgacttacagatgctatgatttca

SEQ ID NO: 16478 - DNA, 2300 bp, Homo sapien
ggggtgtagtggcacatgcctgtaatcccagctacttgggatgctgagctgcaggagaatcgcttgaacccaggaggcggagattgcagtgagccaagatcattccattgcactccagcccgggcaacaagagcaaaagtccgtctgaaaaaaaaacaaaagacaagaaaagaaactgaacttattcccaagatagcaaattataatttttaatttcctttctaggccttttctgagtatataatgagtaaaatcatggaattccaccaggtctttaacttatttatatgtgcatagtacaaaatgctgtcaaaaatgtttgcaggtgcattttcctctgtactgtctgtgggagttagggccttagaaggaattaagacacaaagagatttgacctttgaaggaattgagatacaatgagatttaaatgaccttccctcaaccgtaatagtcagtgatagatggattcattccataacttgggtcccagtgcttcttggtctgcatatgttcagaacagccttggtgaattacttcaaatgtgcagttattgatgggacagtgacctctaatgctgccacaaaccattattcctatatgccaaggataattagtctttcaacataatttctgcactttagcctttgaaaagcaataaagtgtattgtgatttccaaattctctttttcttctagccatctttgcaggattttgtataagagattgttatagtataaggacatgccatcaaaacatgaatgacttttcttttcctttttttttttggagacagagtctcactgtcacccaggctggagtgcagtggtatagtcttggctcactacaacctttgtctcctgggttcaagcagttctcctgcctcagcctcttgagtagctgggattacaggtgtgcgccatcacgcccagctaatctgtgtatttttagtagagacagggtttcaccatgttggccaggctggtctcgaactcctgacctcaggtgatccgcccgccttggcctcccacagtgctggattatggtgtgagccaccacgcctagccatgaatgacttttctagtgatatattgtttctttttttagatcaatttttataacccatattatattagcatactattatagaactatcaagcttgttttgattttattgactattttacagttatattgtgttggctataaaatctggctataaaactagtcccagttttaagtacctattccattcttctgcccttttaaagagaagttaatattttttgagtgtcttttgcatgtttagcagtgtgctgtgtgcttggttatttacttttatcctcaaaacaggtgaagaaactgctgataagtagcagagctagtgtggctacagaaggccatgtcttttcatatcacactgcctcttaaagttttttccatttatttcgaatcatcttaagataacttcttgcgaccgggtgctgtgactcacgcctgtaatcccagcactttgggaggttgaggtgggtggattacctgaggtcaggagttcgaaaccagcctggccaacatggtgaaaccccgtctctactaaaaatacaaaaattagcctggcatggtggcacaggagaattgcttgagcccaggagacggaggatgcagtaagctgagatcgtgccactgcactccagcctggctgacagagcaagactctgtcccaaaaaaaaaaaaaaaaacccaaaaacaaaacaaacaaaaaagattacttcttgcatgaagtgttaactttccatctttaatgatatgtgtttttttttaaccttgtacttatagagactttataatttatacccttgtttttcaagcagcttatggttttaggaaaaagtaaaaattaactggtatttataaatgaataattggatcttattgccttttttttcctatctttttaattagcgtctttttgtgtaaatgccattccattctttgctgggtgatagacatccagtactagctcagaaggctcttctctttgacattattcaggtggtgtcccagcgaatcagtaccgtggatctctcgtgttacagcctcgaggaggttcctgagcatctcttctatagtcaagatattacctacctcaacttgcgacacaacttcatgcagttagaaagacccggaggcctcgatacactctacaagtatgtggagaatgggtttccagactaacctgttaaaaccaactcataatcagtatcttatggcttctacctgctaccattgtatgtatattctaa

SEQ ID NO: 16479 - DNA, 2300 bp, Homo sapien
ggtgtactcaaggtgaagaagttcttaattctgtctagataattcattaattctgtctagtaaaaatgtctggtagtcattaattctgtctagggagaataaggataggagatatggaaggctccatagagaaggtgatgcctgagtaggattttgaagaataacttgtcatatggatgaggtggagaaagccatttcagacaggccacagaattgtggtgtacttggtgtgtttggagagctgcaggtagttggaggtgattgaaacatggagtaaagggcagtagtagggaacgaagctggagaggtatggctgcggaaatgtcagtggaaatttcttttttatcaaaaagaacagaaatagcccatcataaaaatagagcaggcaaatgctgatctttagaaacttgttatattacctgtagaaattgtttttgctttgagataacttggcaatatatgaatttcacatacctaaattatcaaatgcgacattaattttttttgaaacagggcaggaatggaaagtatatttgtgcagtattgtgttgatactacacttggcttatttgggatgtaaagcaaagggttaggaccctagagaaacacacattttcataaggagacatgtacaaaaatgtttattgctggattgtttctagcagtgaaaaattggaagcaaactgaatgctgtcaacaggagagtggataaagtttggtgtatttgtataagggaatattattcaaatgaatgaactgggtatattaacacagttgtatctctaaagcaatattgaactaaataaaattacagggtgaaacataagtattgttaaggattagatgaagtttaaattagataagacaatactgtgtatggtttatagattaaagttttttttttttttttgagacagagtctctgttgcccagactggagtgcggtggcacaatctcggctcactgcaatctctgcctcctgggttcaagtgattctcctacctcagcctcccaagtagctgggattacaggcacgtgccaccacactcggctaattttttgttttttttttttttttgtatttttagtggagatggggctttaccatgttggccaagctggtctcgaattcttgacctcaaatgatccctcacctgggcctcctaaagtgttgggattacaggtgtgagccaccttgcccagcctaaagtttctttttttttgagatggagtcttgctctgtcacccaggccggagtgcagtggcgctgtcttggctcactgaaacctctgcctcccaggttcaagcaatcttcacacctctgcctcccaggtagctaggattacaggcgtgtgccaccacagctggctaatttttttgtattttttagtagagatagggtttcaccatgctggccaggctggtctcgaattcctgacctcaggtgatccgccagccttggcctcccaaagtgctgggattacagatgtgagccactgtgcccaggcaaaatattaaaatttctatttttgagagacaaggtctcgctctgtcacccagatagggttgcagtggcacaatcacggctcactgcaacctcaatctcccgggttcaatctgttctccaactcaatctgttctccaccctcaagtagctgggactacaggcgtgtgccaccatgcctggctaatatataaaaaaaaatttcttttgtagagatgggatgttgccatcttacctaggctagtcttgaactcctggcctcaagcagtcctcttaccttggccccccaaagtgctgggattacaggcctgagccactgcaacccgctgtttcgttattcttgacacgtttctgaaaacacaaggaaaagagaggtcaacgaagatgatggatggaaacacagacagcagtaaagaaaattaagttatctgagttattacgaatgagcatgatagatgtgaagtgctccacaaaaggaggggatacttgagcagaatgttggggaatataaagtagagagaggtggggtgaggactgaaatgtctaattcagtcagatgttctagctaacgatttctttctcttgatattttttagagaaatatgaaacgcaatgggagcagaaattgtttgaataggagaagtaggtttggttctcgagaaagagactggctaagagaagatgtaaagagaggctgtgtttacctttatggagcagacactaccactgccactacaaccaccaccacctcctcttcctcttcctcctcctcctcttcctctgacttacatctcgt

SEQ ID NO: 16480 - DNA, 2300 bp, Homo sapien
ttcaaactcctgacctcaggtgatctgcccgtcttggcctcccaaagtgctgaattacaggcatgagccactgcacccagccagaaacacttgttctaaaccacatttttttcttatcactgcttgcctgcccttgttaaaatttgcttctgtctccatattggtgcctattgcttatataccagttttcttgttgggagaaattacccagtaagcactgaaatgggaatccaactactttgagtacctttcctgaaaataatttcaaggtggaaggaaaatccaggaggtggatgacctaagagttttctcccaccttaaaccagactcacagtgacaaatcgtttttaatgcattaaaatgaggccaagaaatgaagattactggagattggaattttggtatatacaaagctaacttgtgaagggagaaagtaggtcagaaaggggtcggaacctgcaagagccaaatttggtcctggcatttaaaatatctccaaatggatacatatctcagatgggggacacagactgctctgttaaatctaaaagtcttgtactaagcctgcaattattctagacatacagttagtctgaatgaggcaaactgaagcaatggataatagggacaaagggtcctgctttgtcacccaggctggagtgcagtggcacgatctcgtctcactgcaacctccgcctcccgggttcaagcgattctcctgcctccacctcccaagtggctgggattacaggcgtgcgccaccctgcccagctcatttttttgtatttttggtatagacagggtttcgctatgttggtcaggctggtctcggactcctggcctcaagtaatctgcctgccttggcttcccaaagtactggaattacagttctatgaaagtgaagaaattactgttttttgctgtctaattccttacaagttgcttgaagattcaacaccctatgtatgaggggaagccctaaaaatctggaagtctagaagccttcctaggaaaatttaggaggaatcgacagagtacttttcgagaaaccgattggatcttcaatttagaattttggaattataatggctactatggatccccactatacgttaggcactttgtatgcactaaatcttcatcataactacttggcagattttaatctctttctcacagcttaagaacgaaaggcttagatcaagtaacttgcacaggggtatagatctaaagaagggcagaggggagatctggaaacaggctggctgactccaaatttggcccattggcaacaaaactactatcactgcgagaacgaaaagaaaaacaaaacaaagaaaagaaaagaagttaacttttaaaagtttttttctgaatcagccttgcaaataaatcataaaccgggtcacaggccatattactgcttgaagcagagcaccgaattctgataattttgctccaggaggaggcaagggaattaaaacatggctgggaggtgagcggacgttttgtacgaggttgggttgaatttgcttaagaaggtcgcacgcatctctgataaggaagagaaaaggccttgccaaggtgagtattctcaacagttcgttcaacggcttggcaggtgagggaagttacaagagccaccctggcggagggcagcgtcttgtcacaattgacaggtgccggcgccacctgcttctttctcccgcgggtttcttagagggcggggaaagcagcaaatacccctccttgcgctctagtcctccaagcctagggcggcgggcagtggaggcccagcgctctgcggtggtgccaggttccgccacgcgggccgcggccggaatgcggctcggtggcgcccgggccactcggcgccggcagctgcttaggtccagcggggctgcgggaggggcggagctggcgagccgccggaggggcggagccggcgggccgcggggggcggggccaccggttgctcgcgcgcgccgccgaggctccgcacgccgtcgcgcgggccgggcgtctctgtgaatcctgggtcgccgatgggggaggtggagccggggcccgcgggcccgctggagcccccggagccgcccgaagcgcccgcgagccgccggccgggagggatccgggtcctgaaggtgaggaggcggatggaccagcgagcgagcgagcgggcgagcgggcaagcggactagggagggaacgagggaggctagaggccgctgccgcccccgccccgcgcagtggctgaggcagtcggcggcccccgcccggcgtcagtcagtcggccgccc

SEQ ID NO: 16481 - DNA, 2300 bp, Homo sapien
aaaatcaactggttgtcactactgaattggatcttaaatcatgggaaccattaaaggtagttacatcataaattagcccctgaaacttttgggcggatgggtttttttttttatgttttcccttttgaaagaggaactactgttgccagaatgaagaagtaaatagcaatgcttatgcctactatccctttaattaaacaattattcaccactgctgttccccagcatgagctgaaactttagttctgcaacaagatctttcctttttgtgtagtcagtcaataaagagcttctactcatgaaatctggaaaaggtaatgtataatgcctcaagaaacagactcttacagccaggtgtggtggctcacacctgtaatcccagcattttgggaggctgaagtgggcggatggcttgagctcaggagttcgagaccagcttggacaatatggtgaagccccatctctacaaaaaaaatgcaaaaagtagccaagcgtagggtggtgctcacttgtggtcccagctactgggaggctgaggtggcatgatcaccttagcccatggaggttgaacctgcagtgagctatgattgtgtccataccgtactccagcctgagcaacaaagcgagaccctgtctcaaaaataaaaaaaatataaaaggcttttgaaaaacacttttttttttccttgagacaagagtctccctctgtcacccagactgcagtgcagtggcgcgatatctcggctcactgcaacctccacctcccaagttcaagtgattctcctgcctcagcctcctgagtagctgggcctacaggctcgtgcccccacactgcctaatttttgtatttttagtagagatggggttttgccatgttggccaggctgggttcaaactcctgacctcaggtgatctgcccgtcttggcctcccaaagtgctgaattacaggcatgagccactgcacccagccagaaacacttgttctaaaccacatttttttcttatcactgcttgcctgcccttgttaaaatttgcttctgtctccatattggtgcctattgcttatataccagttttcttgttgggagaaattacccagtaagcactgaaatgggaatccaactactttgagtacctttcctgaaaataatttcaaggtggaaggaaaatccaggaggtggatgacctaagagttttctcccaccttaaaccagactcacagtgacaaatcgtttttaatgcattaaaatgaggccaagaaatgaagattactggagattggaattttggtatatacaaagctaacttgtgaagggagaaagtaggtcagaaaggggtcggaacctgcaagagccaaatttggtcctggcatttaaaatatctccaaatggatacatatctcagatgggggacacagactgctctgttaaatctaaaagtcttgtactaagcctgcaattattctagacatacagttagtctgaatgaggcaaactgaagcaatggataatagggacaaagggtcctgctttgtcacccaggctggagtgcagtggcacgatctcgtctcactgcaacctccgcctcccgggttcaagcgattctcctgcctccacctcccaagtggctgggattacaggcgtgcgccaccctgcccagctcatttttttgtatttttggtatagacagggtttcgctatgttggtcaggctggtctcggactcctggcctcaagtaatctgcctgccttggcttcccaaagtactggaattacagttctatgaaagtgaagaaattactgttttttgctgtctaattccttacaagttgcttgaagattcaacaccctatgtatgaggggaagccctaaaaatctggaagtctagaagccttcctaggaaaatttaggaggaatcgacagagtacttttcgagaaaccgattggatcttcaatttagaattttggaattataatggctactatggatccccactatacgttaggcactttgtatgcactaaatcttcatcataactacttggcagattttaatctctttctcacagcttaagaacgaaaggcttagatcaagtaacttgcacaggggtatagatctaaagaagggcagaggggagatctggaaacaggctggctgactccaaatttggcccattggcaacaaaactactatcactgcgagaacgaaaagaaaaacaaaacaaagaaaagaaaagaagttaacttttaaaagtttttttctgaatcagccttgcaaataaatcataaaccgggtcacag

SEQ ID NO: 16482 - DNA, 2300 bp, Homo sapien
accaccctggctagtttattctactttttttttgtagagacagggtttcaccgtgttgcccaggctggtcttgaacttctggactcaagcaatctgcctgccttggcctctcaaagtgttgggattaacaggcattgctgagtgtggtggctcatgcctgtaatcccagcactttgggaggccaaggcgggtggatcatgaggtcacctgcagggtggttagccagaccatcctggctaacacagtgaaaccctatctctactaaaaagtagaaaaaattggccgggcgtggtggcaggcacctgtagtcccagctactcgggaggctgaggcaggagaatggcgtgaacccgggaggtggagcttgcagtgagccaagattgcgccactgcattccagcctgggtgacagagccagactccgtctcaaaacaaaaaaaacaaaaaaaaaacaaaacaggtgtgagccactttgcctggccccattgtgagattttaaaaccactttaggcccaagtctctgtcctagtggactgaattactgtttctcttaccctctggctggtaaacaagaagaaatgagacatgtatccatgttcttatttgcacattaaaggactggctttaaaagggaaaattgtggcaacaacacttgaactctgtatgtttttcttttcttcttctgtttctgccacttgaagctctaatattgcctctcagccccagtggtcatttttcactctttttacccccacctgctctggttgatagaaccagagcacttttttttacccccaactactctggttgatagaacagcttggacagttaccctggcaaagcacaggttgagttagaggcttttgtaacggtaggattgtctttctggctgcttcccctgacttgatatcagatttagatgcttaatcatgctactcattcttcatcgtcttctttttcctcctcctcctcaggtaacagaggatgaagtgttggatattttagaaagtgtcctaatctctaatatgtccacctctgtgacacgaggttatgccctcactgccattatgaagctttccactcgattcacttgtactgtaaagtgagtattgaagaaacatagggtgaacaggttgttttgtaattaaaaaacaaaaaaaatcccaaaaaacttgttatcatggaaaatttcaagcatagacaaaagtagagagaataataacacaaatttccattacttatttctccacagtcacagtgatcaatttgtggttaatctttattcatcagcactttgttccctctcattcttttactcccttgtggattattttgaagcagaaaagtttagggggttttgtttgtttgttgagacagggtctcgctctcttacccaggatggggtgcagtggcgccatcatattttactgcaaccttgaactcctgggcttaagggatcttcctgtctcagcctccagaggagctgggactataagtgcacaccatcgtgcctggctaatttttacatttttttgtagagaaagtgtttcgtttgtttgcccaggctggtctcaaactcctgggctcaagtgatcctcctgccctgacctcccaaagtgcagggattacagatgtgacccactccacctggcctaaaagttacgtttttagaatgagatttctaataccttttttttttctttttaagttgagaatctacttccccatataaaggttttggtttatttgtattttatatttcattttattttatgacagaatcttgctctgttgccaggctggagtgcagtggcatacaatctcggctcactgcaatctccatctccagggttcaagcaattctcctgcctcagcctcctgagtagctgggattacaggcgcacaccaccatgcctggctaatttttgtattttttggtggagatggggtttcaccattttggccagactggtctcgaactcctgaccttgtaatctggccaaggttttggtttattatattttgacaagtcttaataggaataaaatcatgaatgttttggtgattaaatcttttaattctcctctttgcttttttgaataaagtagattctcaggtcactttcccacccaagcatatttaaggccaacgtagttcttgtagtctttctgcttcacttttaaatgtgaagtcttataaaaaatggtattgaattacttttaaaattctgaactggaagaatttggggtcaacattttgaggctctgacccttttatagattaaaaattatttaaaaatta

SEQ ID NO: 16483 - DNA, 2300 bp, Homo sapien
tcttgcttatttgcttgggtcttttctcattgtttagccagaaagacttcttcaagtacaatctttgttggatagaaaaataggtgattttaatgttgaaaagttaagttttagaattttgtttttagatttagagctcaaataacttgaggtctgttaggggaagactgaccacatagttgcagaagctccagctttttggttgtgtccttgatagttggctgtcagtagctgaaagtgcacagtgggcagtgtgagttctaaagcagggagaacgttatctgggcagggtagaagagagaactgggttgagttctgacaccctttttccatagctgttggtgagcagctggtacacctttattttgtgtgctttggaaaggacaattcaatttttttaaagatattttagcatttaggatttaataaatatagtatttatcaagtttgtattcttataggaggatacaagagtgaacaaggcaaatgaagatctagccttagggagcttgtatttagtgggaaaaataggcatttcaaagtaaaaaaaaaaaaaaaaaaaaaaaaaaaaagcacttctcatggcctgagaatggtattgctgtatgagaaaaatctttatccttaaagggatttgtggagatgttggaaaatagccatcttcaccattttggccataaattttaggagaattgaaacatgcacacattatttttttcttctatttacatttttttcctttagtttgtttataattttgattctttgggcatataaagtaatcttatttagtttaagctccaaaacccaattttgcttaaccattttggatagaaatttttctaaaatgaattttatgtttccttttttcctctgtttttatcattatttatcatataactgttaataaaaactgaaacacattaatctataatccgtgtcccttaagtcagacttttaatatttttgtgttcgctttccatccttgttttaagagatgtttttattatttgctttaaaaaaacaggacaaagagggacattttattttgttatagtgtacaagccataatgaatataaaatatggaacacttaagcatagagtgaaaccatcgaaatactaaatgtaagtggttatatgtaaatggagaaattgacagaagcacaatcatagtggtagactttaacatacctttctcagtctttgatgggtcaggtagttaaattagtaagggcagatggtatctgaactgtaagatttttagaagttggttataatacagatataattttgtattcatgttttttccctgtgcattgaatgttaaatgttaatcttattttaaccacttcttggagaatcaaggtctttttataaaaccacattatggtccaggtgcggttgctcatgcctgtaatcccagggctttgggaggccaaggtgggtggatcacttgagctcaggagtttgagaccagcctgggcaacatgatgaaacctcatctctaaaaaaaatacaaaaatcagccagtcagcctggtgtggtggcttgcgcctgtagtcccagctacttggggagctgaggtgggaggatcgcttgagccaaggaggcagagattgcagtgagccaaggaggcagagattgcagtgagccgagatcgcaccactgcactccagcctgggtggcagagtgagaccctgtctcaaaaagaaagcaaaaaacaacaacaaaaactatattgtggtactgtttataatttattggtgctcttaggaccttagtgggagttggctactttttggttacacactaagtagctccagactgttttaaaaatgcttgtttctgctgtatataggtttttatttatttgtttgtttttgttgctgcttttgtttcttcccttggtgttgggtgacatttttaactatcatagatacccttttctaaagcagtttctatctcctgggtccaccctcctcccctctttcccttacagttttctgatttgtagcttctattccagaacgggctgaatgaggacttctatctggagtaaagtagatgttatagtgtgttgatgtgtcactctctatattggctgcttgagataataaaaatgtgtttttggattctcagctatgttctgtatagtttcattactgtgttccggactttttaaaaaaaggttggagtttattattgttatttgttttgtttgtttgctttttctgttttttgagacaggatcttgtgccatcgcccaggctggagtgcagtggcctgatctcagctcact

SEQ ID NO: 16484 - DNA, 2300 bp, Homo sapien
aggccgaggtgggtgaatcacctgaggtcaggagttcgagaccagcttgggtaacatggtgaaaccccgtttctactaaaaatacaaaaaattagctgggcgtggtggcatgcgcctgtagtcccagctacttgggagactgaggcaggacaatcacttgaacctgggaggcggaggctgcagtgagccaagatcacgccattgcactccagctcgggcaacaagagtgaaactctgtctcaaaaaaaaaggcactctatagctctgtagcagaaccccagtggaggaggggagaggatgtgtcttttagccaagttagtttcttggagcctctttttccttatttgtaaaactaagttacttatgcttgcctagcctgactcaggaggttgtccagagggtcagattagattatacacatgaaagtgccttatgaacaatgtgatatcaatatttaataatacaaatgataattattatcgcacccatggcctcctttctttccagccacttggcatgccccagtagttcagggacaaaattgtacagatgggcctacttggttcaatttttttttgtttttgtgagacagggtctcactctgtcgcccagactcggctatctgcaacctctgcctcccaggttcaagcgattctcctgtctcagccttccgagtagctgggattacaggtgcccaccaccatgcccggctaattttgtatttttagtggagatggagtttcaccatgttggccagtctggtctcgaactcctgacctcaggtgatccgcccaccccggcctcctaaagtactgggattacatgcgtcagccactgtgcccggcctacttagagcaatttttgttaagtgttttgaaatccctgcatgaaaatgactaaggaaaaaagtgcaaccttctctctatgacacccaaatcctaaactcaagatttgtggttagttctggccaggccggtggctcacacctgtcatctccacactttgggaggccgacgcaggcagatcacctgaggtcaggagttcaagaccagcctggccaacatggcgaaaccctctctctactaaaaatgcaaatattagacggccgtggtggcgggagcctgtaatcccagctacttgcgaggctgaagcacgagaaattgcttgaccccgggaggcaaggttgtagtgagccgggatcccgccactgcactccagcctgggcaacagagcgagactttgtctcaaaaaaaaaaaaaaaattttttttgtgtggttggttctgttctctttggcacccagcctgctgctgtgttgtattgtactttgttgccaatctagcagaaggattttagtctaggtaggtcacctttcctttaaacaggccaagatatcaggccctctttacattcacatggaaaagactcacgtcatatgttagtaattatttatcaggttaggaactgtctggttagactttctttggccctggttattaattcatggagtcatagaccgaaagcccattctgtaagggtttcagctaacatgagtccaagtcttctttctacatatgaggaaattgaatccctggagagtttaagtgacttgagcagtgcaagcaccgcggtaccgggcgtggaatccattcttttcagtcatcctcttaactcttcataaaatatgttgcaaagacaccataaaaccatagaataccacctggagcatgctccttaagttataaagaaagcaaaaatcttaaaggagacagcaaagagttcgggattcccgtggacgaagaccttttcagccctgctgtcttctccgcccccacctgtctcgcttgctctcacttcctgggctacctgacttagctccgccccctccaggtggctccaccgcttcctggtagcccagctccaccccccctacccccccacccccctaccccccacccccctaccccctcaccaagcggaaccaatgtccgtccgctacggggtaggccggatctttctcgctcagactcatcgcagcggtgactcggcagcagcgtctcgcgtcatcagtgacagccccgatccttgctacgtttgcgtcgctctgccaggagcagtcgcctcctccttggcaaatagtcctcggcagggtccgagttcttggataattcgagagaaaaggcacgataagttgcagtacgaggacacggaaacgaccaggagaggaggacagggagcgaagtttcctcaatagtgtgtgaagttagttaaaaactccctccttcctcaggatccctccgc

SEQ ID NO: 16485 - DNA, 2300 bp, Homo sapien
ttacatcttcctccatggcacagttctttctatttcctttgtcttggctcatccctaggttacttttctttgcctctgatttgttccctaatagatgtgggcgccccagccagaagcagagaggggtacagggaagctacagagaagccccttctgatgccccagggagcaagtcgactccttccaggctccaggaacaccacaaagcaatatgaaacctgttcatgaaaggagtcaggaatgccttccaccaaagaaacgagacctccccgtgaccagcgaggatatggggagaactaccagctgctccactaaccacacaccctccagtgatgcttctgaatggtcccgaggggttgtggtggctgggcagagccaggcaggagccagagtcagcctggggggtgatggagctgaggccatcaccggtctgacagtggaccagtatggcatgctgtataaggtggctgtgccgcctgccaccttttcaccaactggactcccatctgtggtgaatatgagtcccttgcccccaacgtttaatgtagcgtcttcactaattcaacatccaggcatccactatcctccactccactatgctcagctcccatccacctcgctgcagttcattgggtctccttatagccttccctatgctgtgccacctaatttcctaccgagtcccctcctatctccttctgccaaccttgccacctctcaccttccacactttgtgccatatgcctcacttctggctgaaggagccactcctcccccacaggctccctccccggcccactcatttaacaaagctccctctgccacctccccatctgggcaattgccacatcattcaagtactcagccgctggaccttgctccaggtcggatgcccatttattatcagatgtccaggctacctgctgggtatactttgcatgaaacccctccagcaggtgccagcccagttcttacccctcaggagagccagtctgctctggaagcagctgctgcaaatggaggacagagaccacgagagcgaaatttagtaagacgggaaagtgaagcccttgactcccccaacagcaagggtgaaggccagggactggtgccagtggtagaatgtgtggtggatggacagttgttttcaggttctcagactccacgggtagaggtagcagcaccagcacaccgggggaccccggacactgaccttgaggtccagcgggtggttggcgctttagcttctcaggactatcgtgtggtggcagctcagaggaaggaggaacccagccccctcaacctatcccatcatacccccgaccatcagggtgaggggcgagggtcagccaggaaccctgcagagctggcagagaaaagtcaggcccgtgggttctaccctcagtcccatcaggaaccagtaaaacatagacctttacccaaagcaatggttgtagccaatggcaacctggtgcccactggaactgactcaggcctgctgcctgtgggctcggagatcctggtagcatcaagtctggacgtgcaggccagagccaccttcccagacaaggagccaacgccgccccccattacctcctctcacttgccttcccatttcatgaaaggcgccatcatccagctggctacgggagagctgaagcgggtggaggacctccagacccaggattttgtgcgcagtgccgaagtgagcggggggctgaagattgactctagcacggtcgtggacattcaggagagccaatggcctggatttgtcatgctgcattttgtggttggtgagcagcagagcaaagtgagcatcgaagtgccccccgagcaccccttctttgtatatggccagggttggtcctcttgcagccctgggcggacgacacaactcttctctctgccctgccatcggctacaggtgggagatgtctgcatctctatcagtttacagagcttgaacagtaactcagtttctcaggccagctgtgctcccccaagccagctgggtcccccccgagaaaggcctgagaggacggtcttgggatccagagagctatgtgacagtgaggggaagagccagccggcaggagagggctcccgtgtggtagagccttcccagcctgagtccggtgctcaggcctgctggccagccccgagcttccaaagatacagcatgcaaggggaggaggcacgggctgcgctgctccgtccctctttcattccacaggaggtaaagctgtccattgaagggcgttccaatgcgggaaaatgaacctcttccccagaccagg

SEQ ID NO: 16486 - DNA, 2300 bp, Homo sapien
tacaaaaatatgtttgatatatcactttatattatataaagtttacaagtatttcagataagctggggagaaaacatggtatgatgtaatctgtgccaatccttcattattgagttggattcaaatgaaaggagctttgggctgggaaataagacacacaaaccatagctctttccaggccccaaatccagtccaccagttgcctggagtatttatctaataaggacacatgtaactactagcagatgatttggttagaccttctcatgaagaaagggaatataactagttttgcccaggaagaagggaaatatgttgctctcatactggtggatttagatattatgcaagggtagtagagaagacaggcacactgttagctaggaaatctgagtttcctgcggacagcctggtgagactctgccctatatttctctcttgctcacatcaggcccagaagtccaggatccaggtggggttaagatagggctggagtgtgacagcttccctaggcttggctacttcttgtgatcttcaaggtactagcactttattttttccctttcagaaagaactacgttcgttatttgtttttctgatctgttttcattttctattttataagtaatagagaagaaaaatcagctcacataaaccttgcagactccccagccacaggcagacctcctcatagccacatcctacccctaaaactaaaacaaactcaattcctatgttagtcacaagaaattacatttcatcctaaagaatggcccgttccttccacttaatgcattcggttacccattgagataatccaaataatcaacagaaacaatggacttacttagtttagaatgccatgttacaatagtagagtaagaaccgagtgagtcggataccactgcaaagtgcctgaggttggttgctgtgctaatttttccactgtaatgagcagccctttccctataaagtgacatcatttcaaactcatttactactgcttccattgctggtaagagggaagaaaaacttgatgtttctgtaagtgtgccttgaggtttgctgggaaagaagagattagtggggttcagagtagaatagtatagtgacaccgtggagaagttgtgcagggggctcatggcaaaatcagtggaaagtgttggtaagtcagaggtggtgtacagtgggaatgagctcagtgtaaggtgcttggggaggtgtgatttgaagtgtgagatatttgaaaaccatgagtcagaaagattatttttataatcatgtagagggcacgataaccatttccaatgcagttttgcttcacatcttccctttacgtgtatatggcataacaaatgacagctatagttggtttccacttgacataatatgtacccaacaaaactatataaactatattatggaagatctgaaaatgttttctattgtaactgccaactctagggtggagagcagctcaggatgtattcatgcaaaaatcagaacaagtgaccagtttgtgtgttccaggtgacagtgagggtgatgaagaggagacgacacaagatgaagtctcttcccacacatcagaggaagatggaggggtggtcaaagtggagaaagagttagaaaatacagaacagcctgttggtgggaacgaagtggtagagcacgaggcaagtgacgatggcccctgggtccaggtccagcaatgccctacccttctgcctgccctgatgctgctcacccctgtggcacagtcttgcctctgatggtctcctgggcctgcatgggaggcctcttccttcatggcaccagaacccacacctcagactctcagttctcgccacactcagttttccttttccatccacgaatcgctgcgcctgtgcacagctctctttcctgcagctccccacgtctttccagacatgagagaaactttgttgaagtagaaagctgacttcccaaggtggactcttgaatgtgcttgcaaatctaagtcaaggtgtcacctggagtgccaccttctcactaacttgtttcctgaggattcctgaaaggaacatgacaggaaaaacgctacccctgtctgcagagtttatcttcagggaaaaaaattgattggctctctctgaggcaatcctgtgtcctcatggctgaaagccataattccctctcaactattactttttccttcagcccacaaagggaagctaagaataacatgcgccatcagtctgggttccttttaacaggataccctgtttaaaaagctggggcagggaagagatgagtaa

SEQ ID NO: 16487 - DNA, 2300 bp, Homo sapien
ggattataagatgcagcgggcattgctgatttaaatacgcagacactcatctctgtcttttgacttggagctttaatattgaaatgttgtctggttcaaattatttggccttccttcagaagggactttattacctttatcttacagtttcagtttctgatcttgaagggagaaaatataaaaattagtcaagattctgttttttcttctataatagagtatatatatatttagcctcaatagattatcacattagaggagtatattttatttttttaaatttttatttatcttttttttttttttttgagacggagtctcgttctgtcgcccaggctggagtgcagtggtgcgttcttggctcactgcaacctccgcctcccgggttcaagcaattccctgcctcaacctcctgagtagctgagattacagacatgcatcaccacgcccagctagtttttgtatttttagtacagacggggtttcaccatgttggccaggctgttctcaaactcccgacctcaggtgatccacccgcctcagcctcccaaagtgctgggattacaggcgagagccaccgcccatggcagttttttatctttttttgagatggagtctcactctgttgcccaagctgcagtgtagtgcctccatcccagctcactgcaacctcccctccccaggttcaagcgattctcatgcctcagcttcccgagtagctggaatttacaggtgtgcaccaccatgcccagctaatttttgtatttttattagaggtttccccatattggccaggctggtctcaaactcctggcctcaagtgatctgcctgccttggcctcccaaagtgttgggattacaggcgtgagccacggtgcctggccatatttttaaaaatattaatagagcctgcatttcattacctttccacttggtgattccacacacatataggaaatccaaagtgtgatattcattcactgcttccgtgaataaaacaactacttgattagaaaaaaatgacatacacaaaacttagagaacatacactatcagcactcagtatattgccctctaaatagtttaaattgatttttattgtatacatttagagttttgttttgttttgtttttaattaaaggtctgaaaaagaactgtgtttgatatgcagatatgctagaagactgcctgaaagctgcttcctttgccacttcctgtggaggcctgtctttgccatttgcggtttctttattcttttggtaaggggaggcaggatctgattataggtttgaggtccttctagctacatagaggagttagttggcataacaggaggtgagtcttcattaactggagtacaaaatatagctagcagtagtctcccataactcctcttaaggcaataaactatgattttatgtttgcttattcaatgtgagtataactcaagaaggcaggaactgaaagaaaacttaagagtgtgaccagatccatattcctgtctttggtaggaaagacaatccctttttattctatgtctttattcactctttctaagaaaatgacacagctatcaatactaatccatctcagattctctaacaatgcttaaggctggggcactctttctgtagttaatcaggaaccttcaggcttacgtatatatcccctcctatatggggtggggagcagatgcatgtcttggcagcatttttcgtttggggaacttttctctttattcctcccactgttctctttgctacccagaggctagattgagaagagcctctaaagttattaactttgaccacctctctggaatgtgtgaggagggccaggtggtattccacactggggtgttgaattagtactcatcaatgtggatggcatctgtctcttctggtgagagcccatcttcaacattagaagtttgatttgcttagtgccatgtcattcacagtgcagcatagcattgcgcctgtatcaccagatagaggctttatttcccatgctgttctcatttacagatgcctatttgagacattttctgtctcgcagggatgtgatgcctttgctacctctaggcaagataacatcatgaaaaatccgctggtgtagactgcagggcttgacttccagtgggcatgtgacatgtgagctgccaccctctttggcttccttttgcttccttttgcaattcatcggagttatccccttgagcccacagtacttctaaccctggatgcctgagttttacttcctcttttatcctgtgaccttgatcatgatcacttaacag

SEQ ID NO: 16488 - DNA, 2300 bp, Homo sapien
agaatgttctatgcaaataccaggacttgtcactttatcagcaaatgacagcatcctcgttagccctgcctttgtgcagccagtaatcacgaaaaacatttgcatgatgcttttagccatttgttttacttaactggcacaacaaccctcggagagtaaaggccaggaattattgcatcattatccatttgacatcttaggaagcagaggctcagaacagggaagtgacttgcccaaagtcaacaggctggtgggtggcagagctggggctcaaagccagatcttctaataccagatctcatcttctttcctctgcattccctgcttctccaggtaagcgatgccagggcaggctcaggcattctagaagagaggaagaaaagaaggcaacaggaactaggagagagaaggacgtggacaggaggaggtgtttgactagaagtgcgtccaaccaggccgggcacagtggcttacgcctgtaatcccagcactttgagaggccgaggcgggaggatcacctgaggtcaggagttcgggaccagcctggccaacatggtgaaaccccgtctactaaaaatacaaaaattagctgggcgtggtggtgcacgcctgtagtcccagctactcgggaggctgaagcacgagaatcgcttgaacctgggaggcgcaggttgcagtgagcgaagatcgcgccattgcattgcagcctgggtgacagagcgagactctgtctcaaaaaaaaaaaaaaaaaaaaggtccaacggctctccattgcccccaaacatccctcaagtgacaacagtgccacaagttcccctgcccctgggtctgcagccaatgttattttatcagttgagaatcatgtcagaaaattaaatactcaaaagaaatctcaagatttcccagctctgaggttctgacagctgaacttggcccctcccaccaaggcccgtggtcacattcaaagcctcgggagccgaagccaccgcgaagcgtgggggaatgaggcgaagagggtttgtgacggtggtggggatccgggctaaggagagggggtgcctgcggcggagctgtggttgggggttgtgggttttgtggctgaactcgatggtggggtaagaaaccaggatcggggctgggtagggtggcgtttacacgtccaggaaggtctgggggagctgagcggctgagacagccagagaaagacccgggaatgggcgaggcggggggttccggagccctggaacgcgggcgagcccctctcgggcgcccgggattgggcgctccccggagcccctcctctccagagcccctctcctcaggccccgcccacaacgccaggcgcgcgccgggccgcggggaaggggacctggccggcgcgggggagggggagagggaggctcgtgcacgcgcctcactagctgcgggtgcgcgagccgcgcgctcccgccgcccgcgtcgccatctttttccccctccgtctgtctgtctgctgttggctttgtccgtctgcagcgccgcccctcggctccccgccaccggctcggctcggcccggagccccttccgctcgccggggcccagtcccggagcgccccggcccggctggcttgggctgcggtcccgggtccattgtccggcggtccgtctgtccggaggcggggcccagggacccagagcgcagcgcagcgccgaggcgccgggtaaaaagaccccctgccctccctccgggtccgggctggggatgcgggctcctcgccccctcgcggccgccggctgttggtccttttgtctgcactggggagagggccgggggccagctccggcctaggggggcagcccgggctcaccctccccgcttccaaccccaattcctccccggccgctcctcctgctgccccttggcgctctcgggcgcggggcgcggggtgcggggccggggggcttttgcgcgggccgcgggcaccccgcctcctcgggccccggcggggacggccccggcgtctgacagccttgggtggagctgggggaggggaggatgggcgtgggcgtgcagaccggggggtatcagtccccgcgtctgggtctcgcagaaaagcttctaaatttagatttcggagattgtgttgtctaagggtttgtctgagccgcctcggaagacctccggctcttgtcaggctcttgtctggtaattcctgggaatttacctgggctcatgcttgaagaagcagagggaccatctcggctgattagacacgccccagacccaaccccaggggtcaggtgaacagccaggcggct

SEQ ID NO: 16489 - DNA, 2300 bp, Homo sapien
tctcagcctcctgagtagctgggactataggtgccagccaccatgcctaacttaaactaattacgtatttaataattttttcattatttggttgtaaccttgaatcacaacacctctgagaaatttttagagcacagggaagtcataagaatagcattattatcatctcattttatttggaagtcaaggagatggaataagctgcccaacattacataataataatgcatccaagaaatttcactggaggcaaactttacctgtttgctacttttctgttgaaaatgtcaactaagtcagctttaaagtgacataataaagccatacttgtatccctcagtccaaactgatcaagaattactgttaaatataaaagccagtgtgtattctaggttgtattcttacacaaaatagtacaaacacttgcgggttggatgataatattccattttctgtctacttggaaactaagtttttaaatgaaattaaaatgtttccttgactgaagttaaacaacaataattgctatctaagtatcctaatcacaataaataaatgagtgaatgatgaatgagctatttatcacagaattgtgaaggaccaagatccctcaatgtaatcattctattacattgaacacaagatgcagacaatgagatcatctcataaaagatttaggggaaagacaatttgcaagaatgttctatgcaaataccaggacttgtcactttatcagcaaatgacagcatcctcgttagccctgcctttgtgcagccagtaatcacgaaaaacatttgcatgatgcttttagccatttgttttacttaactggcacaacaaccctcggagagtaaaggccaggaattattgcatcattatccatttgacatcttaggaagcagaggctcagaacagggaagtgacttgcccaaagtcaacaggctggtgggtggcagagctggggctcaaagccagatcttctaataccagatctcatcttctttcctctgcattccctgcttctccaggtaagcgatgccagggcaggctcaggcattctagaagagaggaagaaaagaaggcaacaggaactaggagagagaaggacgtggacaggaggaggtgtttgactagaagtgcgtccaaccaggccgggcacagtggcttacgcctgtaatcccagcactttgagaggccgaggcgggaggatcacctgaggtcaggagttcgggaccagcctggccaacatggtgaaaccccgtctactaaaaatacaaaaattagctgggcgtggtggtgcacgcctgtagtcccagctactcgggaggctgaagcacgagaatcgcttgaacctgggaggcgcaggttgcagtgagcgaagatcgcgccattgcattgcagcctgggtgacagagcgagactctgtctcaaaaaaaaaaaaaaaaaaaaggtccaacggctctccattgcccccaaacatccctcaagtgacaacagtgccacaagttcccctgcccctgggtctgcagccaatgttattttatcagttgagaatcatgtcagaaaattaaatactcaaaagaaatctcaagatttcccagctctgaggttctgacagctgaacttggcccctcccaccaaggcccgtggtcacattcaaagcctcgggagccgaagccaccgcgaagcgtgggggaatgaggcgaagagggtttgtgacggtggtggggatccgggctaaggagagggggtgcctgcggcggagctgtggttgggggttgtgggttttgtggctgaactcgatggtggggtaagaaaccaggatcggggctgggtagggtggcgtttacacgtccaggaaggtctgggggagctgagcggctgagacagccagagaaagacccgggaatgggcgaggcggggggttccggagccctggaacgcgggcgagcccctctcgggcgcccgggattgggcgctccccggagcccctcctctccagagcccctctcctcaggccccgcccacaacgccaggcgcgcgccgggccgcggggaaggggacctggccggcgcgggggagggggagagggaggctcgtgcacgcgcctcactagctgcgggtgcgcgagccgcgcgctcccgccgcccgcgtcgccatctttttccccctccgtctgtctgtctgctgttggctttgtccgtctgcagcgccgcccctcggctccccgccaccggctcggctcggcccggagccccttccgctcgccggggcccagtcccggagcgccccggcccggc

SEQ ID NO: 16490 - DNA, 2300 bp, Homo sapien
caattttattcttttgcatgcagttatccagttttcttagcaccatttgttgtaaagactgttctttccccctttgaattgtcttggtatccttgttgagaatcaattggttataaatgcatgggtttatttctggactctcagttctattccattgacctatatgcctatccttatgccactatcatacagtcttgataaaaatctgatattttaaaggacaatgtttaaacttttgtgtttatatttagaatctagagttacaagttttcatggctttgagttcatttaaggaaaaattaagttttctagatgattacaatgatgataaatgtaaaaacctgatttgaaaattttttgatcttatatatgaacccaaatcacagtaataactgtgatttaatgcattttattttcatgtattgataaactccatatacacaaattgaaagtaaaacagggctggaaattattatggaaacatggatatacaggaagtatataatcgggccaagcgaggtggctcatgcctttgggaggctgaggtgagagaatcacttgaggccaggagtttgagaccagtctgggcaacatagtgagatcctgtctctacaaaaatgttttttaaaaattagccaggcatggtggcatgtacctgtagtccaagctacttaggaggatgagatgggaacccagcagtttgaggctgcagggagctgtgatagtacccttgcacttcagcctgatgacagagtgaaaccatgtcttaaaataaaaaataaataaatgaaaagaaaatatatgatgttcagtgtcaaagtctgggttcaagatctgatcctggcatttatagctgttgaccttagattggtcacttcatagctttaagcttcactttcctcctataaaaactgacaatagccgggtgcggtggctcacacctgttgtaatcccagcactttgggaggctgaggtgcatggatcacttgagatcaggagttcaagaccagcctggccaacatggtgaaactctttctctaataaaaatacaaaaattagccgggtgtggtggtgcatgcctgtaaatcccagctacctggaaggctaaggcaggaaagtcacttgaacctgggaggtggaggttgcagtgatccaagattatgccattgcactccagcctaggagacagagtgagactctgtctcaaaaaacaaaacaaaaaacaaaacaacaacaaaaaaacaaaaacaaaagaaaacccgaaaaaacctgacctgataatgccagaccgggcagcatggcaaaaccccatctctaccaaataaatataagaaattacccaggtatggtggcatggcatgtgcctatagtcccagctactcaggaggctgatgtgggaggatcatctgggcccaagatcatggctgcagtgagccatgattgcaccactgcacttcagcctgcacaacagagcgagaccctgtctcaggcaaaacaaaacaaaaacaaaaacaaaaaaatgatttttgacctgcagctgcttcacagaaatgtcagcctgaaattgagataatgtgtttataggtgctttgtaaactgtaaaatgccacaaagataagttaatatttgtatatagccctaattagtgacattaattagttttctgaagacttgtttcatgggttctttaacaagtgatcttgatttttttttcctaggctttaggaagatgtccagagcagttcctatatccttgtatattcttttttttattgtttttcttctttttctttttttgtttcattgtatattctttagtctaaatgttaatagttaaaacaaaggaaataactctatgcccatcatctttcccttctttctcttacacaatgtgtagtacttttatgcagaagtcagcaaacttttttttttttttcagacaggatctcactctgtctcccagcctggagtacagtggcacaatctcggctcactgcagcctcctctgcctcccaggttcaagtgattctcctgcctcagcctcctgagtagctgggattacagtgcaccaccacacctggctaatttttgtatttttaatagagacagattttcgcaatgttgaccaggctggtctcgaactcctgacctcaagtgatccccctgccttaccctcccaaaatgctgggattacaggtgagcaaactttttctataaaggaccacatagtaaatattttgggatttgtgggcaacataaagtcactgtcacacattcatgctcctccccttcctgctttt

SEQ ID NO: 16491 - DNA, 2300 bp, Homo sapien
gattacaggcgtgagccaccacgcctggcccactttttttttttttgggacagggtctcactctgctgcccaggctggagtgcagtggcacaatctcacatcactgcaacctccgcctcccaggttcaagcgattctcctgcctcagcctcccaagtagctgggattacaggtgtgttgccaccacatccggctaatttttgtatttttagtagagacggtttcaccatgttggccaggctggtcttgaacttcttacctcaggtgatccacccgcctcggccacccaaagtgctgagattacaggcataagccaccatgcccagccaaaaaaatctgcactttttttttttttggttggagtcttgctctattgcctaggctagattgcaatggggagatctcggctcactgcaacctccgccttctgggttcaagcgattctcctgcctcagcctccggagtagctgggattacaggtatgtgcctacacgcctggctaattttttcttttttttgtattttttttagtagagacgagatttcacaatgttggtcaggctggtcttgaactcctgacctcaggtgatccacctgcctcagtctccccaagtgctgggattacaggcatgtgccaccgcgcctggcatggaacctggttttatcttgaaatgttgcaaacgtttataaagatacagtatttctaaattcacatcaacatcttatgataagggctagctcctacttgtcatatgactgccccggtacaagcattagatgcagcctccacagcagggagcagatgacttccttctggaggcccctttttcttttttccctttttttttttgagacgtttcgctcttgttgcccaggctggagggcaatcgccggatctcggctcactgtaactcgagaatcaagcgattctcctgcctcagcctccggagtagctgggattacaggcttgcgccaccatgcgtaatttcctctttagtagagacggggttcctctgtgttggccaggctggtctcgaattaccgacttcaggtgatacacctgcctcggcctcccaaaatgttgagattacaggcgtgagccaccgcacccggccctttttctttttttctgtagcctaggctggagtgctgtgacgtgatcacggtttactgcagcagcgaccttctgggctcaagcgatcttcctgcctcagcctcccgagtagctgagaccacaagtgctcactgctgctcccctaatttttaacttttttttttttttttttgtagcgatgcggtttcactatggtgtccaggctggtctgcaactcccgggctcaagcgatcctcccgccccgcctctcaaagtgctgggaaggtcccttccaggcttaagcagcgataatggttttcaagttaaaaacaaaggtaaccaaggaaaaagttttctctgaataccgagataaattagggaaatcgccagagactgtggtgctgaggaaacactactgaattataccacacagaccggagcgatgctggtccaaagggcaaccggacggcttaaaagcggggcgggggaacgcttagagcccgtagagggacacggaggcgctgggtgaagagtcagggatacgcaggcttcgaaaccccctcggccgctccacccagggggaaagtccagcgaaaggcggcagcagatcttagggagcaactcccggcgtcagagaggcggtactggcagccggttatggaagaatccggaaccaaggcactgggcgcggtgaggccgtgggcgcagagtccgagaatcaacagctgtggctggcctccccgcgcccagagcgaaattaagggcatgcccccagcagctgactcagtcggcgtggcgcttcccccaacgtctgccgtgcccccgccgcgggaagtagtccccggccgcgccgactccaaaggaaaccgagggagggtgccccgagtcagcgcgtgggtcccggcagcggcgatcgcgcagccaatccctggaaaggagggcgtggctatatcggccccgtggatccctccgcccgcgcttgttgtgctgaggccgagggagtcgccattttggatggtgaaccctgaagtcggtgtctgctgcgttcacggcaggattcggttaggtgagtgtggcatcctcggcgtcagaggtctctgtcttcctcttctctctgcgctcctgatttagcggtctctagttagcgctagggcccgggattcaaacgacttcggagggggcagctgaggagaaagggaaggatagtg

SEQ ID NO: 16492 - DNA, 2300 bp, Homo sapien
aatttgaatcttggctcgaccattttccgagttcatggccttgagcttgttgcctagttttgagttcctccaaaagtaaaataagatcacgaaaatggctagaagcctagagttattgtgagaatctagtgagattcacagaatggctttggaggctataaagtatatgaaacaaaagctaggattttgttggtttgttttaaagaatgttatattaatttttttccttgattagggaactagattctggtctggctgaatctgtgtctacattgatctgggctgctcctcgactccagtcagaagtggctgagttgaaaatagtgagtacaagtagtttcagtgatgtctgtagcttttcatattgttagaaaggttggttaatataagttacttctgctgatttgaccagatattttgtaccattcttatgttgcttttgaaataggttttgtaaatttgtttctccctttcagccttatatcgtagaatagaacagtgttttgcaaacttgagcagtttttttaaggagcaaagttttgtgtatctccagttttgtcttaatgttatttaactctatgcaaatagaaaagttcttatacaactgtaaaccagtaaagttaaaataacattaaggtgacagatgtttttgctttatttattaattccacaaatatttattaaataaattgtatgagctatgtaagtgctgggggtaacagtggtgaacaaaatatggcaccagccatactcctgtagcttagagtctagcagaagagacagacattaaccagaaaattgcacatcacaacatggatatggtactgactcctaggatacaaattcagttgtgttgttttctattttctacatctttgcctttctgttttatttcctaggagactgtgtcattcttatctctcaacccatctactgagatttccttcttttctaggtttttttcaagagctctttttaattctctgaatattttttatggtttgtttcatggctacaattttttctaagtctctgaggatattaattatggtttatttttaaacgtctgtcatgtttgtttctctcaagttcatttttcctatttcttagttttatagtagaggctttccaaagatttagtggtccttggctgtcggtttacatttaagagtgaggcactaaaaaggagattggaacctctcgtgtgcatgggtgggtttttactgccagatgccttcattgctgagtgatctggttaagctcttatttggaggaattccagactgtgaggaactagtcatctttccttgggttggtcgttttctccagaatcctcctatcttctgtcgagtgtataagctggctgccagcatttctgagagcccagtggagaaggaagccaaaaatctatttgatacatagaagacttacacttaattcttctgttgtaagtatcactgttgtctcctgtgtgtagactcgagtcgctttagttaactccccccagagaataaacttccaatagtccaatagggtaccagggatagtaattgagttttgtgggcagagaagagggacagtagaggcaactgattcttatgtaggctttttttttttttttttgagatggagtcttgcagtgttgcctgggctggagtgcagtggtacaattttggctcactgcaacctctgcctcctgggttgaagcgattcttttgcctcatcgtccttagtagctgggattacaggtgcccgccaccatgcccagctaattttttgtatttttggtagagacgggatttcatcatgttgaccaggctggtctcgaactcctgacctcgtgatccgcctgcctcggcctcccaaagtgttgggattacaggcgtgagccaccatgttgagccgtttttggtctcttctgtactcctttaaaattaattttggaaaaggcttaaatatgttacaaaactcaaaagccataaacagagtgataaattaatgtgaataaaaaaatctctgtgtagtataaaccagccaaaacaaaaaccataaaagacaaatgccatttatatcataggtgtcaggtacccctgaaagtcttcataatgaacagtgagaactctcctactgggcttctggaatgttgggaccactctggtccaatgctactgtcgtttcctgtctggaaatgagagtagcttcttgaatattcttcctattcctactttggcttcttttaatctattcacaccattccatcagaaccacctgagggttttgtccaaaacacagctccgatc

SEQ ID NO: 16493 - DNA, 2300 bp, Homo sapien
atcatattggccaggctggtcttgagctcctgacctcaagtgatccgcccacctcggcctcccaaagcactgggattacaggcgtgagccactacgcctggctgattactgcagtgtttttcaaacaggatgtattcttgcagtctgtgttttagagaatttcataattttggtgaccacttctgtactgatttttagagtaacataagcatcatttggactatctggataaccatcttaaccctgaaacctaccaagcagttcagtgcccacatttgtttgagtttatgatcactttttggcaccaagaaagaacgagctgtaatacacgtgatggatatgcaacaggtggagaccaaatgacctgctgtgtgaacaaaggttttttttgtgtgtgtatgtgtgtgtgtgagtcaaataaagaaacgtggtatcagaactgaaccctccccatatcataaaatagcatgcatgccagattcaaaggaacctgtgtagtcgtaggccagagccctgtttatctgccatttagcttggcaaaacttggatctcattgattttcagttttgtttgtatttaatttgtattcattcttccatttaatattgttttgtttttatgaccgtgtaagagttttaagataaagttcatggaccagggacggtggctcacacctgcagtttgggaggccaaggtgagaggatcgtttgagtccaggagttcaaggctgcactgagctatgatcatgctactgccctccagcctgggtggcatagtgagaccccataaaaaaaaaatagcatttatgcctagttctgtttgcatgtacttaagagacagaatacagtaatttaaatcagtcctgggggtagcagagatgtaggatgaacaagtcaagagatttagtgtacaaactgaagattacaggtaataaaaccatacagtagacaggattcatgctagatgagattttagctgctcttgctacaaaaacaaaaaaaaaagtgggtaactaatgtgagatgatggatatgtttgttttactatagtaaccttcttaatatctatatgtatcccatgacatcatgctgtgtgccttaaatatacacaataacatttatttttttaaaaagtcaggccaggtgcagtagctcacgtctgtaatcccagcactttgggaggccgaggtgggtggatcacctaaggttaggagtttgagaccagtctgaccaacatggcaaaactccatctctactaaaaatacaaaattagccaggtgtggtggcacatgcctcaactacttgggaggctgaggcaggagaatcgcttgaacccaggaggcagaagttgctgagatgacaccattgcactccaacctgggcagcaagagcaaaactctatctcaaagaaaaaaaaaatcaatcctaggggatctgcaagaataactttctttaaaaaaaaaaaaaaaatgtggctgagtgtggtggctcacacctgtaattccagaactttgggaggccgaggtgagcagatggcttgagcccagaagaacaccctgggcaacatagcaagaccctatctcaaaaaaaaaaaaaaattaggtgggcatggtagtgcactcctatagtccccagctactgaggaggctgaggtgggaggttgaggcgcagtgagctgagatcatgccactgcactccagcctgaccaacagaatgagaccctgcctcagaaaagaaaaagctacacttattaatttttagcagcactaacttagatgttagatattcatcatcctctacccagtgcagcttagactcagctttataatcgatctctatttgctaaaggcatattcggtaggtagacacagatggtggggccccagataaaaagggccattgttttattgatctctgctatttgttttcagcttgtaggacctgcacctgggtcctcaaaacaaaaccttttgtatccttggtaaattgttcccaattcataaaagaataatactaataagacaagcccgccaatatatatatttaaaggaccaggcagctgctaaacccccacactttttcttgctacaattcagagaaaatgttcttcaaaggaggaagctggctttggttatacatcagaacaagtattattctaggaagtgagctaaacagcccagcaccacatgggcaaaataattgttaccagcttaacagatttcaatgcagctttgaggaagcacagcattactgtcatgtgcagagaggattcctagctcatatttggaacaaggaagttca

SEQ ID NO: 16494 - DNA, 2300 bp, Homo sapien
tacggccgcggagacacacacagacagcatctttgcagtttctccacaggtggtacctccacagccgcagcctctggactgactgggaccgtttcaagcatttttaaatgaaacctgatgttgatgaaatctctgaaagtcaagtcaggtatcttacacaatgctgtaatttcatttcaatccttttcataaagggtaaagtccttgtatatattctttcaatacatgctttatctaagacacaagcactctatcaataaaagttttaatttaaacgaccaaaaaattggtgagagagtgctcagaactgaggataaacatgtaagtagttttttgtcccagatgagcaatgatttatgttgactaaggtgtgctgaattaacttattccattaaagtgtaaagggaagacaggttgataagcataacttttaccttgataaatgttttcaatgatttctattgcatgtagactgaaacacctagcatgtaaattattgcagtagaatctgtctctaagtctcagctgggtctgtgaatttgttctaatttgatagcttcatacaactgatgaagctcaaaaatggcttgactcaagatatttcatacacctttcttttgctctaatttctgctacgacaataacccagctatttcagctgatggcgggaacactgcaactggacaaaaatgacacggatgggtgtagagcctccaaacaataagtatctgattaatgctgttgacacctaagtctacagaggctattctccaacggccaggacatcattaggtaagacatttcaaaattcttcgtgagggcacgattgcttcagaggactacaaagtgacacattaggtcgtcataaatcaccgcagtaccatcctggctaacacggtgaaaccccgtctctaaaatacaaaacaatgagccgggcatggttgcgggcgcctgtagtcccagctactcgggaggctgacgcaggagaatggcgtgaacccgggaggcggagcttgtagtgagccgagatcgcgccactgcactgcagcctgggcaacagagcaagactctgtcaaaaaaaaaaaaaaaaaaaaaaaaaaatcaccgcagtaaaccacactccaacgggcctgcacactcagggtcttgattagaaacagtatttaaaaaaatacctccacatctgttgcaccacaatgccaaggtataaccagggccactttctccaggaggcacaacaggcgcagggccagggaagggcctctgacacttttaggatctcaagaaattttttttttttggttatttttctttgtttgtttttgagacagagtcttgctttgtcgcccaggctggagtgcagtggtgctatctcggctcactgcaacctccaccttctgggttcaagcgattctcctgcctcagcctcccgagtacctgggattacaggcgcctgccactacgcccggctaatttttgtattttattttattttttagtagacacggggttttgggtgttgaccaggtctcgaactcctgacctcaagtgatctgcctgcctcagcctcccaaagtgctgggactacaggcgtgagccaccatgcccggcctcaagaaaatgttttaatttccttaaaaaaccttaagaaaaatcaacttttaagttgaaaaagtttatatattaacatattcatctttatatcaacacagcagtaaaatttattttttaaagtgataaaaactgtacaaatatttctggtgtgaaacacagtgttttgatgctcgcggactcttggattcgaggctgcggtagtacggacaaacaccgtgcagcggcatctcatctccgccaacagccggcgatcaagcgggcaggctgggagagggcgggcggaagaggcgtggccgccgctactgcgcacgtgcacccaaccagaacctgggggtggtgccgggccttccccgctgcgcggaggcgtcctctcaacccttctgcccggcgactggtgggttggcggctaaggggcggagacaagaggggccgccaccatctcctccaatggaagggagacaggggcgggcttaatgacggaaggagcatggcgtggagacacctgaaagtgagtcccgcgagtgagcagtgtggatgggggaccagggaccggggagggcgagaacggagagtcaggccgggcgaggcatggaccgaaggcggctccgggagtgtgggcccccctgggacgtgtgcgtgtttccggggtctcctgcaaatgctcgtgcgtgtgcatttgcacgtgg

SEQ ID NO: 16495 - DNA, 2300 bp, Homo sapien
aaccaggattcttgatttcacaactttcctggtttggctctccacccttcacctatgtcaggcatgttagaatcccccgggggtgcacttggaatattcagatgccctggcctggtgccagaccagtttcaccgccacatctgagagcaggacctgaaagctgccaggggcctttgtggtgcagctggagctgagaaccacggtcctggaggaaggcccctacacatcttgcctaccagtctcctgaggtgctgtgagcattctcaccttcatttgttgctcttccttcttggagcatctctcttaatcccctgcttccaggatccgaccgtgttcaccccgggaggcctttgctagtctcctgaaaggtcgctggagcccatcagtcagttctgcccagctgaacatcttccttcctctggttccccgtgggaggctgggggacgtggctggggcttcttgccagcccggatgaggagggacacagctggagctgatgtttattaagctgattaaagggttttgctgcttgacacgccttggtttcagggaagcactatctagggcctgacaccagcgagctactccctcccaccaaggctagttgataagaaggtatgaaccttaaccacaattggaaaagacagtgctcgtctccgcttcaacccacggtggaaacaccatttctccccccaggcttgctaataataaagccccgtggttttcaaactctagctggtgtcacagtcccctggagagccagcactgttaaaaatagttcccccagtgctccattccacccccaaagattttgaccttgggggtgggccctgggatctgaggtttcacaagcttcccaggtcattctgatgtagctgtgccaggaaccatgctttgagaaataccgggatagccttagcgtgcctctgactttgtcttcctcttcccaggaagtgagagttctgggccataaattccgaaatccagtaggaattgctgcaggatttgacaagcatggggaagccgtggacggactttataagatgggctttggttttgttgagataggaagtgtgactccaaaacctcaggaaggaaaccctagacccagagtcttccgcctccctgaggaccaagctgtcattaacaggtaggtgagcggcccagagttaacgggggatgccctctttccagctgggggcgttcagagatataagatctgcctctgttttttttctctcatacaatgtggacattcttctgtcatttggaatgttcaggaaccctgttcagcatctactatgtgccccaggcatctatcttgaaaagcatgctttgttacgtccatttaacagttgggtagatggaggctcatagagctaaataactccgcttcggtcacggagataataagcaggagagcttgggcatggcctgggcttattggacttgagagtttgtgctctgtccatgttgtttctccaatgctcttactcgacactgtccaggagaaatgtaatgtgagccccatatgtaatttaaagtactctagtgaccacattaacacagtaaacagaaatgagtgaagttaatacttacttaaaattataatttatatttaatgttacaagtatttaaaaaaacgtatatttaaaacaccataaaaagtattaattcgctgtttttaccttcttttgcctgtaccaagtcttcaagagccagtgtgcattttacttccagcacctctccctttggaccagctgcattcccagcagccagtagccacatgcggccagcaggcttgtattggctagcacagccccagcctttagcaaacagggaaatgtaatattcaacatgcacagctgctcttagtaagagaaatccttctagactgtataaagcccttccctttgtcatccctgggcaatttttactacagcaaacccaaaaggtgaagaagtgcttactttttggtaagaggattttgaagagcctccttggggagatttcgatgggcatctttggggccactggtggcctcctgggagacggacctgtaggacatttacttggccgtgcttcctgctttcttgtgcttgtttcagggaaattctccagcattagagatcaagttattgatctttctgctgcattgcaggtggggatcaatatcttcagaattggccaggcaaaatatatttgcttaacattcagctgctacagataactgcaggtgctgggatgatggtacttggtgaatcctataggtgagcaggggtgtgagatcctgctctgag

SEQ ID NO: 16496 - DNA, 2300 bp, Homo sapien
ggggaatgttgtgggtggtcagcgtgtgatggctgctgtcgtcatgttatggctcattctaaaacttgttgaggaaaagatgagtagtgaggtctggtgtagctcttgctttgggggctgtaggtgtgggtacctggcccggctgctgccttcgacctccagagaagcgcctctgggtccttcggtgctatgactcatggctttttctctatctcgcactgcagttgggcatcgatgggctgattgttacgaacaccaccgtgagtcgccctgcgggcctccagggtgccctgcgctctgaaacaggagggctgagtgggaagcccctccgggatttatcaactcaaaccattcgggagatgtatgcactcacccaaggcaaggtttcccgtgtttgtgtcttcagatctgcgtgtggcttgggctcctgggtcgtgatgggaatcatcattccctaatctgtcttgattgtgggggactctggggctgaagccacatccttctttatggtgtcgccatgtgcttctctgtaggccgagttcccataattggggttggtggtgtgagcagcgggcaggacgcgctggagaagatccgggcaggggcctccctggtgcagctgtacacggccctcaccttctgggggccacccgttgtgggcaaagtcaagcgggaactggaggcccttctgaagtgagtgaggtcatgtgtggcttgaaacagaagttaggcagaggttcatttagatcactcaagtcaacgagatactgttgatctgtttcttattcattcaaaaaggagttgaggggtacactctgaaggggagagaaattctgggttactcttttgatgaaggacaaacaatgccaaggagaactgaggattaacctccaaggcaatggtgtttctaaggtggagttgtccatttgctcaagggaggggagcctgaggaatcccatcagcattcccattaattaagcaacactggttcaatgttgggagctgtcaatacttaaaagcaatttccttcctgctctgttcctacctgggtagaaatatccctaggtctctgggtgaagagtgtagaggaaaccagatgtgcctgggccgggatgatgcgtttctgggtgaacgtgggcttcctgtaagagcagggcctgttctccactgtttgctgaaattgctttgtttgctctttttccagagagcagggctttggcggagtcacagatgccattggagcagatcatcggaggtgaggacagcgtctgacgggaagcctgatctggaaccttcccaaggactcaggcaagcctttgtggctggatcatgagaggagggactccatcttgagccatgtcccccagccatggcatggctgcactgtaaacgccaatcggggggtcaccaggatcaaccgcaggctttcttcagtcccttggtcagaccataaactgcatttttgattctttgtggattcaaaccctaggatccatcagtcttgcaaggacattgaatattaggaggaaaaagtcatggaaaaaataaagccatttagaacctgggtttcaacgctagccctttctggtttgccataggccctgccaagatactgcaggtccatccaggcctctgctatctgcatctgcagtgggcttcccaggaacttgactgtctttcatttgatctttatttttgtttatttaatattttaaactttattttaaaaatatttcaaacataagggcggggtgtggtggctcatgcctgtaatcccagcactttgggaggccgaggcgggcggatcacctgaggccaggagttggagaccagccaggccaccatggtgaaaccctgtctctaccaaaaatacaaaaaattagccagatattgtggcaggcacttttaatcccagctactcgggaggctgaggcaggagaattgcttgaacctgggaggcggaggttgcagtgagccaagattgcaccagtgcactccagcttgggcgacagatcaagactctgtcacacacaaaacaaacaaacaaattttcccgtttctctctgtccctttctctataacatggataaaatattcacgtcttatgtatttattattgctgagtcattggtgccttattcttcagtgtttcagtctgtatctcctaagcatcctgatgttagttttttgactataaaattgacctgcattctttactagcaattcaaacggtacagcactcttgaagtgtaaacattcctgttcctcctcaccccactctgcagacatgcctttctgtc

SEQ ID NO: 16497 - DNA, 2300 bp, Homo sapien
actagcaaggtaatgtaccagggttctaactcttccacatccttgccaacatttctctctcacacacacacacacacacaaatttgtagccatcctagtaggtgtgaagtggtgtttcattgtggtattgatttgcaaatttccctattgacattttccaatggtgttgagtgacttttttttttttttttttgacgacgtctcgctctgttgcccaggctggagtgcagtggtgcgatctcagctcactgcaaactctgcctcccaggttcaagcaattctcctgtctcagcctcccaagtagtagctgggactgcagatgcatgccaccacgcctgactaatttttgcatttttagaaaatatggggtttcaccatattcgtattggttagactggtctcaaacttccggcctcaggtgatccacccacctcggcctcccaaggtgctgggattacaggtgtgagtcactccccagccttgagtatcttttatgtgctttttggcactttatgtatattttttggagaaatgtctatttaaatcctttgcccatgctttaattgtttgtctttttgttgttgtagttaggatatgctctggataacaaccctttatcagatatagaatttgcaaatattttctcccattctgtagactgtcttcacttttttttttgagacagagtcttgttctgtcacccaggctggagtgcagtggtgcgatctaggctcactgcaacctctgcctcccaggttcaagcaattctcctgcctcagcctccgagtagctgggattaaagcatgcgccaccatgcctggctaatttttgtatttttagtagagatggaatttcaccacattggtcaggctggtctcaaactcctgacctcatgatccgcccacctcagcctcccgaagtgctgggattacaggcgtgagccaccacgcctggcctgtcttcattttattaatactgtcttttgatacacaaatgttcattccgatgaagcccaatttatctaatttttctttgattgctggtgattttggtgtcattatctaagaatccattgccaagttttacttggttttgatctctagaagactgccatcatactgaaggtaatcttctgaaacttgcggttttctttcaaaaattatgtttataagatgatccatgttcttgcagagtttattcattttatgctgtataatattccattatatccacatacaatgcagtattgacccttcctcctgttgatgggcatttgtcttgtttctagttactttgctattatatcagtgtcaccatgattatccaaaagtaattcttttgtacactctaatttaagaacaactaaccctttttaatgaataaatcaaccttgtattgagttgctactaagtttcagttgactagtacctgggatacacacaggtgcagacatttgactgagacatattgatttttctcatctgcctatttaggctaatcaccagactataaaaccatgagaaccactgccattgagtatagtctgtgtcagtctacactatagctttaactagttgtgtgatttcttgcaaagagcaatcagagaagacacaataaacacatttactgatttcaggctggagagcttttaagcaatagggagatggccacacacaaggtggagaaaattactgtgaaaaggaagtactttctttagagccccacctaagctaggctgcagaaatgtctacaatgggtttgaaaaaactcaaaatgagcctttctgcagtgtgaaaatcctccaagataaagagacagattgatggttcctgccgccgccctgtcctgcccagttgctgatttcaggaaatactttggcaggtttgtgggtcatagagttgccaggtttcttgggatttgtaatagaacatcacaagaaaatcaagtgtgaagcaagagctcaactcttaacaggggtattgtttgtggttttgttactggaaaagatagtgaccttaccagggccaaagtttgtagacacaggaattacgaaatggagaagggggagaagtgagctagtggcagcataaaaagaccagcagatgccccacagcactgctcttccagaggcaagaccaaccaagatgaggtgggtccacagctttccctcctgcctttcctctggttctttatttcagtcttttttgcatacatcggtagagatgcagaaatagaacaaagaaacgggcaaatgggctaaattatagtgaaccaaagggcttagtgtgttaaatcttctc

SEQ ID NO: 16498 - DNA, 2300 bp, Homo sapien
agagtctactgggagtatggcagaaaacaccctaaacccactggaaatcccgaaggtgatacaaactcttccaccttagggaatcatgctcactgattgagtgcctattgaatgctaggtcccagaaagttaactgttgtccttgttttacagacaaggaaacagagactcagagatggtaagtgagttgcttaaggttacatagctatgaaacagggaagcagaactttgaacccaggtctgtttgatacaaactcagaggtcctttcactgcatgctgttgcctcctcaaagtgaattaggagaaaaggcatgggcctggttgaggaagaggctagctcaaaatgggatggggaaaaagtgttttaacacagacagtacttcagagtttgggatctaacctaccagcactccagaaaacaaaagacaatgatgtaaaggcaggatctctggacttactgagtccaaatcacagaatggcccataaatttgctaagtaatttaggtttcctggccatcagttcctggtctcttccatgaaggacttgagccaggcgatggctaatgtccctatcagcaataaccttctggtattccataaagagtggggaggtagagtccctgcatcagtagaagctgcttttcctactgggaacaaacccaccctgcaccaggaatcaaatgcaggctgtctgagcctcctctcctgatggcaggtcatgctattaagggtctcccagaagaaaggttctggaactctgagaaacagaagctcttctaacagaactttttcttgctataagctttcaataccaccaatcaccagtgcaccttcttctcatgccaaaatacggcccctcctttgtagggtgtaaaacgacactgatgtcactctctctcaccaaggtctggccatctctgtgaagctctcctcacaggcaccctgcagattcatcaataaacttcaacaggttagcgccagtaggccaataagatgcacacttatattctagaacctgtgaaagaagtaatagccagaaactggaaaataacagtcaaactcttaaaaaaatgcctctcagaacacagtcacttacaccttttcctctggtagttctcttcagcaccaagtttcctggaagaacaagctactccccagttttcttaaagaattgtctgattgtattaagtaagtggcttctggtaaaataatggtaagagaaaagctctggcattctcttgatcactcatcttctctgccttcctccctagcaacatctcctggcctcagcctgtgggcttcagcaacaccaaactccatgttgctctctgacaagcccggccgtctccagttcttgggctttatttcctcgggggccctctgctgaaattcccttccccttgctgtattagcacctcctacccgccttcaacatgcaggcactgcctcctctaaggagccatctgtacttacgtagctgtgagcataggatggggcatacagcaggcacttaacaaatacttgtggaatggaaagaaactaagataggatcaaaaatacaaatcaagatgtgagagaaagacgatcaaaagccctcacgagggggctgggcgtgatggctcacacctgtaatctcaacactttgggaggctaaggcgggtggatcacttgagggtgggagtttgagatcagccagagcaacatggagaaacctcgtctctactaaaaatacaaaaaattagccaggcatggtgatatatgcctgtaatcccagctactcgggaggctgaggcaggagaattgcttgaacctcggaggtagaagttgtggtgagctgagatcatgccattgtactccagcctgggcaacaggagtgaaactctgtctcaaaaaaaacaaaaaacaaaaaagaacaccacgggaaaatcaagtgtgaagcaagagctcaactcttaacaggggcaatgtttggagttttgttactggaaaagatagagaccttaccaggtccaaagtttgtagacacaggaattacgaaatggagaagggggagaagtgagctagtggcagcataaaaagaccagcagatgccccacagcactgctcttccagaggcaagaccaaccaagatgaggtgggtccacagctttccctcctgcctttcctctggttctttatttcagtcttttttgcatacattggtacagatgcagaaatagaacaaagaaacagggcaaatgggctaaattatagtgaaccaaagggcttagtgtgttaaatcttctccttttctgcatcc

SEQ ID NO: 16499 - DNA, 2300 bp, Homo sapien
tctctgtcatggcagcatattatttcttgcatgtgttacactttttaaacagtcctttattgtatactttatattattacaagtcctggcttaaagattcttcgtgtgcaccttactaggtgcacctcattacacggcaaacagatcaattaagagtgtgtgtgaaaactacaataccataaacaaataataaaatactgaggtacaagggacctaatacaaccccgtcattttacaaactagcttgcttacagttgcactttctactacaatgacaaggactagaatacaggccaccaaatttctagtccaggggtccttctactacaataatctattttcatgattggtagaaatttcatttttgagaaactctttgacaaagaagcttagttttgtggtcatctataagagactccattgagatggtcggtattttgaattcagttccaaatatgaaaagggaggatttcttttcctattttttttgtcacaagtcacattttaagatacgaattaggccaggctcacccctgtaatcccagcactttgggaggccaaggagggtggatcacctatggccaggaattcgagaccagcctggccaacatggtgaaaccccgtctctactaaaaatacaaaaaattagccgggcgtggtggcagatgccacctgtaatccaagctactcaggaggctgaggcaggagaattgcttgaaccctggaggcggaggttgcagtgagctaggatcgctccactgcactccagcctgggcaaggcaacaagagcgaagctccgtctccaaaaaaaaaaaaaggaattatttaactaaaattcacataggaaataagattgttccagctataggtcatactttaaacagggacattgatggcccaaagggacgtcatcagatgtgagcagcagaacaaattaccaatgaaagggaaggtcaaagagaagacggatctgtcccactagaattcaaacaaacagcagttcctccgtgttactgatcgaaaggagaaagtaaggggagaacaaagttgttagtggtgaggctaggggtgcaactggacaaacgttggaagcaggagaggaaaactgagaccacatctaagaaaatgtccatagtaaatgatacccacagagaattcccaaaagaagacgtacaaatggacagtaaataaactaaaaagttaagctttaccagtaagcaaagaaaagcaaattaaaacatatgtttacaaagtcactgaattggcaaaaattaaacaagatagtggtaggggcaggcacagggagttcctgctggaatgcagacacaaaacctttctggaaagaaaactgacatactctttgaccaataactccactgctttcctctctccctctctttttctgaggcggggtttcgctatgttgcccaggctggtctcaactccccaggctcaagcaatcctcccgcctcagcctcccgagtagctggaacctcaggcgcgcgccacaactgcagaaacaccaaaaaaagaaaaaaagcttgaactcacttttgtacagaatcttactacaatgtattccagaaaaacaactggaaatcagtggtcatctctgcgtgtgaacgcatgggtgatttttatttacagccgggcgcgcatctccattttccaaaatatccgatatacatatttaaagtcacctgtgttgcgctgctcctggcccacaagcgctaagggaccccagcacttaccttactcgtccacgccgcctcactccctttcactttgtggctgtcagcaaccacttctcggaagagcccgggcgcggacagctcctttcatcagccccaagccggacaggaccctaagaccaagtcacccaggggctgttgcctagcaaccctcgtggccccgctagcgggaaggaaaccgaacagaaaacgcacaagcgcagaaaagaaactcctggccgtcggtcggcccccgctcaacagcccaataaacggaagagcttctagtcaccgcccaccttgctcggctctgaccggaagctaggcgtcacctccgcccgtattaaagatggtcgacctttttcccctccttttcctgcccccagactagaggcgggatgtagtctcttaggctaagagtgattggtcacaaggagactcggaagtgtctgatcagagccccagaggaggccttgagagcctgttggcgtaccgttccacacttggatccaggaatcgggcgtgttccaggctgctctctatggtagctttgggcggatagagggggcg

SEQ ID NO: 16500 - DNA, 2300 bp, Homo sapien
ggtaagcaaataacttaatctttgtttagccataatttcatatctattaaatggaaaaaatttttaccttatctaatccatgaagctattgtgagaatcaaacaaaaagtgtatgtgaaaccataaagagtagctctttatgtaaccataacagttaacataaatgtaactgctacattgtattatttgctatcctcctatatactgttggtccctcacccatttttttacatgagttctacctcttcctctctttaaacaacaggtacagcagcacagagatggggcagaaggctaccgtccatgttctccatactttagtggcttttcttggcctagctgcgttttacagaaaacaatttactcacagcagccaaaatcagtttaataacaatccatgttcaccaaaaatatttatgagaaacaccaggttaggaaaaggtgttactgagaagtatttaagtggctacaagacttctggcactcaagttggaacaagctcctctttacctctcactacacatctgccactcatcaacatatatcagttctggatgcttggataattcctctcattccaacaagttagcaaagcaaaggagatgccaccagaatccagaattgtttaccaaactctaattaaatgcacagctctacagagtattgccaaacagactggacacataatattaatgcagaaacaagagttacattttgaaaatgccatcaggcagaacagaaaaaaagaaagctgcatattggtgacatctgtgcgcatgtgaggaaatccacacaagaaggtaaagatatacaggctctactcaatagttgtctaaactaggaaaggtaccctggactgccattctacgcagttgagagaacactggatgtgttgttgactgctgtagctcaatgtctagcaaaataagcgtttgataaattaaaaaatgaattaatttaaacttattaaaggaggacaggaacccaaacatttctggagacagcaagggaagattccagcaacacaggacaaggagacagccagagagaacttcattagctgctgagacgaacaaataaggagctaaagagcaagattcttgagaaggattaatggcaaagaaactacaaggcgtacgagaaagccagggaagaaagaacctggattcattcattcaacaattattcactgagggtgtccctgagccaattgctgttctcggcgatagcaacagagaacaagacaaaaatccccgcccacctggagctgacattctagtagaagagatcgcccaccagattgcctggtataaatgacactgtgagagagcagaggaagacacaaggagtcctactcgggctcggtgacagtctggggtgggttaaagcggaggcctgggagagggaccaaggccactccaggcagcatccctggatctcagcgaggccgctccaggcagcaggatttgaccagagcaaggaggaaggccaaggcggccaggacggatgcagcatccctgaggtgagtaaggcaaggtgggtgacagggacgacagaggaactccccaaactggggcccggacctgagcaggggaccaatatccgccgcctagagccgccatgattacagaagggcaggccaggaaggaagaagggactctcacctcaccaagcgcgactcttgggacccttctgtcccggattctggggcgccggcgctgccacccctcgctcagacaggctcaaggagccaaaatccacaccttgaaagcggccattattgtcccttaatactttgcgcgccccctctatccgcccaaagctaccatagagagcagcctggaacacgcccgattcctggatccaagtgtggaacggtacgccaacaggctctcaaggcctcctctggggctctgatcagacacttccgagtctccttgtgaccaatcactcttagcctaagagactacatcccgcctctagtctgggggcaggaaaaggaggggaaaaaggtcgaccatctttaatacgggcggaggtgacgcctagcttccggtcagagccgagcaaggtgggcggtgactagaagctcttccgtttattgggctgttgagcgggggccgaccgacggccaggagtttcttttctgcgcttgtgcgttttctgttcggtttccttcccgctagcggggccacgagggttgctaggcaacagcccctgggtgacttggtcttagggtcctgtccggcttggggctgatgaaaggagctgtccgcgcccgggctcttccgagaagtggt

SEQ ID NO: 16501 - DNA, 2300 bp, Homo sapien
ctgccacagcctcctgagtagctgggattacaggcacgcaccaccacacccggctaatttttgtatttttagtagagacggggtttcaccatgttggccaggctggtcttgaactcctgacctcgggtgatccgcccatcttggcctcccaaagtgctggggttacaggcatgagtcaccataccaggccacatccttgttccaaataatccagataaaagggcagaggaccaggtgacaagggtggaaaggaaaggcacactcccttccttttaaggacactttccggaagccacaacaccttcacttaaatatccctggccagaattagtcacatggcaacagctagtttctaggaagcctaggaaatgtggtgttttaggaggtgcattgctgcccccagtagagtcaaggttctattagtaaggaagagcgggagaatacatacaggactcggcaaataacagtcactgtcaaagatcccaaaccgagaaagcattgagagaattattttagacattctgccaagttcccccaatgtcttgttgcacagcctcatcaaacatctgtctaaggttgggttcactcaacagcagaccctaagacaaggatataaattcaagtaactaattccggaggtgattcctgcatgcacatgagcaagtgagtcaaagaaggaccggaagcccataaaggacactggtattgagtagattgcttgcttggtccctctggggaactctgggagatagtgtagaacatgcctcagagtgaacccaccaacatacccccagtcattggttgagggctgctcctgagggcgttaaccccccagcacttctaacctaccctgtcttgcctctctggttgaatgggctcctggtattagagaagccctcaggcagagttgaatatgcttgcagtgggaatggggttaacttgcaaagaaatagcaagtgcccaggggatatgggctggccactgacagctttggttacaaatatttggatataaaatattcctctcttcttccccttacgtagtagacaccttacacaaagttatcctttcctaagaagaatctcaaatgacagacagcaagtataatgagcttaaactaatggaacatgttctatcagcattctacattggattatttaaactaatataaagccatccttcatgactcttctgctgttaactccttcaacacatcaaattcgagccatacaatttagcacactcaactacctacagctgtttattcattttaaatcttatgtccccaagattgtgaaagttttaaactctttgaggggtgagcatatgtctaatatgtatatatcccctctgcacttaacacaatgctcgtgagctttcaataaatatctgtcagtttgttgactaattacttgatgaggaagaaaataaatctaaacaaggattgtgcaaatcccagaggaactttgggtcatgttccccacctatctcttgggaactttcctgacatagtcctgtgtgcaggaggaagtctgcattttctaagttcaacctctagagaatgcctgggaaggaaaaaataccagcatttcaagcccttaaaaaacagagctatacaaattcattcctattaatcaactagcaagtattcattgagtttctgccacatgctgggcagaatgggaaatggatatgatcctgccttgaaggagcttacctctaactagggccacctttttttgtttccaatcattagcatcttgatattacatactgtagcttttagatctgtgcagcctctcttctgttcatctggtcttctggttcagatacaagacttctctgcagggaatcttacaaccgcatcctttcctcattacgtgcttccatgggctcaatgtggatttattcctacacctacaggtgattctctatgaggaggaaatgggaaatcacaacgagaacacaggggagaagctccatttggcgcaggagcaactcgccttggccggggacaagatcgcctctctagagaggagcttaaacctctacagggataaataccagtcttccctgagcaacatcgagttactagaatgccaagtgaagatgttgcagggggaactcggcgggatcatgggtcaggtaggacttaagtcaggccattcaatccaggcaagtggatgtgctcccaggtggtcccctcagacagtcccagcctcctccactggaaacccaaacctttacccagatgtcacttcctgcccttgattttgtagccctcagcttttgaacctcca

SEQ ID NO: 16502 - DNA, 2300 bp, Homo sapien
taatagaaagagttactttctctttttgcacacctgacttgatacttgctaccttagtcacccatttgaggtgtggtgttaggtgtttcttgggaatctgcaaggtgctctgatagtagactgagggaaggcacaaaacatcactagaagctctgaccaagtttttgttttcactacaatcatttctttaggcacagctgtcaccaagagaagtcctactttgaaaagcagatggcaggagttttgaatacaaaaaaggagttgcctgggcagatggcagtagacaaggcatgaagaaatgaaggtctcaacagagacgcaagaggcagaacagaatatgtaagaacaagggttcaagaagagggagacatgagcaaagtcctggcttcagagagtcagtagccggggatctggtagagagtccctgcctctgggatgagcccttcctccacaaaatatctgtccagccatactcctcagtcagacagcactgtgaaggttcacatggcatttcgtaaagcctgtggggctcccccaaaacactcttccctatccatctggcaaacattactgtcaaatgtatcaaaaacttatcatataacacttccagttttttcatcataagcccttccaaactgcctgctgctattgttaatgactgaagattctgacatctccttcatggaacaaactccagctctctttttttcttcctacttaccttacttagtaaatttcaatatattttcatgcaaatgttagaacctatgccttctacttttccttcgaaatgctcttggctcttgcaactacagctgtgtaactccatagcggatgaaaccatcacaatctagaaaatcatttctctgtcttttggacaagatttcatttgatttcagaatcatctcctgactatccagtgggcttgcctgcaaagaagtatgattctcaaggatacatttgttccattacaactttttgtatgatacttgggtgagttcatagttcctcctaaagaaaggtgtccatcgtggtagagcactgaatcagtgaactttaaagctaggaaagacttctaaaggccatttattatagcttcctagcttacagaagcagaaatgaagcctcagagatatgaaggcctttgcaaaggccactcctccagtgaggtgctgaaccaggtttagaagcttggtggcctagaatcctgtttagtgttcttttatgccacgctatttttaatcttgcttgactagtgtggaagtcatttgtgagttcgccagtacaggcatacctcgtgttactgctcttcactttactgtgcttcacagatattgcatttttaacaaattgaaggtttgtagcaatcctgcatcaagcaagtctattggcgccatttttccaacagcatgtgctcccttatgtccacatcagcatttttttagcaacaaagtatttttaattaagttatgcaccttgttttcttagacataatactattgcacgcttagtagaccacagtatagtgtaatcataggttttctatgcactgagaaaccaagaaatttgtgtgacttgtctcattgtgatattcgctttattttggtggtcagaaaccaaacccgcaatctctctgacatatgcctatatttctttgaggaggtaaaggaagaagttaggcatggccatgtgacttgttttggctaatgaaatgtgagcagaagcaaagtgtttcacttccgctttaagaaccagtaggtgattcaccaagttccctttctgctaccatggcaacaggcaacatactagataatagaagttcaccagctgaggactacgaggatattgaggacaatgtggagcagagccccagctgactcataaaggacatgtagcatgagtaaaaaataaaccttcacggtcgtaagccactgagacttgggggttgtttgttactacaccatcacctagcctgtccccaccaggtgagcctgagccacacctccatttccatgatgcacctctgtgcatgaagacttcagagggtactcaatgcaggaaatcagaattcagctccataaaacattccagattccacatatcaccaacattctttcttcctcttggcttatattagggataggggatgtggtttgttacaaaggatgagtattttgatagcttctcattccttgaactattctgcaggtaagttcctggtggaaattcctctattcttagggttaaaaacagaatgaatgagatgattttaataagctcagtgcattatgacctcaaat

SEQ ID NO: 16503 - DNA, 2300 bp, Homo sapien
tagtacatgtggcctactgaccaggacagtgacacctcggcatactctagctaggagagatgcccatgaccatggaccacaagcttcccctggtgccaggatccaaactgggacctcaaaatcttaagcacactctggagacgccttaaagaggttgagagaatcatgaactgtgagggaatcatgaactgattcatttttaacctgaaagtcgtggtgctttctcagaaataactaagattgtgttttctgccatttggtgaaaatggggctaaacaaaaacactgagtaatagaaagagttactttctctttttgcacacctgacttgatacttgctaccttagtcacccatttgaggtgtggtgttaggtgtttcttgggaatctgcaaggtgctctgatagtagactgagggaaggcacaaaacatcactagaagctctgaccaagtttttgttttcactacaatcatttctttaggcacagctgtcaccaagagaagtcctactttgaaaagcagatggcaggagttttgaatacaaaaaaggagttgcctgggcagatggcagtagacaaggcatgaagaaatgaaggtctcaacagagacgcaagaggcagaacagaatatgtaagaacaagggttcaagaagagggagacatgagcaaagtcctggcttcagagagtcagtagccggggatctggtagagagtccctgcctctgggatgagcccttcctccacaaaatatctgtccagccatactcctcagtcagacagcactgtgaaggttcacatggcatttcgtaaagcctgtggggctcccccaaaacactcttccctatccatctggcaaacattactgtcaaatgtatcaaaaacttatcatataacacttccagttttttcatcataagcccttccaaactgcctgctgctattgttaatgactgaagattctgacatctccttcatggaacaaactccagctctctttttttcttcctacttaccttacttagtaaatttcaatatattttcatgcaaatgttagaacctatgccttctacttttccttcgaaatgctcttggctcttgcaactacagctgtgtaactccatagcggatgaaaccatcacaatctagaaaatcatttctctgtcttttggacaagatttcatttgatttcagaatcatctcctgactatccagtgggcttgcctgcaaagaagtatgattctcaaggatacatttgttccattacaactttttgtatgatacttgggtgagttcatagttcctcctaaagaaaggtgtccatcgtggtagagcactgaatcagtgaactttaaagctaggaaagacttctaaaggccatttattatagcttcctagcttacagaagcagaaatgaagcctcagagatatgaaggcctttgcaaaggccactcctccagtgaggtgctgaaccaggtttagaagcttggtggcctagaatcctgtttagtgttcttttatgccacgctatttttaatcttgcttgactagtgtggaagtcatttgtgagttcgccagtacaggcatacctcgtgttactgctcttcactttactgtgcttcacagatattgcatttttaacaaattgaaggtttgtagcaatcctgcatcaagcaagtctattggcgccatttttccaacagcatgtgctcccttatgtccacatcagcatttttttagcaacaaagtatttttaattaagttatgcaccttgttttcttagacataatactattgcacgcttagtagaccacagtatagtgtaatcataggttttctatgcactgagaaaccaagaaatttgtgtgacttgtctcattgtgatattcgctttattttggtggtcagaaaccaaacccgcaatctctctgacatatgcctatatttctttgaggaggtaaaggaagaagttaggcatggccatgtgacttgttttggctaatgaaatgtgagcagaagcaaagtgtttcacttccgctttaagaaccagtaggtgattcaccaagttccctttctgctaccatggcaacaggcaacatactagataatagaagttcaccagctgaggactacgaggatattgaggacaatgtggagcagagccccagctgactcataaaggacatgtagcatgagtaaaaaataaaccttcacggtcgtaagccactgagacttgggggttgtttgttactacaccatcacctagcctgtccccaccaggtgagcctgagccacacctccatttc

SEQ ID NO: 16504 - DNA, 2300 bp, Homo sapien
caacctgttctccacctttttttttttttcattttacaatgtattctgttcatagatattaagacctttctggacccctcctgtcattattttattttcctgcaatggttacaaagaaagaatttctgtttaggagaatactcaacgttttcatagcttcatgatatcccgttgtgtggacaaaccattgttaatgtaaccagcatcctactgatggccatttaagtagtttctaatcttttttcattacaaaactgcaatgagtagccttctacatgtgccattttacatgcgtgcaggcatatctgtaggataaattcatagaactggacttgctaggtaaaagggtagctgcatgtaattttagtgggtcttggaaaattgcattccatagagtttgtgccactttccacttccaccattaatgtatgaaataaacctattttaccacaccttcacaagttcattgtattatcaatagtttgggggttttgcaaatatattaaatacaaaacggtatctcagtgtggagttaatttgtgtttctcttactgtgagtgagattgtttccttaatatgattaaaagtaattttatttcttttcctataaactatttccctgttttccattaggttattagacttttatatattgatttataggagcttcttatacatatgttatagaaattagccctttgtctgttatatgaattataaatttttcctggtttgtcatttttctgtttacttatgatgatttttttcatatagaaatttgttttagttttatgatgatgaatttataaatccttatgttttgacttctgggttgtgtgttatatttagaaaagacttctatccaacattattttaaaaaattctctcattatttcttctagtaattttatgggcctatttgtagtatttttatttatctgaatttattgtggaacatttgatgcattgttggatgttgtcccggcaccattttgccatcatcaagtgaatgccatttgtatttattcgtctagtacaacttaaatcaaaatattgctgtcaatttccaaatgaaataaatattgattgaattcctactatgtgcaaggcataatatcatgttttctttctaatttttttcttcaagaataaatagagacaggattttaaggccagagatccaggaacttcctctgataggttaaaaaaaatctttagcgatagtctcttcatatcagtaggaactgaatagagccatattcagtgagacaataagctagtcaaaactgcaagcagagaaaagaaaacataaatgattatttataggtatgagctttccttgtaaccagggaaggaaaatgaaatagataacaggagagattgtcaaagaccacaatatctatgaacatatgatgctacaatatgaagaccatagctatgaacactatgtaaacattcacttgaaatagagcttgtgaaatggagctcaaaacggcttagtactaagagattctaaaataagtcattatcttttaagtatactttcctttggcatgagaaagactatcataaagactataaaccttaaatgcttcattgaaacaatcataggaaccctatgactcagctattgatgaactgttcctccagacttcctttaccacagcctgtaatcactggctgctcttctgcctaagagctattatgcttctagctagaatttaattatctgatttttggaacatcattggaatccatatcctagaaaagtttctaatgaaaaccaagttgtactgttgcatggattcataatgtgcatgtgtgtgtgattcatccatacagaatgttacagaaatattactggaaggggaagagacaggaataagagccagtgagtatgagtcacaggcaggggagagaacaaaatgcaaggagaaaatatataggatccctgttcttttaaagaacacacagaaactgaggatgaacaggaaggtgatgtttacagtttcatactgcccatctgtagtgggttgaataatgtccccccaaaattcttgtccacccagaatctcagaatgtgatcttatttggtctttgcagatgtaattggttaagataagatcatactggatgtggatgggtcctagatctgactgctgatatccttataagaagaagaaaggacacgcggagactacagtgatgttgccacaagccaagaaatgccaagaatttcgggagccaccagaagatggaagaggcagggaaaaatcctcccctaaagccttcagagagag

SEQ ID NO: 16505 - DNA, 2300 bp, Homo sapien
aggggctactgaggaaacactggtggcataacgcaggggagaagaaggggaaagaggcttgtctctctctctctatgttttaggtggttgtttttaaaaaatctgcaaaagggtttcagggaacggctggtacttacgttgtctgcgttgctgtggatcctgaaaggtgttctgttggcaccgggcgctgagccaggggcaggcgctggaaacaaaagggagagacaaaaaaataaagtgattcaatgggaatattaattgctgctcttgtggattttacaaaacacataaactgttttctttttctttcttaaaaaaaaatgtggattggcgcgtgtcccttttgcatggaatatacaagtagtatgggatttacagcccagttacgggactcaggattagctgcgctggcatcttttgggcatattcttccttttaatgaatgagctttcgctgttaatgaggaataatcgtttggctaatgagctttgaaacattaagagaaaagaggttttttccgttaatcgctctggtgcgactgcatggatggattacaaaagacagcaataggaacgcagtacaaagggggggacctctcctgcagtgggagaagcaccgagatgggtgatgtgtccctgcgtctttccttccttctctctttcgctctctctgccaactgctatgggtttccataactctgcaatcaaagtggatggtcgggaaggattattacacagagtgaagcctccgctgttaatgtctccagtgtttaatcatcatacagtagaatggttttatgcatatttcatttgcatatcattaaactgtgttagtgaggggcattcagaaccaggagaagtacaaagttggggagagagggaagaaaaaaaggtccctatgatgcttatcttcaaacggggacttgttccatgatctgtcttctacttttgctaaaatcattatgacttggaaacctttgaagttggatacaaccttggattcttctaattcctgcagagcagtgtattttacaaaacagcagaaatgttcctgcactagacaattaaaggaatataaactccagtgggctgaaactagtagctctttggggaatgcagtagcagaggcttctacaaataccaacacttaaaaatatataataaacagcatcatattagaaacaaagaaaacgaagacaagaaatattaacacgtggattatatttgtttcttttggggggtaatgaactaaagagaatgaagaagccatcggtaatttatcccttcattaatgaacagtcacctttttgtatgtgtttgtttttgtcctttctttttgaagagggatgttgttacttttgaagcaattagtcaattattttgtagctctgatcttttccccctgcacccgacaggacagaaaggtggtggttagggaatatgtgagtacttggggagggggggacttggtggggagagaaagaatacagtgagttctttgtagatcttatacatgcacaacatattaattgggggcttttaaagctccctcaatgggctatttcattcctggtaaaacagcagctggttagccactactggtgactcttcaaatattacttcatttttattctgtcgccgttgttgttgtcttgctttgtttttcctcagttaagaatgaaaatgtagtatcaccccctctttagtgagtctcttctccatcttcttcactccaatttccaaactgtaaaacaatgttggcttaatactgagtcctggtgcacagtctaactggcacaacttgatttggaaatgagatgctgctttatatttaaattaccccggctccccccttatcctccaaagctttgtctctgttatgaatatgcagatgaggcctgatgtgattacactgtacaattactcctatccatggtggtgtcaggggctgctagggagacagagagtcagacagcctccaagccaatacagagttttgttttcggtatttttcctatctccttggcactgcggcacatgcagatgtcgctgttgttctttataaagccctaatgtatgcaaaagcataacgatttggtttggacgcaaagcatcaacgaaatattatggatgtcttcaagaaagggggagagaaaatcctgactgaaggaatgtccacataaattatttttatttaaatgaattcaaaggatgggatgagggcaagtcagacggagtcgcgtggaaaacatgaataatattaatatgcataaagaattctcaccaacgaggagaagctcc

SEQ ID NO: 16506 - DNA, 2300 bp, Homo sapien
tacctttatctctctgttttttgtttgtttgttttggagataggcacgatcattggccactgcagcctggaattccccggcccaagtgatcctcccacctcagcctcctgagtagctgggagcaaggcgaacaccaccacggctggctaattttaaaatttttttgtagagatggggtccgactatcgtcttgaactcctgggttggtctcgaactcctgggctgaagcagtctttccacctcagcctcccaaagtgttggttgggattacaggcgtggaccgccacacttagaaatgacttttctaatatccttaaatcagagctcatgtaaaattttcagccttctcattccacctccctccgaactacaagtcttaaaactaagaaatgacagccattcggtagaagttaaaacactgtttcgctgcttatttctacttaaaaaaattatatacatagatatatattatgtaaatatatataattatatatatagacatacgtgtgtgtatatatataaataaacgtgtagaattggactggggtcccactaatatccacatttcaaaacagaatctaaaactccctaaaacagggttgggctcggcggctcacgcttgtaatcccaaccctttgggaggctgacactggagatcagtctgagcaacaaagtcagatctcttttctactaaaacaaaatacaactctctaaaactaatacaaaattttgtgtgtatgtgtcatattctggagaaaagctccaaggttttcctctgggtcttaaacaggactaagaccccccacccccaaaagaatctctgttctagaggctaagcatatagaagctcatactgcattatcaaactggaaagttaatagaggattttcatggtcatatacaggagaggtggggaaagctgtctatttagactgtaaactcctaaaatgttcataaatctcaatggaaattaaatccaccggggtgggagaagtatcacaatagacaaagaagctaaaggttaatgaagagaaggttttaatcagtggttacttttgtgcttgggatcaatcctcagtttgtcctccaacgtaacttttggcattattcatttcaaagtctgaacagtatccataaacccaatacgaaacctatggatccagagggtccgaccgaaaacaaaacaattatgtttccgatgtgaacgcatcaatagcttacttttgtagcgctttataaaacgctgtcacttgctgctttccacgtcatgatattcccggtcgggaagagtaggacagcagcatcttttatgaataaggaattttttggattcaatttgtgaggtgtgggacgctcaccaggttgcgcgaaaaccatttttctacatcgtcaagtgcacgcaccccgtgtctcatagtattagtgatgaagacgaggatgaaactaccaaagacatcagtggggagtgaattatacttgggggaggtgtaagcacgtcgaaataaggaagctgagagacattttgtgaaagagggaaggtagcgttaagaggagccttccatcaggggcaacagaacgggggcaggcgtggcgtctctgggactgccggaaaacgacgtgagggaaaaactcagaggctacgaaaaggcgaacagacggagggcctgcctcaggggagctaagcagctcgcctgaagccccccatctggaaatgacgtgtttaactcggcgcccctgcagctccggccgcccttttttgtttaactccgcgcccctccagctccggccgcccttttcgtcgctctcccctcgcggtcgctcacccctgagatccctggttccactgagacgctcagcttcattcggcaactcgcggacaccaagcgccacaaattcaaatacgagatctagagacgctgggtctcaaacgtctcccagagtgaaagacagaggaaccaatcgaggctcggctgacctcagacgtctaaggcgataggcgttgctaagaaaagggggtgggacgatacccagttgccaagacgacggcttccgggtgggcggcttgaggtggcttccggccgccaggcgagactccgcgggaaaactccctgctagagagactaggagatttggggctgcggccgtttcctccggagcacccacgggactgtgtgctggggtccctccaccggctgtgtcctttattcttctttctcacccaacgatttacctgaacggttataaagtgcacgttatttccctaaggtaagcgtgtggtagcgcctcctcctcctccaaca

SEQ ID NO: 16507 - DNA, 2300 bp, Homo sapien
gttcggcctcctttgccagcctccagacctacatggagcaccactgccccagcgcgcgccccccgccacccctgagagaggagagcgccagcgacaccggtgaggagggggacgaggagagtgacgtggagaacctggccggggagatcgtctaccagccggacggctccgcgtacattgtggagagcctgagccagctgacccagggcgggggcgcctgtgggagtggcagtggcagtgggcctctcccctcgcttttcctgaactctctccctggcgcggggggcaagcaaggggacccttcgtgtgctgcacccgtgtacccgcagatcatcaacactttccacatagcctcatccttcgggaaatggtttgagggcccagaccaggctttcccgaatacctcagccctggcggggctcagccccgtcctgcacagcttccgcgtgtttgacgtgcgacacaaaagcaacaaggattacctgaacagcgacggttctgccaaaagctcctgcgtatccaaagatgttcccaacaatgtggacctgtccaaattcgatggctttgtgctctatggcaagaggaagcccatcctgatgtgtttcttgtgcaaactctcctttgggtacgtccgttcgtttgtgacccacgcggtgcatgaccatcgaatgaccctgagcgaagacgagcggaaaattcttagcaataagaacatctccgctatcatccaagggatcggcaaagacaaggaaccccttgtaagttttctggaaccaaaaaacaaaaactttcaacaccctttagtttccacagctaacctcataggccccggacacagtttttatggtaaatttagtggcattcgaatggaaggggaggaagctctcccagcgggctccgccgctggccccgagcagccccaggctggtctcttgacccccagcaccctgttgaaccttggcgggctcaccagctcggtactgaagacccccattacctcagtccccctggggcctctggcttccagtcctaccaaatcctcagagggcaaggactctggggcggcagaaggagagaagcaggaagtgggcgacggggattgcttctctgagaaggtagagccagccgaagaggaggcggaggaggaagaggaggaggaagaggcggaggaggaggaggaagaagaggaggaggaagaagaggaggaggaagacgagggttgcaaaggactctttccaagcgagttggatgaggaactggaggacaggccccatgaggagcctggggccgcagcaggtagtagcagcaaaaaggaccttgctctctcaaaccaaagcatttctaactcccccttaatgcctaacgtgctccagaccctgtcgaggggcacagcttctactagttctaattctgcttcttcctttgttgtctttgatggtgcgaacaggaggaatcgtttaagctttaacagtgagggcgtcagggccaatgtggcagagggcggcaggaggctggacttcgctgacgaaagtgccaataaagacaatgccacagcaccagaaccaaatgaaagcacagagggtgacgatgggggcttcgttccccatcaccagcacgctggctccctctgcgagcttggggttggggagtgcccctcggggagtggcgtggagtgccccaaatgcgacacggtcctgggctcctcccgctcgctgggcggccacatgaccatgatgcattctcgtaactcgtgtaagacactcaagtgccccaagtgcaactggcactataagtaccagcagaccctggaggcacacatgaaggagaagcacccggagccggggggctcctgtgtctactgcaaaagcgggcagccccacccccggctggcacgaggcgagagctacacgtgtggttacaagcctttccgctgcgaggtgtgtaactactccacaactaccaaaggcaacctcagtattcatatgcagtctgacaagcatctcaacaacatgcagaacctgcagaatggagggggggagcaggtcttcagccacactgccggggcggcggcggcggcggtggctgcggcggcggcggcagccaatatcagtagctcctgcggggccccctcgccgaccaaaccaaaaaccaaacccacctggcggtgcgaggtgtgtgattatgagaccaacgtggccaggaacctccgcattcacatgaccagtgagaagcacatgcataacatgatgttactgcaacagaacatgacccagatccaacacaaccgccacctgggcctc

SEQ ID NO: 16508 - DNA, 2300 bp, Homo sapien
agatcacctgcctgtggattacctgttaaatttttgcctggaacaaaggcaggcttgactaggcctcatcatgtgtgtagctggtgccagataaagaaaaggaactcagggtcactctcagttctacttgtcaggcctctcaagtgcaggaggcaggttgcagggtctgcctcttgggacagtggcagtattagggcagatcccgtccgggccttctgcccaggcagtgctgcatcctcccaggttactttaatagcttgttctttgggctttctagcttttattttattgaaggtatttgtctgtgggcctaccaggatcatgatgtcaccagattacgaggttgtcccctgttaataaaaatgaagataaagcagcaaaattagattttctgagagtatcaacattttcttgttgtctttaatttatccagcaggccttacctatcccaggtaaggaatcttcgtttttccggagagattgccagaggcatctctgcgttgtgggccacgttgcttgcggtcctgctagcatacgtcatcttcatgtcttattcatagtcactttttcaattaaattattaattgttttctttaaggtgttctcaacttatatggccaatataaataacagtgtgttttgaaaacaccacctgttcttgggcctgaagtcaggtggtctggaagcagctctgcagtgaccatagtctggtttgcaaactcatcctccaccttccctgttggctcttaactccccccacccggcccccgtgctctcacgtgtgactgaattgggcttgtgccctcctttgtccctaatcggacatgattccctggaggcagtcttttctcccagggccttagctgaaataaataaataaataaataaatttccccagaatctattctggactaaaatgtagaaaggggctgtctgtacccaacaggttagatacttacattaatctgaacccaacttacattgtgcaaaaagccttctatacggggatgtgatggttttcaccagctaagcatccctttttctcccgagtcagtgtgtgcctcatgctaatacaattccatacatactgctcttcgcctcatgagctgattatatttctaacacttgcatggttcattattgtgcccgaggaaaagactctccaggctgtaaggccagcctgggtgggtggttttcagaaagggtaaaagcaggtgcctttctgtgctgtgagaatcgggagtaaattcagactgagggtgggattctgacagggaggacagaggacttccggtgagatttctttggggctggctttcagatgagaatggaaaaaggtggacttggggagatagaaggcgcccagcaatcgctttgaccaactggaaaaggtgaacttggggagatagaaaggcgcccagcaatcactttgaccaactggggtggccgctttaaatcttaccctggcggtaggaactccctgggaaagggcacgatctttgctatctctgcggtgatgtggctttataaggtgaggctaaggagcctggaggcttacatggtagactgcatctccttttcttcccacttcttttcttcctatctttctagtgatctctccttttctctttctctggcctcaaaaactatccttaaactctcaacggagagcagggggatgtttttataagtttctgcaactgaaaaacagaagtgctctgtaaagcagttaataggatgggtgtgtgtttccaataaattcctgtccacattggctcctgtccccatgcttgagtggcctggctgtgacgtggacggggcccagggagcgatggctccggttcggaggcctcaggctccttttagtggccgagggcgcgtccctttcttctcgcccgattctaggccggcccctgacctttgatgagcgaggggtcagcgcctccgggagggcctgggctttgttcccgccggggccggttcccggggcggcgcaggccgagcggcgagggttcctggccccaggcgggtgcgcgggacccccggcctgccccaaggcccgcgccccaagcggagcgagcgcagctgagcgcccgggtcccgcgcgtccctgtgcgtccccgggtccctgcgggcgggcgggcgcggtcgccgccgagcaacccggcctgcgcccggcacgactgtagatgtcaggctttgcccggggagccgagcggcagcggggctgtgagtttcaaattaaccttccgctttgttgctgtgtaatgtggatccccgaaggccccccgccccgcccg

SEQ ID NO: 16509 - DNA, 2300 bp, Homo sapien
atgagctactatggagtggacttccctatattgttccggagggcagggcagtaaattctggttgttctccctctaaatcctctctaagaagccaagcaaggcgctggagcacccacgctgcagatattgtagaaatttacagtaaatgtaggtacacgattgcagcacgctgccctattgattatgcagattgtgatcaatcttctcccctcgcccactgcccaagcctctttcggaggacctccaaataagttggtctgcaactagctattctcccaaagtagggaggaaaaaaagtaattttttaaaaaacataataaatcctcaattgtccccactgaaagggctcgagtcttttttaaattccaaagtgaatttatgttctgtaatttgcattacagccaagcgatcaccgtctgtcatattcttcaaaggtacttaacaaactgccttttaaaagtcactagaactggaggccagaaaaaggcaatcagcatgctccgtccatacagtgcttagatcaagtttcaataattgagaccaataaaaattgtcatatttaccctacttgaaagcaacaagggggaaaagttaagactgggtgccttttgaaagcgcttgtaatcaaagaatttgccacagtccaaagaatagcacaacattgaacaaaagtcagattctgagcaacagcttcactcgcaaagtgatatatacatattttaattcaatagttatacaagaaccctccgagtactgagtccatacacaacttaattatatacactgcatgaaatacacttagatctactctccaatagatatgcaaaaagacggacattaaaatgcataatgtaaaattcaggaacacggtttttgcatcgagtggagccgggcgaggggtgagagtggggaacccaacgtaaacaatcccagattcgcgagagcaaaaaaaaaaaaaaagaagaagaagaagaaagaaaagaaaaagaaaaaaggcatcctcggatgtctctgagctcagctggcggaagaaggccggccgggcgaggtctggccctggccagcggcgcagccccgagcccccgggagcccctagtgtccagggcagagtcccctctgggcgctcgcggcgctgccagtggggcagggcggagagcgcacaggtagaggatcgcgcggccgcctcgccccctccgggaccccgtggctccgaacgggctcccgcgtcgccggcaagtcgagccccagcgcggaaggcgctcgcccggccagcggtggcggccgcggcagcagcagtggctgcgaccgcggcgactgctccgggccgggtgcgcgccccgcgcggctgctcagcccggggccccggcgcctctcggggtggggcaaagttgggggccgggagcggcgggggcgggggcactcggcaccgcggacccccccatactccccccaccgccggccgccgcctttgtctccgagctggtaccccggccgccctcccgccctcggcccgcgccccggccggccctgcctggcggcgcctccaaactcgccgcgcgggcctcgccccgggcgcctccaccctcccgggggtcgccggcggccggcggcggcggcgcggggccggggaggagggggcggcccgggctcggcggcggcggcggcggcagcggcgggaggaggaggaagaagaagagaaagagaaagtttggcgtagggggaaggcgagcgggacgcagcgagcgagcagggcgcgggcgcggggagcgcgggcggcggcggccgggcgcgagagccgggagggggcaggacgagccccatgcaaagcagcccgggcgccccgaggagccccgcgtccgggcggtggcggcgggaggaggaggaggagcaggcggcggcggcggcgggaaaaaaaaaagagggaaaagttgccacttacgcggttgcttctccggcggcggcggctgcagcggcgctgctggcgacggcggcggcggcgggagctggcggcgcttttaatcccgaaaagaggcgctcgggccgcggagcccatcaaggcagcagcggcggctggcgggggtcggcggcggcggaggacgcgctgctggcggcggcggcggcggcggcggcggcggcggagctggagcgcgctcggcggagcccggggcgggaggcggccgcagccggggagccggagccgccgccgccgctgccgccgagcagcatggttggcggggagtttacagcccccggagcgggcaggggccacggaagagaagcggcggcggcggcggcagcgg

SEQ ID NO: 16510 - DNA, 2300 bp, Homo sapien
aagaaaataaatacatagtatttaagtgatttttcaagatctacaaagaggaatttaattctaccacatctttaaaaaaataaacagctttatgaagattcgtgaagacagataaaaaggaagtgaatatattcctgagggtctgaacaattttccttacctgatgtattatggaaaaattcagaatttaccagtcttccttcagtcagctacattttacactgacctgccctttggactgaaagggaaaaaaaaaagattaactgttgccattgaaaaatttaaaataataatcagaaaccggacaaactgaaggtaaaaatatacaatggctacaataaagataaatatttatttaatcacagtagaggttgtgtttggactgtaggaatgtttcatccttcccttaaaaaaaaaaaaaaaaaaaggcaagaaagaaaaaagctagaatctttgcaggctcctagagagttccccattgtccagggctatcgagagcccagaatggcattaacctcacaaaagacacattgtgcaggggacaaaaaaaagccccttcttctacaataacttttagcttttttatttttagaaaatgacaaaggttttgcaagcactgactggtgaaacctgtagcaagccaggctggacttggctttattgatcagctgtcctgcatggaaaagcagccagaaaaagtttgaatggcaacccagatttggctcacagagaggaaacccctgatttttctaaatgtattttcttcccccgccccccgtaaataaaatagcattattcccagagtgaattcagaaggattagatgaggtaaccctgcaaaatcctaaaccggtttttttctctctagtcttgactaagaagctgcatgttcttaagagcattggaaaatctctcaaaatgaagaattactttctaatcaaacagatttcctgattaattcccaaattccttctaaaataaataatctggtaggctagggcaacattttttcccaagaaaaataagttttagcaagctatctggtgttacagggtttactaataatgccttcaaaaacataaatgttgtttttacatttgcagattacttaaagtgctgattgcattttattttattccagacattgtaatttcaatggtattagttcatatttagaacttacataaatacaacttgtcatttttaaaaaatctattgcagtagcagtgacgctgaggctaggatttgaaaggggggggaagagacagagaagaggggggagagagagagagagagacagacagacactgactcttgttcttcctgcgtttgtttgcttgctttttggaggtaccgtgcaccagcctaagtgatggctttgatgtactgggaatcggtacagtagtagggtccctcgctgctgtctttgattccagggatctcctttgggctctagtgggatgtaccgctcctagtctttatctgaaatccatcctctcatttcaagccctttggcttcgtgactgtgctccaaactcttggaggtagctgtaaggctttttttttttttttttttggcattagggaaggggtatgtaatttcccctttctacaccctaggcctttcctctatatttaaatatattggctttctctcttatgaattcagtctgaaattatttttcactgcctttattacatccctgcttttgatggcaaaatagcttcctgtgttttgaaaacatctgctttccaggtttcacacgagaaaattgattttacttttctcttaagtccagaaaggtagaaagttggacttgtttccaagtgcaacttttccttttcttgtctttcctgaagttatcccctttcagttctgattcactttctcccttttatttcttctaatcacccctcctctcttcctctctccttctaaagaaccagagaagaccgattgcgtcttatttcagaacacaaaattaacatatattttttgtctagtctatggtatgtgttaaagttttctccatattttcttcattcgtcctctgatttggggggaggtaattttccttcagttaaaaaatctcagatttgcaatttaaagtggtctctattcgaagtctctgctctttcacttaaacctttactctaagctgtccccctccactaatgcccccattctttggagatgctcttttcctagttaatttaaacattgctgcgtttgcttagagagagagagagagagagagagagagagagagagagaaaggggaaaataataagaaagaaaag

SEQ ID NO: 16511 - DNA, 2300 bp, Homo sapien
cacatagtatttgctcaataaatgtctatggaagcaagaaagggagggaaagcgggctggatgttaaagaagcagtaaagggtggggcgtggtggttcatgcctgtaatcccagcactttgggaggccaaggcaggcagattgcttgagcccaggagttcgagaccagcctgggcaacatggtgaaaactggcctctacagaaaaaaaaaaaaacaaaacaaaaaacatacaaaacattagccaggtgtactggtgtgcatctgtagtcctagctacttgagaggctgaggtgggagaatcacttgagcccaagaggtcaaggctgcagtgaaccatgattgcaccactgtactccagcctgggagacagagtaagatcccatattgaaaaaaaaaaaaaaaaaaggcaaggcatggtggctcatacctgtaatcccagcactttgggaggctgtggctagcggatcacaaggtcaggagataaagaccatcctggctaacacggtaaaaccccgtctctactaaaaatacaaaaaattaaccaggcatggtggcgggtgcctgtagtcccagctactcgggaggctgaggcaaaagaatggcatgaacccgggaggtggggcttgcagtgagtggagatcacgccactgtactccagcctgggcggcagagtgagactccgtctcggaaaaaaaaaaaaagaaagcggggaaaaaaaaaaaagcagtaaagaccactaatcaggcagccagcagtgtcacgcttttccaaaaggggcattggcagtaagcctgggagagacaaccttatggagatcaacaaaggagttggcaatggctttcagtggctgcagggctgtgattcccactgtgcctattggcggaaccccagggaatccctctttcttggatcagccagggacttaccttcctcgaaggccagcacacactcctgtgctggcgacacttctgcagagctggccagcagtagcctgaggttggctatgtcaaatggtccctagcatctcagagactgagccttgctcaatcccatctttatcctgtcagtttcctctgaggaccctgatatttgatattatgaccccaaatagttaaccttagttgtggtgaattgcattcatttattttacgatcttcatgggatgaaagagtttgtcgagctgagtcttcattcagaaattcgcaaaatatagcatttgacagtgccacttaattttcaaaatactatccaatggccacaaggatcactgtagctgaaaaccctgagaatatctataagggtatttcgagacgctagaatgtgatgacataggtctcttctactttcccctcaccttagcaaaccaatacattcagtattcaggatattcaacagaacattcagcacatatccttaactgctcttagaaattggttctgccgatatattagctattcagagaaagtgcttttaagttcattgttgaacatagtgatgtagtgtcttgcaatcacagaatcaacgaatgtttgagctcgaagatttcttatagacaggctagtgtgaattaaggacactaatgcccagctaaaaagggaaagtcacttagtaacttgcccaagaacacgcagctagtgcgtagttgaaccagacttgaaagcaaacatcatgatcataagccacctttctgccactgcgtgttgatggtatgaagataccatatatatatttacacatgcacacacaaaaaaggataaagtcttgcatcacatagagccagttgtctgaagaaactgtcagccctactgaaacaatatcccatttaagtttaagacagcctggtgaggcccagagcctcaccagtcccccagaaaacggagtattgtttccatccaaaccttgcactgaaaggagcctgtcagcaggaagtgacctcgtgagacaactgtggggagagcaaagggccggggagagaaaggcctcattctcactgcaaacaggaaaaggaaagagaaaaagcaagctctgtctccacacaaggtttgctgggctggctatgaactgttccagtacgttccatcaaatagacgccttcatagaatcaagccgagcgcgaacgccgtgtctggggctcccactcccgggacacacacgcgggctggcttacacatgctcttgctctctcgcgctctgggagagcgcttatatgggcttcatgaggctaagtaataaacactttgtcttcaccctgctatttatgggttgcttggggcatcctgtgctctccactgcccttacct

SEQ ID NO: 16512 - DNA, 2300 bp, Homo sapien
ctcccattcatgctttctagttgtttattgtctgtcttagcagaggctgcattgggggtttgtattagctgatcctccatggtccgtatgcctttcagaagatcttttttttttttcttttgagatggagtctcgctgtgtcaccaggctggagtgcagtggctcgatctcggctcactgcaacctccgcctcccgggttgaagcgattttcctgcctcagcctcccaagtagctgtggctacaagcatgtgccaccacgcccagttaatttttgtatttttagtagagacggggtttcaccatgttggccaggatgatctcaatctcttgaccttgtgatccgcccatctcagcctcccaaagtgctgggattctaggcgtgagtcaccgcacccggcccagatcattttttatctctatactttgttttcctcctcctgtttttgtctctcttaaattcatactatcttgggaaattttggaattcttccagttttgtaacctcgttttcatcaaatatttaatggcactactagcctggttatatgccaccagtagataaagaaatctaatttctttcccctgcctgagataggtggaaaatttgaggctgggctattgatagttagaatactaaatctcttccagaacacattgattgccttctttttatgttcgctgaactgtcttggacttgcaggacctcttatatctatttttcaattcattctggattggtttcatttcaagaaccaatcagccccattcaacagacaatacgaggttggtgccttcccagaagtcagtgacggtatcacctctcatagctctcagttccagaaaagtctgtggccatgcgtcaccgcaatccacctccatgactgaatggaaatccagctgcatgtgaaacagaagagaaatccatcataagtggaaaactcagtcatcaataagcggctctgcaggcctttcagttagggaccaaccacagaactggctctccatcaacaatcaaacagtctttagctgtgatcagccacttccatcacctctgagactggcaggtttccaataaagccaatcgccccctccccccagggtaaggtcctccgcaggaggctgccattgtcttttagcccagcaatttgacaacagtgttagctgacactctattagccagcagctacaccctgacctctgaccctgacattggcccctggcattggaccctgacattggctacaccctgacccctgactttgatcatgtgaggtggcccgacctgctggtcagcttgagagaaagctggccaggaccgagcagggctctctggtcacccctgctcccccaacaggaggcttgagcttgaagtacagaaacaagcccgagttgaacctaagatggcaaaggtgaaagttcagaagcgtgtccatcagcagcctgtcaccacaggacgatgtacaaaccatgggggctttcagcacagggatagccgttgtcaccagacagttctgctccttaatggaaaagacgtgtcaaaatatggcttacaaaatacaaaataatggactgaaatgtacattatatgagggtgttagattgcaatgtactttacagtgggggaattagattgaagtgttatgccagggtagttaggttgaaatatggattatcccaggaatgtcagcttgagatgtgctttataacacagttgttcaattaagatatgctcttcagtgcaggcattagccaagagatgtgcattatagccaagttgttaggggaagatgtggattccactttgcggggaggggcgggtaggagagaggaaaacaccttgggttgaatattattcaaggttagggaatgtcttctgcattcgttgggtttcaggggtctgaatacgtggagtaggacacagcgtggtgtataatgttccttcccgtctcctttctccccagccaaacaatctgccactttccccacttttcctgttagggacttaaaggcttcccccatcaataaaaacattagctcactaaacagcctgatggcttttccttccctggcttaacccttcgggagctggggtttcctttggatttgtaaagatattgattccagataatgtttgcctttctaactctctcttccttagacttgatggataggttcagggctacatctcggcagccaactcaccgcagctacccagggaaagaggaatggaaaacgaggcaagtgttcagtagttaacaccatttgaatcctttccctgggatagacggggagaaatgcg

SEQ ID NO: 16513 - DNA, 2300 bp, Homo sapien
cattcctgtttagttcatcaacagccacaaatctagacagacagctcagtggacattcattgccttttgacttccagcatccattcattcctcacccgaaggcagcaattttgaaatatttctctcttcccatttccattaatgtgctttgggcagggctgactccaggctcagcccaatcagcatcttgcatccctcctacgttaccctgattggttcaggggtgaacacctgacccactgggttcccatgggacttttgcggggacttctgtgaaaacaatgttctctctttcctagagcatctgtagtgagacaacatagaatctgagctgctgtacgcatttcatgacgctaagaaggcacactaagaaggaaaagaacaagcatggaggggacagttccaagcaacacaaaggagaagaaacttggtgactttgtttaggctcctgatcaaatgctacccctagccacaggatgttcccatgggtttttcagttatatgagcccacacatccctttttgcttctgccatttagagttccaatttttgtgctttgcaattgaaaaaaaaattcagataggaaaaattactaaaactttccgtctgactgtggctgagcaattagggccatgaacactcctgcatgtttggacacattttggcacatctgcaggaggagcatgaataaacggctgcctgtcttggagctgaggcacttgctgccttgaccatcaccaaggctgctatcacttataggccctggcagctccaatctctccaactgcaaccagctcatgtcaaaacagtcccgcagtttcaagaaaaaggatcctgggaaagggttcaggaatcctgctacgagtcaactgagcaacgtgttaggttttgaagggaaggtgagggttaaagaaagacacacacagagaggaagtggcagctatacagcaaatgcaggctttatgtccagcataagacctccagaggtggaggaccagcctaatgccagtgccccccactgcttacaggctggggtactcacaggtatgggcaggaggggcctgggcaggatggcttgctgcctgggatgatattgctaagacattgccatgatgaggcagtttggcctttgttcccacggaaggtgatgttccttgcactttctcccagcagggtatgataaggatgttcctgtgccttgtggtcaggtggctgggcaggatgtgtctcatgccccgaaccccagtggaatgtttcacttgaccaagatgtgtgaaatggtggggggtggggggttacaaaatgatgcggtttggtctaacacaaagaagcactaaagaaactaccgaagggtaggtcatctcaggcgaaactataccaggtaatgttttctttagcaccattccatgttctcttagcatcttcttgaccctaaagtaaccaatgctcactctcgctctctttctctctctgtttctctcccaccgtctctgtctctctctctctctttctctctctgtttaactctcttaccaaaacaactttcaactagtaagcagataggaaaggaccttattaaaaaacccacaggactcaggttcaccagttttttaaccagatagatctggatttgaattccaggttcaccccttactagatgtgcatatatgaataagcaacttaaatgctctgaatccccgtttgcttatttttttaaatatatgctttgctgagttatcatagggagatgagataaggcatatagtggttacgtgtaagactattatcaaaccataaaaataatattacggacataacattaatattgttttagcctcctggaggtgtttgcattttcatagggagcaattcctttcttaacccaacattaggaactgtaaagtcagaatttcagcctcagcgacagacctattgctaggtttatatctgacaggtggctacttaaagaaggggttcaagagccctacacagtccttaggcaatgaccctgagaatcagaaactcaggccatatatgtggaagcaaaaaaaaaaaagattctagagattggaggagttgctgagtgacaatcaggctgtcatcactgaattctgatgggctacctggaactggcttagggtgggattacatacgcctcctgccacatcggatttccttctattttgtcaggggtggcatcatccagtgagtaaatctgttagtgatctccctcgcataacctaggaattctctcaggatccatttttccagtagttttgagaaagcgaccaacaacagca

SEQ ID NO: 16514 - DNA, 2300 bp, Homo sapien
aatttcttttgttaaaagttagttatcaagggatgtttcttaaatcaattttatgtcttatgcttttttcagtcttctatccctagtcttaaggaacgggtctttgtactgtttcttaagctactaggtgaccattccttatacagtaaacataggggcttatgtccaagcagccccaagtgagctggaacttttcaggatgtgtgaggaggctgggaaacctcagcatatagcagagccctggtggattgctgccacctgggtcaaaaaccaatggcttcaagaatgcaaaagaaaaaaaaaaaagcatatgaggtcgggcacagtggctttgcctataatcccagcactttgggaggctgaggcaggcagactgcaaggtcaggagttcaagaccagcctgaccaacatggtgaaaccccatctctactaaaaacacaaaaattagccgggtgtggtggcatgtgcctataatcccagctactcgggaggctgaggcaagagaatccctggaacccgggcggcagaggttgcagtgagccaagatcatgccactgcactccagcctgggtgacagagagagactccatttcaaaaacaaaaaaacaaagaagccagatgaaactctagtcaggtgagggccagccctggccagattgggacaaatggatgtccagttgcctgtccctgtccctgaaggacggccacaataggtgaacttcctccgccccttcccttgcccatcctatctcctcttagttccttcttgtgtcttcccagtctcctgtggatgcaaggaccaatgagttgaaaataatcattcttggtggcagagttctacaagagaaagttgtgggattgccaattattttataattagatatgagattaactgtctgtgtgatggagaaaaagccaaggaatgaatctgtgagaggctgcagaatctgtagctggtgctaagaaagccattcccgtgaatgttaataggcgtcgtgtagatgaatttctgagtgctgtagatactcatcttcccgaaacctcactcttccagctgtcattttgcccattcccatctgtttcttatgctctaataaacgatagcactaacttatttagcacctctcatcagagcccccagggctgctctgaccctgcagggattccctgccaaagtgtgacaacctcggagtggacacatggcctgctgcttccggacgttagtaccagactctgaaataggaggactttgctttcagggatgcttgccatcaattatgtgatttttctgttgcccttttcaaatccctttagccttgagaatggaaaatttggcccatttctccagggctgtgaataccctgggagttgcctgcctggagaagctctagaatgtttgtagatttttatggttgcttttgaaaatggttattggccttctctttggtcttttgaatgtgtctaaaggggaagagaaatatgtaacatctgcattcttaaggataatgtcagtctttgagctagtgaactggtctgccaggtacctaaatccatttcttctgtgcaattgatgtggtggacttgggaacagtgagcacagtttgctgtcttgtctgtgactgatttcttcgagattttgaacttgctggcttctgttcatttgcatattgaatgaccagaggaacggcatctttggcaatatttaaaagaaatttggcatccaggatttggaatgcaataagacagttcattcaagaagttaaaaatactcatttatttttcatatactgctggtttgaatttagaatttttgatccaagtgcaatttgttgatgttgacaatttgtagaagagaagagaggcaaatgccagtagctctaaatactgagccagggcatctcagatatgggaattttcacaggaaatgggaataaaatcctccacaaaatccacacaaatgggtttgtgtgggaagaatcagaggttaagaggggtggggtttcatgtcccatgtacccacaggtttctagcttgccacagttaacccttgcttctgctgacagttttgaaattatttggagggggaggagccaagatggccgaataggaacagctccggtctacagctcccagcgtgagcgacgcagaagacgggtgatttctgcatttccatctgaggtaccgggttcatctcactagggagtgccagacagtgggcgcaggccagtgtgtgtgcgcaccgtgcgcgagccgaagcagggcgaggcattgcctcacctgggaagcgcaaggggtcaggg

SEQ ID NO: 16515 - DNA, 2300 bp, Homo sapien
tatccatcagctaaacattggagccatttagcacttagctaaatttcataatagcacgtgggcatatataatcttatacaattcacaaaacactttccatatcatattattttagtatatggtcactactgattatgaccaagtataacatttgattttgcctaaactgattatctctgggcatcttaatcaatgatcaaatttggaaagttcatgaaaaggccactcacaagtacatacacacacacactacactcatctatagatggtttaagatacatacactgcttgctgcttagatattgatatttataaatggtgttagagatgtaataatttgtactattgtataataaaactactgattggcatttagttcctataattcctttcagtgactataatggagtagaaaagagtcaacaaaaatggcggaaacgcctcatagttaagataatgtaagtgaagttttatttatttatttatttatttatttatttacttttaaagagacgggtcatgctcagtcacctgggctgcagttcagtggcatgattgtagctcactacagccttgaactcctgggctcaagtgacccttccatctcagcctcctgagtagctgggactacaggcatgcaccaccatgcctggctaattgttttatttttgtagagagaaagtcttgctgtgtgtgtgtgttttttttaatctcaaaaaaaaaaaacccacaaaaaaccgactagttctaataaagtatattgaaattgatggtgatattttcatcatacatatctttccttaaagtgtgcatacacttgatagactgctcttcatataaacatgcatgatcacatataaacactcttggtgttaagagttgtcagctctgatagaaactcttcccatgacagtgtgggacatggaggcccagagaagtgaagtgacttctcaaggccacatagcttattcatgatagaacaggcacaactagagcctaaggaactgtaatgcaatttccactgcctcgctcctcctctgtgggtgatttcaggagccctccagaaagtcagatgcctcctgactcagctaattttttcttcactttctgtgatcagagatgcataccttcttggtttcatcactgcttagcatagtgcaagtagctcaggcttttgaggcagatgaactcgggtataaaatctagcgccgatactcagggctgccacattgcacaactccagggggcaccactccaaggtggtttatgtaaatagagcctagattaacaagaggcacttaataatttgttaggagtagcatcaactactgctttttgaatttggaagctgacatgagtggaattttttcgtagtgaggactctgtgttaagagcctgtctggacaaggagatgtatgtatgtgtatctattgctttagtaaatgtcataaatgcacacaataaaaactatgtgaatgtggatgccactacttcaaaagctgtggtcatgggggcaagagctggggcaatgggtgttatcttctctctctctctctctcactcactcactcccatttcctttgagacatcctgacccaccactcgtcttcccattccagatcccgagtgaaaggcctggccacctctgttgacatggtgagcagctaatgaacctttgggaagttgcaaaggggacagtttgcaggtatcacttctgtcatcgctcagagggcaggaatgaggatgggagagcagccatcttagctctgctctccatttgtctgtgaggttggtgagaactttctgagactcttctaaaatcttttctattgtcctttagtttcagaactactgggatctaaattttggtcccagaggctgggaaccagtgcgagagattgaattttctgtaatgcttatggtctattgagcaaatgaatagcatctgaaaatggcaagactctataaaattaagaaaatgaattgttttcaagcagttttagaggaaccatttacatacggacaagataattatgatataacaaaagcttgtgttatttaaggtggggctttggtagtctaatttagtgggtgtctgtagtagatcatcatcataacagctcccagtgaatcaatgcctccctgcatccacacccctttgtaacatgatattgttgctcttcccatcaagaaatggtctcttttggccgggcacagtagctcacgtcatcccagcactttgggaggctgaggcaggcagatggcttgaggtaaggagttcgagaccagcctggccaaca

SEQ ID NO: 16516 - DNA, 2300 bp, Homo sapien
taatataaaagtaaactaggggccaggtgcagtggctcacacctataatcccagcactttgggaagccaaggcaggcagatcacttgagttcaggagttccagataagcctggccaacacagtgaaactccatctctactaaaaatagaaaaattagtggggcatggtggcgctcacctgtagtcccagctacttgggaggctgaggtatgagaatcgcttgaacctgggaggtgaaggttgcagtgagccaagattgtgccactgcattccggactgggtgacagagcgagactgtctctcatttatttaaaaaaaaaaaaaaaagtaaacaggagtttacaaactaaacaagagcttacattctaatgagagacaaagaatgaacagaataagtaaattctacaaactattcacaagtggtaaaaactatggagaaaactaaagcagaaacacattagggggagaaagacaaaattttttcaaagcgtgagaaaaagcccacctcgagagcaacatttgagcaacaattttcatttgtaatgagaaaataccgacttcgtaaggttgttacaagccttgttaacacagcatgggcctcacctgaaagcttgttagaagctcagaatttcaggtcccatctcagacctacagaatcagaatctgaattttaacaaggtcccctggtgatttgtaagcatatcaaagtttgagaagcattaattaaaaggattaaatatttgcgtctgaaccagggctggcatattataggcactcaatagattcaataattcttagttttctttccccattaacataacccttatatctttctagttataattaagaatgaatggccaggcacagtagctcacacctgtaatcccagcagtttgggaggctgaggtgggaggattgcttgaggctgggggtttaagaccagcttggacaacatagtgagacaccaactgtaccaaaaaaaaaaatgaaaaaataaagatagcattgagtctcttcaattaattatgaatattaagcatatcctgccatttacttccttgcagatctagcagaaaatctgaaaataaagccaagttgcagacagaagacaaagataaattcacatgcagacaaattcaaactcctgactacattaatgtctctcattggtggccaaatttcagtctaatctttgctaatgtttttcaccacccacaaataagagagactgagtgtgtcccttgacatttggagatcaggaagtccaccttaaaaagacaagaggccaaaatgttgggaaaatcctctggtgataaagggaaagcaaaaattgtttaaaaacagaacaaaatataagtaaataattcaggttgcttaagtactgttttcgtttacagaaacagcaacttcaaatgagacgatataaacctgtatgatttttcttataatttgcctcctgcaaataagcttaagtctttgtctaccttagtcttctctttcctagctacatatcacaacatacttccttactgccttccttccgtcttttcttcaacgcttctgtaaattttgatttcaaaagcaacggcacaattgcgttcttctagccctagttacgcagtaatataacgacaggtggaaacctgcaggttgccacgttcattgcaaagtgtccacagtaaagataaaggagaaattcccccggcaatgaaaacgagaatgagataaattaccaaattacattaaaagcgtgctcttatgttagagatttaaagttcctctcagaaatcgcggaggattttgacctgaagcaaaagtgaacttcttccgggtggtagaaaagtaaactgtcaactatttactttgggggggtggcggggggagggtgctgggaaggaattgaggcgaaaagcctctgcaggtgacggtacaggccaataccaggaggtcaagtcgccggtgtcccttcggcccttaagtccagggaaacgcacggcgagggacgaggggcgattcccgcctttctccagccctttctccgcccacaaatgacggcggtggcgaagatccgggcccgccgcgcgaggcactctgggagcggaagaaggaggccgcgcgagggctgacgaaccggaagaagaggaactgggcctgaaagggtaccggtgaccgctactgctgccggtgtttgcgtgtggcagggagccaggcctggcgagcggggtgtgtcgcgatgccggagctggcagtgcagaaggtggtggtccaccccctggtgctgctcagtgtggtggatcattt

SEQ ID NO: 16517 - DNA, 2300 bp, Homo sapien
tgggcaacagagtgagcctccatctaaaaaataataataaaataaaaacactcaaccccctagaaaaaatagtgcatcagtggttatgagaacctactaaggacaagacccatctttgacaatgaaaggggccttaggacttccttcctttttttttttttttttttttgagacagtctcgctctgtcacctaggctagagtgcagtgacacaatcttagctcactgcaacctccgcctcctgggtttaagcaattctcctgtcccagcctcccaagtagctgggattacaggcatgtgtcaccacgcccagctaatttttgtattttttagtagagatggggtttcaccatattgatcaggctggtctcgaacttctgacctcacgtgatccaactgccttggcctcccaaagtgctggcattataggcatgagccaccgcacccagcctgacttagcattttggagtggaggccgatcatggtgatggagaaggaaatcagggacagatctataccatttgtttgctatttactgcacgtaaacagaatgaaatcaacacattaagtatttcacttgatttcatccaccatctcctgcagacaaccaggtttctcccaaattcatgtgcctggaaatggcttgaaccaaatggttcatgaggaaaacctgtgatatttttcatgaaattgccacatctgggcatcaggaaagccttccccgagaatgtctcaaattggtcagccgttttctctttttttagacaggtaggtgtccccaagcattcaatcctagctaaaatatggaagtatttatctagcacaggagcctatggcatagtttcagtccactgtctggcagacctcatctgggctgtctttgtgtgatttgactggccagtaaatggggtataaactatgtaggctgtggcctggccttgtgacagaggggtccctggaacttgactgccactccctaagagcagaaaccgcctctttcttgtacactgctggatcccatcatcctgcacagtgcctggctacaggtggccagcaataaaacacaagattggggcaggcacagtggctcacgcctgtaatcccaggactttgggaggctgagatggaaggatcacttgaagccaggagttcaggcccagcctgggcaacacagtgagcctatctctacaaaaaaaaaaaaaattttttttaattaataaaacacaagattggtttgtgtggtgagacagtattgaatccaacaaacgggaactggatagtgtggcccaagatgcaatggtggctgcagcatgagacccttatgcatataatattcagtggaagaggtgccaggcactgttctgggtgctgagaataaagctatgcataagactaaggttctgtcgacagagatcgtgtcacaccagtggaaaagacagtcatcaaacttatatccttgagtcagtgatgacttctagaaggaaagaaaaggctgatgtgacggtgaggaagggatgagtggagacttctctgagacttcagtgattcctcttcctctgagctgagccaagctgagaagctgagaagagtaagatagggccgggaactcaggtccgttagtccgtcctccgaggtggggcgggccagcagaatggatttccgatctactctgtgagagcctcgcccaagaaagcccagagccacttccaagatccgcgctcccacggcgatgagaagcgttttcccccgggactgcttggcttaggactggggacccactggctttggagtaagccctggcacgggcctcgagggaagaaagaacccccgcgctccccacactccacagggcctgcgatcatctcagatgttccggttccacgtgcagaaaccccgccggtccgaggcccgggttctaaaacggccctaagagtcaaggcttccacagctcgcctctgagggtggcaaagaggccgcgggggcggtgcctcgcgagacccaaacaagcccacgtggcaggggcggggctccgcgagggcgtcacggcgcgctcgggcgcggctgaggtcacgcgccggcggtacccgtgcccgggggccgtaaagcgcggaaggtcgcggtctcggcttccccggaactttttgctcgcttcgccccgcccccttcccatccccgaaccccgctttccggcccgcggcgaccgccggcaactgttgtggctgccgcattgctcccgccgggctgtagctgagcgcggagcccgtgggggccggtgaggtaaggagatagcttcggggcaac

SEQ ID NO: 16518 - DNA, 2300 bp, Homo sapien
ggctgtcccagaagccctggcccttagcacccagggaggtcctgcccggcctgctgggaggcgacccttttctcagagtcccctcctcctctgaccagaggtccccaggaatccttgtcgcatgagctgccagaaccatggacgtctcaacatcagcacctgccactgccactgtccccctggctacacgggcagatactgccaaggtgagggcactggagcctgggtgtgcccagccctgctctcgtggcaggtcctagggctgctacacttcctgagagtctcaagggtgtcagaggtgctgactgtgtactccctgagtctgcccactgcatacattctttcaacaagcattcactgagcactagctgtttgccggaccctgagctgtgcaggagattcaaagtgaaatcaggttcagccccttaggctctgggaggaggacagaattaggacccagaagtggattcttgccctactgcccctctaccctaacccactctgtgaccatgggcaggtcacctcccaaactccaatatgcctcactctgcaatggggaccaaaccaaagacaccaggcgtgccagcaatcggaagccttggtgggttctgtctctgggaggggtattcttgctgtggttggcattccctggatgttcgaggcctctggggggcagcgtggggtccagaaggctgggggctgagcctctgccccactgccctgccctggcagtgaggtgcagcctgcagtgtgtgcacggccggttccgggaggaggagtgctcgtgcgtctgtgacatcggctacgggggagcccagtgtgccagtgagtcctgccccagggcccccaaagagccagctcctctcaagaccccccttcaatggggcatcagctcccaggagcccgctgtgtgcctctctttccaactcattcagtgacaacacgttgagatcttgaaactggccacagcatggatatttacaccaaagaaattggcaaatgctataaaccatggattttttttttcttttgagagagagcaagctcaatattccaactgaccagctcactcctgaccctcaccacccactcttttggagcaggtggccagaggaaggggcaccctgagcttagctccccggcagggcaggaaagggcagggattctgaagtccacacacaaactcaggctcccctaccccagccaaggtgcattttcccttccacacctgtgacctgaggatcgacggagactgcttcatggtgtcttcagaggcagacacctattacagagccaggatgaaatgtcaggtgacagtcacccctagcttcctaggaaccccctagggcctcaagtgagggtcttaatgcagggaccctggagtgagaggtggttccttcaacgtctctgacctcaccctattcatcagcataaagcaggggtcgtggactccaaggctcatagaagccaggaggtcacttattgacctgaggggccaaggtcaagaccaacctccatctaagggagttccagccactggttgccttgcaggaatgcaaggtcagggtggccagagctcggggttgttcaagaaaaccagcaacccagacttccactggcaactctcgaaaccacaattaattactggggttggcaatcaactcggatatatttaagacactgtgcaggtgaaacagaacctcctcaggggccagaccttgcctgggcttgtgggctgctggtcgcgcccctgtgcacagggagaagagaagcagacgggagcagaagggacccctgctcttggaagggaggctgtgcgggctgggggtgatgatagcccggccagcacacacacgtggcatcttaggccatgggcaggggtggcaggaaggggcagcctgggctctgggagacttgcctgtgtgacccagggtggggttacagaggaaaggcggggtgctggcccagatcaagagccagaaagtgcaggacatcctcgccttctatctgggccgcctggagaccaccaacgaggtgattgacagtgacttcgagaccaggaacttctggatcggtgagtgcccagctgattgggggtatggcgagtaaggggttgtgatgccccaccctgctgcaggaaccctgggccatggcggctgccagcagatggcaagggtgtgttgagggcctggagcccagagcggggccagctgctcaccccctttcccggggagggcccaggtagggagcacatgggggctgccagcgctgggaagaggggccagaaaggcagctggcag

SEQ ID NO: 16519 - DNA, 2300 bp, Homo sapien
gccatcttgcttcactgcaacctccgcctcccagattcaagcaattctcctgcctcagcctaccgagtagctgggactacaggcacccaccaccctgcccagctaatttttgtatttttagtagagacaggatttcaccatgttggccaggctggtctcaagctcctgacctcaagtgatccgcctgccttggcctcccagagttctgggattacaggcatgagccatcacacccggcctgggactcttcttgcagtgagccagggccatgggacccttcaaaagttgctccaccctaatccccaaaatatctttttctcccgcctgtcccaagtgcctggcatcatactatatgggtcaactggccgtgtttgccatggaagcccaattgtaggaagtgggtcttttatcacccggcatagcagagctgtggaaactgcactgggaaagatcaggatgtgaattaaagcgttgggaatgggaaggcagagaccttggattagctgggatgctccatgcactcgctgagtgaccttggacaagccccttagacacactaagcccgtttcctcatctacacgacgggcatcccatctgctactgcaccaggttcttgtggcaataacttgaactcacacatgcaaacaggctttgtgagctccataaacacaggtggctcggccaggtgtggtggctcatgcctgcaaccccagcactttgggaggccaaggtgggaagatcccttgagcccaggagttggagaccagcctgggcaagacgatgaaatcctgtctctaccaaaaaaaataataataattagccaggcatggtggcacacacctggtcccagctacttgggaggctgaggtggaaggatcacttgggcccaagaggtcaaggctgcagtgagctgagattataacactccaacctgagtggcagaatgaaactgtctaaaaaataaaaataaaaatacatcaaaaaacaggtagctattaagcattgctaggacccacacgcagtgaccctgagggtgctgggtttctgtttgagggagaagaaactcctgagcccctaggtattgtgggggacatgcagttccagaccgccttcatggcctgtatgcctggcctcatccccatccctggcacccatgacgatagccacattccactggtgtttccccaggaaagccaaccctacctgcatctcagcagagcttccacggagttggaaccccgctccgagagggtgtgggctcaggggccaggggtcacacaaactccagaaggaggacgtagttggtttgcaaggctgtcctttgccctggttgaataaccttcggtctgccccgagaggaacgtgggcattaggctgcagcccgcaggaagccatgtattttctgagaaacttggcccatggtgcagatctgctccagctcactctggtgggatcacgccagccacggccgggccacggcacatcatggcaacgtgctgcccacctgctacgccgcctgtttttctagaggcggacgtgatcccagcaggactggagtcagcccagggcatcacgtgctctggtccccgcctgctttgactcctcctgcctcactccccccctggcctgtagtcacgtgggtgagggtggtgggcaccggggctgggcccagcccccgaccctgcccagacagactttcctaaggcacccttttcctcgtgcaggtgcggcctcagcccacccccctttgagcccacagattgcacccctctggtgtgcggttacctcttgcctatgtttaattcatggctggggggttgggacgagcttcccaagaaaggaaagaactcccctggggtcttgcccagttcctgctcaccagaaggaccatagccgaggtcctcctcccagggcccggggctggggagcggaagccatcagtgggctcggaggacactgtcccagccaggacacggccatcggtcactaatctgcagcaccggaatgtccccaggccaatcagcggggtctctgggggctccccaagggtgctaataatcccacaatgattagcaggggccgcggggcagtgcacgccactctgcctgctgtcgggggcgggctggccaggccgaggccggagcaggcaggcatccccgggagttgtctcttttcatgccagcgccaacaggaggctgtctggacacactgattactcactcaccagcctccttcttttgttcaccagcccccctcttttgtccaccagcccagcctgactcctggagattgtgaatagc

SEQ ID NO: 16520 - DNA, 2300 bp, Homo sapien
gagcttcaggagtgggagtgccatcctcagggtcacacagcgtgtcggttccagcctaggtcttccagtgtctcattaatcttttatccactcagcttctcttctggcccatgaaccttgctctcctgggactctttttttttttttttgaggggtcgggggtgggacagagtctcgctctgttgcccaggatggagtgcaatggtgccatcttgcttcactgcaacctccgcctcccagattcaagcaattctcctgcctcagcctaccgagtagctgggactacaggcacccaccaccctgcccagctaatttttgtatttttagtagagacaggatttcaccatgttggccaggctggtctcaagctcctgacctcaagtgatccgcctgccttggcctcccagagttctgggattacaggcatgagccatcacacccggcctgggactcttcttgcagtgagccagggccatgggacccttcaaaagttgctccaccctaatccccaaaatatctttttctcccgcctgtcccaagtgcctggcatcatactatatgggtcaactggccgtgtttgccatggaagcccaattgtaggaagtgggtcttttatcacccggcatagcagagctgtggaaactgcactgggaaagatcaggatgtgaattaaagcgttgggaatgggaaggcagagaccttggattagctgggatgctccatgcactcgctgagtgaccttggacaagccccttagacacactaagcccgtttcctcatctacacgacgggcatcccatctgctactgcaccaggttcttgtggcaataacttgaactcacacatgcaaacaggctttgtgagctccataaacacaggtggctcggccaggtgtggtggctcatgcctgcaaccccagcactttgggaggccaaggtgggaagatcccttgagcccaggagttggagaccagcctgggcaagacgatgaaatcctgtctctaccaaaaaaaataataataattagccaggcatggtggcacacacctggtcccagctacttgggaggctgaggtggaaggatcacttgggcccaagaggtcaaggctgcagtgagctgagattataacactccaacctgagtggcagaatgaaactgtctaaaaaataaaaataaaaatacatcaaaaaacaggtagctattaagcattgctaggacccacacgcagtgaccctgagggtgctgggtttctgtttgagggagaagaaactcctgagcccctaggtattgtgggggacatgcagttccagaccgccttcatggcctgtatgcctggcctcatccccatccctggcacccatgacgatagccacattccactggtgtttccccaggaaagccaaccctacctgcatctcagcagagcttccacggagttggaaccccgctccgagagggtgtgggctcaggggccaggggtcacacaaactccagaaggaggacgtagttggtttgcaaggctgtcctttgccctggttgaataaccttcggtctgccccgagaggaacgtgggcattaggctgcagcccgcaggaagccatgtattttctgagaaacttggcccatggtgcagatctgctccagctcactctggtgggatcacgccagccacggccgggccacggcacatcatggcaacgtgctgcccacctgctacgccgcctgtttttctagaggcggacgtgatcccagcaggactggagtcagcccagggcatcacgtgctctggtccccgcctgctttgactcctcctgcctcactccccccctggcctgtagtcacgtgggtgagggtggtgggcaccggggctgggcccagcccccgaccctgcccagacagactttcctaaggcacccttttcctcgtgcaggtgcggcctcagcccacccccctttgagcccacagattgcacccctctggtgtgcggttacctcttgcctatgtttaattcatggctggggggttgggacgagcttcccaagaaaggaaagaactcccctggggtcttgcccagttcctgctcaccagaaggaccatagccgaggtcctcctcccagggcccggggctggggagcggaagccatcagtgggctcggaggacactgtcccagccaggacacggccatcggtcactaatctgcagcaccggaatgtccccaggccaatcagcggggtctctgggggctccccaagggtgctaataatcccacaatgattagcaggggccgcggggcagtgca

SEQ ID NO: 16521 - DNA, 2300 bp, Homo sapien
tgtggaaagttatcacattaaaagatggaggatttgctctgttttttttctttctgtccatttgctgcgtgtacccactctagtaggcattggctaaatgttgtattttggcgattcatcaacctttgcagaatatgggctttatagaagcaatattcttggccatcccgcctcattcctccagtgtggagatgacaagtctgggtgtgagagggaggggtccgggcatcatggttcagcgtggcactcctttggttgagtttggggcatgagatcacagtggctgcacaagagagcagtgtgtacagtaggagagacatttatgtaatatatattttattaacctgttagatgtccacaaagtattataaatcacgtgcctaaaactgtccatgtagaccaaggcctgccctcggcgccccccactcttgcctctgctctgcacagtccacgtgcactgcaggaccggagcgacacatgtcttccctgaagggtgttcagtacaaggcgtgtcagtttgtggatcagttgatccaagttactccttgtctaacctgactgacatatatttgaatactgtggttttctttcttttttttctatttgctgcccttcctggaggcagtgggttccagaagccaactgattgtccccctgccaagtcaccaagggaagctgctaagctgcttagtcccctcggtcctgcttgtagggtcttcctgattgtcaacagctgtctgggatgcttcagtctcctaaaactggaaacgcagggtgcgagcagcacacactgcctcccgccactgccagccggagtgagcggcccgagagtctctgcaggttcccctgggggctgggggccgctgaggcctaatatcaagagccaggaatgtcatgtacatggaggtgcctacggacgtgcctggtgtggtttgcaggtaggatggatgttcactgtttgaccgggtggggtatccttcctctctgcagtctccttcccagtatgcgtaaacacccttatagttctaattgtgttgatatttctgttctttctgaattgagagaaaatcccattcgttgtctgcagatttggaagtttgatgaggaatttggttcttgaaacatctgtctttttttttttttttgagacagagtatctctctgttgcccaggctgcagtgcagtggcgcgatctcagctccctgcaacctccacctcctgggttcaagcaattctctgcctcagcctcctgagtagctgggattccaggcacccgccaccacgcctggcttatttttgtatttttagtagagatggggtttcaccatcttggccaggctggtcttgaactcctgatctcatgatccacccgcctcagcttcccaaagtgctgggattacaggtgtgagccaccctgcctggccaaaacatttgtcatctttataaatggtcagaatagaaaagttagctctgccagtatcttcaattacttattacaagaatgtctttcatcatcttacttggagcattttccaatgactggctcttgagagccccaggcagggccccgagcaagtttttctaagtgccaaggccagcaaagtctgaactggccgcactcattaagtccctcatttggcaaaacaaaacagggcctggggcacccctggttcctggccttataggtcagtcaactggctgagaaatggtcaagaaaagaaacaatgacccttctgtggatgtgagtggatgatggactctggcctgtgtctactctcctgatgtgtagcccaccaacagtaatagaagtagagggtagggggttttgccaaggctaaggcttcaggtacttgctaacagttatagcagctgggtcactgtcatctggacttaccagttcatgccagtgtccctgtgacttatgcatagtgtgcgccacagccctctagaggtacctggagcccggactgccaggctggaggctctggggtactgaaggtgagctgtctgggcaaactattaagaacaagacgaactgttcacaatggagcttctcccacagatggggagctctgtgaggccttcacctgggtgcatgttggacttccattgctgttgctgttgtccctagacaagcccgttagcaagaagcaccggcaggggagccatgcactccataggcttgggatcacccccgggaaagcgatcttccccgggctaccacccccagctgcagttctgtgttagtgcatccttcaaagctaggagaattctagggtgaccagtgagctaatgttgag

SEQ ID NO: 16522 - DNA, 2300 bp, Homo sapien
tgcctcgtggggttagccctggaggcctcccgcatctctcctttgattagcgtggcaaacactcggactgtctggacagagcatctggcgatggtagttctcacatggaggtcccataggctaaaggagcatttttaatttttccaggtcaggccatctaactgaccaagtagggctggattgtgtacttagagaagcagggtgcagtgtgagtgaaagaggcgaactgacctcttccctgcgtcgtcccgttatgtcatctcatctaagatgcagcagtttttgtattggattagatatttagtgaagaaacagaatctttattcatttaagaattaagtctttttgaggaaactgatgagctttttcagcgtgactgtccaaattcttccatgttgctctttgaaaggaccatttctagaacacttgccctcatacaaaccaaattcccaatttgctcaggtttctctacctttcaggagtgagtttcacagtaggtcaaaagtacagtcctagagttaagagcagcattcctctgtggtcacatgtttttaacacagatgttgaactgtcgttgcacacatgtgccctgtgtggcttccccttctgtcaggaatgtagtcagcattcatgctgctgcctgcctttcatgacacccacagtcaaattgcagcttttagcaccctgaaaaaaaatacagtgagccttacaggaaagacattcccccaaagggcatcttgaattcttaatggtgtgaccccccccaagcccagctctcaggccatctgcccttgtgtggccccagccagcctcaagcttctttcgtctgcagggtggacgtggtgatctgcctgagcacgaccgtgcgcaatgacactctgcaggaagccaaggagcacagggtgtccctgaagtgccgcaggcagctccgtgtggaggagctggagatggtaatgcctcccagcctctgctcccagaaaccacagtgggccagggcttggaaagctggggagaggctagggcaagggggaggcattttatccactactgtgatggttaagacttgaagtcctgtgcaaaagttttaacatacgaccattagcttcctgtgtcattcttttgattttgaatgataaaacctttcttcccacatgtaactggaagtccagctgtaagacaggctctaactaagcatgtgatccaatcactggatcagtaatgtcctcaggggctgggtgctgtggctcatgcaggtaatcccagcactttgggaggccgaggcaggtggatcgcttgaggtcaggagttcaaaaccagcctggccaacgtgatgaaaccctgcctgtactaaaagagacttaggccagcgaggtggctcatgcctgtaattccagcactttgggaggcaaatgcggtcaaatcacttgaggtctgtaattcaagaccagcctggccaacatggcgacaccccatctctactaaaaatacaaaatttagccagctgtggtggcacatacctgtaatcccagctacttgagagactgaggcaggagaatcacttgaaccgggagatggagtttgcagtgagccgagatggtgccactgtactccagcctgggtgacagagcaagactctgtctccaaaaaaaaaaaaaaaaaaaaaaaaaaagacatttcaagctggaagatttggttccctaactttgagcctagctctttcattaaagtaataataaaagtagaactctacatttatataatggttttgactttccaaagtgattttcacatctcagcagtcctgtgaaggactaaataaggtgtttcagggtagacttggcattgtgttttgcaaagaaggtccaaggccatgcagctatttggtgacagaattgaaagtaaagcctgattctcttgctgcaaggcgactttgctatgtagaagccagggtcactagacaagatgcagtcaacaaataagtctccagaacatatgacatctccagcctaaaccaagctcacctttccatgctggctccctcatgcagacggaggacatccgcttggagccagatctatacgaagcctgcaagagtgacatcaaaaacttctgttccgctgtgcaatatggcaacgctcaggtaactttttgcttttcttttgtaattgtaaaagtaatgtgaaggtaatatttaatgttttctcaaaagctagtgcccataaggtaacattttagtcatgaattttttgctggtgagacaggacccatctcatcccttccaacctaatcccttcttaaac

SEQ ID NO: 16523 - DNA, 2300 bp, Homo sapien
ctgcactccagcctggatgacaagagagaggctctgtcaaaaaaaaaaaaaaaaaaaaattacaaatatatgtcctatttttatttaggatggatggatggaaggagggagggaaggaaggaaggagggagggaaggaaggaaggagggaaggaaggaaggagggaaggaaagaaggaaaggaaggaaggagggagggagggaaggaaggaaggaaaggaaggaaggagggagggagggaaggaaggaaggaagcctgcctgttgtagggggagtactggagagatgagcaggtcgtgatgtctcacgtgtgggtcaagccatgcagggtcttgtaaacaggcttgtgagagctatatgaaaaagtgcgccctaccactactgaccacaagttgccacaaaacttctgactttctttctctttacctttcaggtgcagatgaaggattttcggttttcttacaagtttaaaatggcctgcaaggaggacgtgttgaagctttgcccaaacataaaaaagaagtatgtagcttgtagttgtttcattccactttcccgaagttcctcttagctccggaatgagtatgcgagatgttaggcagccctcctgctgcctcgtggggttagccctggaggcctcccgcatctctcctttgattagcgtggcaaacactcggactgtctggacagagcatctggcgatggtagttctcacatggaggtcccataggctaaaggagcatttttaatttttccaggtcaggccatctaactgaccaagtagggctggattgtgtacttagagaagcagggtgcagtgtgagtgaaagaggcgaactgacctcttccctgcgtcgtcccgttatgtcatctcatctaagatgcagcagtttttgtattggattagatatttagtgaagaaacagaatctttattcatttaagaattaagtctttttgaggaaactgatgagctttttcagcgtgactgtccaaattcttccatgttgctctttgaaaggaccatttctagaacacttgccctcatacaaaccaaattcccaatttgctcaggtttctctacctttcaggagtgagtttcacagtaggtcaaaagtacagtcctagagttaagagcagcattcctctgtggtcacatgtttttaacacagatgttgaactgtcgttgcacacatgtgccctgtgtggcttccccttctgtcaggaatgtagtcagcattcatgctgctgcctgcctttcatgacacccacagtcaaattgcagcttttagcaccctgaaaaaaaatacagtgagccttacaggaaagacattcccccaaagggcatcttgaattcttaatggtgtgaccccccccaagcccagctctcaggccatctgcccttgtgtggccccagccagcctcaagcttctttcgtctgcagggtggacgtggtgatctgcctgagcacgaccgtgcgcaatgacactctgcaggaagccaaggagcacagggtgtccctgaagtgccgcaggcagctccgtgtggaggagctggagatggtaatgcctcccagcctctgctcccagaaaccacagtgggccagggcttggaaagctggggagaggctagggcaagggggaggcattttatccactactgtgatggttaagacttgaagtcctgtgcaaaagttttaacatacgaccattagcttcctgtgtcattcttttgattttgaatgataaaacctttcttcccacatgtaactggaagtccagctgtaagacaggctctaactaagcatgtgatccaatcactggatcagtaatgtcctcaggggctgggtgctgtggctcatgcaggtaatcccagcactttgggaggccgaggcaggtggatcgcttgaggtcaggagttcaaaaccagcctggccaacgtgatgaaaccctgcctgtactaaaagagacttaggccagcgaggtggctcatgcctgtaattccagcactttgggaggcaaatgcggtcaaatcacttgaggtctgtaattcaagaccagcctggccaacatggcgacaccccatctctactaaaaatacaaaatttagccagctgtggtggcacatacctgtaatcccagctacttgagagactgaggcaggagaatcacttgaaccgggagatggagtttgcagtgagccgagatggtgccactgtactccagcctgggtgacagagcaagactctgtctccaaaaaaaaaaaaaaaaaaaaaaaaaaagacatttcaagctggaagatt

SEQ ID NO: 16524 - DNA, 2300 bp, Homo sapien
tgagttgctgggattacaggcacccaccaccacacccgggtaatttttgtatttttagtagggatggggtttcactgtgttggccaggctggtctcgaactcctgaccccaggtgatctgcccacttcagcctcccaaagtgctgggatcaaaggtgtgagccatcatgcccagcctttgcatggctcttgtgcccacttggccctcataaccaacctgctacatgaagtaattatcttttcaacaatctcagtctggggaattaaacaaagcttttgtgtcctgttcagtgaggtaattttaaaaagaagagaaaggaggaccactgaaaagggaagtgtcatgacgctgatatctccccttgccttgttcatgtatgtgactgataaatgccagtggcttgcctttatatttgcaggagctggagtgccttcaggaccatctggatgacttggtggtggagtgtagagatatagttggcaacctcactgagttagaatcagaggtaagtggtatgcagcttactcattggaggagagtggctgccagcatcctggccttttgtgtttgattctactgtttctagactcctgagagtgcagattttctgtcaatcaaaagaaacctgatcaaattttccatgtttgctttataaagaagtatattgtgttgctttgtgagctccttccctcatttctctagaacaacactctatacagccctttggttttcttcataaattaggtttatcatagtcattagacttgcctctgtttctcccttaagatagcagctgtacggccgggagcggtggctcacgccttgaatcccagcactttgagaggccgaggcaggcggatctcgaggtcaggagttcgagaccagcttgccaaacatagtgaaaccccgtctctactaaaaatacaaaaattagctgggtgtggtgaaacacgcctgtagtgccacgtacttgggaggctgaggcaggagaatcacttgaacccgggaggcggaggttgcagtaagcctagattgcgccactgtactccagcctgggcaacagagtgggagactgtgtttcaaaaaaaaaaaaaaaatagcagcagtacttcacatcacagtcacattcaagagcaatctacacattcccgttctctcatccctcgctcttttagttaggtcatttggtaatgtttgtgtgtttcagaacataaaagctgaggacttccagctaagcatggaagattgaatacgtatgtttatccctgttccatcctgaaacccactaaaatattttaaaaatgggattagaggccaggtgcagtggctcacacctgtaatcccagcactttgggaggcgaggcgggcggatcacaaggtcaggagatcgagaccatcctggctaacacggtgaaaccccgtctgtactaaaaatacaaaaaaattagtcaggtgtggtggcgggtgcctgtagtcccagctactcgggaggctgaggcaggagagtggcgtgaacccgggaggcggagcttccagtgagccgagatcacgccactgcactccagcccgagcaacagagcgagactctatgtctcaaaaaaaaaaaaaaaaaaggtcaagaccatcctggccaacatggtgaaaccccgtttctactaaaaatacaaaaattagctgggcgtggtaaaacatgcctgtagtgccaggtacttgggaggctgaggcaggaggatcacttgaacccgggaggcggaggttgcagtgagccgagattgcaccattgcactcccgcctgggccacagagccagactccgtctcaataaaaagaaaaaaaaaaagggggattagaaaccctcataaagcactgggatgttatttagaaatacagaggagggcagctaaacatgttaaagttattttgtggggccagaaatcagagaagtggggaactaccattttgtcttaaaccttttagtactctatttgaattgtcataatgtaaaattacgtttctcaaccagttcttttttgctttctagttttcagaagttcattgccttctctcatttcgtcgtcatctctcacattatcattgtcatcatggacttatgagagcagtctgggtgtatagctctttaaaggaaggtgttttttcaggagctagtgttgcacgggtttctctctttaaaggcattattagtatgtgttccccagtaacagtggtttggcatctgctttgagggcagtgctctggcttatgagcttataaactgaagatggatatcagttacccctgttt

SEQ ID NO: 16525 - DNA, 2300 bp, Homo sapien
ccggatgcagtagctcatgcctgtaattgtagtgctttgggaggccgaggtgagaggatcacttgaagctacgagtttgaaaccagcctgggcaatatagcaaggcaacataaaagtttttaaaatcagctggcgtggtggtgcatgcctgtagtcccatccccttgggaggttgatgtgggaagattgcttgagcccaggagttcaaggttacagtgagttatgatcataccactgcactccagcccagatgacagagcaaaaccctgtctcaaaaaaccaaaccaagccaggcgtggtggctcacacctgtaatcccagcaccttgggaggctgaggctggcggatcacgtgaggtccagagttcgagatgagcctctaaccaacatggagaaaccccgtctctactaaaaatacaatttatttttatttttatttttagacagaatcttgctctgtagcccaggctggagtacagtggcgcaatctcgcttagtgctgcctctgcctcccggatcccagttcaagcagttctcctggctcagcctcccgagtagctgggattgcaggcacatgacaccatgcccagctaatttttgtgtttttagtagagacagggttttaccatgttggttaggctggtcttgaactcctgacctcatgacccacccgcctcggcctcccaaagtgttgggattacaggtgtgagccaccacgcccggccaaaaatacaaaattagtggggtgttggtggcgcatacctgtaatcccagttactcgggagtctgaggcaggtgaagccaagatcgtgccattgcattccagcctgggcaacgaggaaaactcgatctcaaaaaaaacaaaaacaaaaacaaaaaaaaacagttgcaagtaagagcagctttcccattctgcaaaaatctttatagcctgcatttggccatacccaacaacaaagtgagtatagtccatgtttatctcatgctgctatgcaagaactcctgctgttcatgctgtgctagagaattagaaaatcatattcttcctcaaagctttctgtgtggttaaactaattaggaatatttacagtgtaaaaataaccacatcaagcaaagagggggcaggggagagggaagaaggaagaactgctacagatgaaaatacatttaagatacttatcagttaaccttttctggatcctgatttgaacaaacttgtgaaaaaaaaagataattgaaaatatctgggccgggcacggtggctcacgcctgtaatcccagcactttgggaggccgaggcgggcagatcacgaggtcaggagatcgagaccatcctggctaacacagtgaaaccccatctctactaaaaatacaaaaaaaattagccgggcgtggtggtgggtgcctgtagtcccagctactcgggaggctgaggcaggagaatggtgtgaacctgggaggcggagcttgcgtgagccaaggttgcgccactgcactccagcctgggcgacagagcgagactccatctcaaaaaaaaaaaaagaaaagaaaagaaaggaaaatatttgaaaactaacagggtattacatgatagtaaagcttttaaaataattgcttagtggtgtgataatggtattaagtccttatattttaaagaaacatgctgaaatatttacaaatgaaatgatggagtatctgggattttgctttaaaatatcagcaaagaggcctagagttaaaacagacttggccacagattgataaagttatggggagggaaggtggctgttacattattctctacttctttgtgtgttggaaagttttcataaccagttaaaaatacagcagctgcacactgcccttgtgcatgcatagtcttcagtgctgagtggctctgaagttgatcgaaggtataaccactgtcaggttcagttaatttgagtgattcttagaaaaataaatctgattgccctaagaaaataactaaaagccgccttctacagaccagggaaatactatattgacatagagttctgaacacttctctcttgttacaattttacacatttaatggctaggatcttgtcgtgcctgatggaacatttatacacagagaagatggtagaagactgtgaacaccgtctcttagagctgcagtatttcatctcccgggattggaagtgagtattttgaagccaaagtaaatgtattgcctcagcctcttctcctgtgtagtcataattacctgtatttattaaaataatcagtaggaaactctttttgttcagttctgggaca

SEQ ID NO: 16526 - DNA, 2300 bp, Homo sapien
agtctcgctctgttgcccagggtggaatgcaatggctcaatctcagctcactgcaacctccgcctgccgggttctagcaattctcctgcctcagccttccaagtagctgggactacaggcgcacgccgccacacctggctaattttttgtattttattagagacaggctttcaccgtgttgcccaggctggtctcgaactcctgagctccggcagtccacctgcctcagcctcccaaagtgctaggattacaggcatgagccaccgcacctggccaatttttgtatttttagtagagatggggtttcgccatgttggcgaggctggtctcaaactcctaacttcaagtgatccacccccctcggtcttccaaagtgatgggattacggacatgagccaccgtgcccagccatggccctcttttaggcatcacaaaaacttacttggggttaaactgaaagaatttcattcatcttgactgttgaaaatctctgctgtctctgaaaccagtgtgagactattatttactaaattcccaagtttgcccctttagaagtaaacacaactttcttttctgaactgagttatttacgtggtctggatttgatactggagttagaggtgaagacaacctgttgcctataggataattcctcggtggtgtgtccttcatccagcaccttttggaagaggagattgtgtttgttttgccctatgggcatgcttgtgatagataggcctaatggggagaatgctctctattgcattcaaaggacaaataaagcactgtttcttgtttatattcaaaataaacattcccatttaactccttcctcttgtcagaattgccacttcagtttgtcttaatttccccaaatgcaataggctcttttccaaacacccttctctgttttataatttaagcttataattctattattaggttttacttttgcctgaatttcagcatttgggggctagtttgctttattagcattttgtggtttggaatgcactttgcaggaacaccaccatgcagaatcactctgtgcctgatccactagatcatatgtctaaaccatccaaactaggttccccttcccaaacttcttgctaaactgcactgaacattattttaaacatgtttcccagaccacatgtgtcccagaccacagcggttaagtttggattctactgatttcaaaaacacatgttcaatccatagttaatttagaacacattaatgtcatgtcaagaagtaggccaggtgaggtggctcacgcttataatcccagcactttgggaagccaaggtgggtgggtcacgtggggtcaggagttcgagaccagcctggccaacatgacaaaactccgtctctactaaaaatacaaaaattagcctggcatggaggtgagctcctataatcctagctactcaggaagctgaggcaggagaatcacttgaacctgggtgccaggggtttcagtgagccgagatcatgtcattccactccagcctgggcgacagagcaaggctctgcctcaaaagataaataataataatgtcatgtcaagaagtaatattacaccttccctcctgtctctccttggcccttaggtttgcctaacaataatagttttctgtgtagcttggcttagggtatgcagctggacttcacttttgcacctgtttgtcaaatcttcctccctagattcatcccctcgctgtctcctgcattttttgcatggttacaaggacttcataggaccatgccaaagctgtagatgttaacagctcttttcactgcatttagaagtgagcattacctaagcatttgatatgtaggtattcttttgcaaaacacattaatcaggtttttctagaaggcacaacagtctgagtagggatgacactatttttctttaaaatgaatgtattcctaaatgttttccttggatatatttctaagcatttttctttttttcttccaagtaaagaattaggaaatcaacaggaaaatttcagacatttttctctttgataaatattgtttgatacgagcatggaacacttttgtaaaacagctactttattttgagcagattaaagaatgtgctgatgaaccggttggaaaaggttacatggtttcctgcttggtggatcaccgaggcaacatcactgagtatcagtgtcaccagtacattaccaagatgacggccatcatttttagtgattaccgtttaatctgtggcttcatggatgactgcaaaaatgacatcaacattctgaaatgtggcagta

SEQ ID NO: 16527 - DNA, 2300 bp, Homo sapien
ccgtaaggtctacgcttgcctgacagcctgagctggccaggttcccagatttatctgtttcttgcttcttggtgactgagatttcaagatagccatgtgtactcctccctatctctggaggcaatctgtggctgtggtttcctcagttcaggctgaaagataagtaactgatggcttatctaggattgtcaatttctagttaaactggcttaaaataatctcccacttgtctgaacacatgcagactcagcattgaaaattaatggaggccaggcgcagtacctcacgcctgtaatcctagcactttgggaggctgaggtgggcagatcgcctgaggtttggggttcgagaccagcctggccaacatggcaaaaccccgtcgctactaaaaatacaaaaattagctgggtgtggtggcacatgcctgtaatcccagccactcggaggctgaggcaggagaactgcttgaacccaggaggtggaggtggcagctccgagcagagatcacgccactgcactccagcctgggcaacagagtgagattccgtctcaaaaaaaaaaaaaaaaaattaacatacgctagtgacatctcaaggacttctggtgatgtgtccagcctgcctgactgaaacttacctatgccatgtgtttgctaataaacatggggctgccttagtcagtgctcaaggttagcagcagcctcatgatcattttatgacagtagcaaaggtgaccgttggtggagatgccaacaagctctcattccccatgatagaggcctggggtcagccacagtgggtaatttgtactcacagaatatcttcagtctcaggagctccttttgggttccctgagctcctgacttttcaggttctagttatgtctaacttggtcttgactgctcatttgcgggtcaggacagcagaagctgtctgtttactacagtagatgtaattcgcatttttggacacaatgaccagtggagattacacaacccaaactgccctcattccccaacatgtgcatggacagagtgggatgaaagtgcgccagggtggtgggaagccccagggattctggtggctagcctagctgtctacaggatggcagagttcctcttgggcagctcatttaatccctccacgcagaactgttaacatctctgtgccattcttcagttaaatgagaacctaacgcaggcctgatgcatggctcagattacacagcggatgtgaagaggctttgggaacatatcctctctcctaaggacagggaggggatgctagtgtggggtgcctgcggtgttgcatgcaggtcaatgagaacagttaccgacacacagacttaacccgagtcctcaaagatgtgttttattattattttttcatcctttaaacatgaatctaaatgctggcttaaaatcaggattcatgcataaacggcttcccagtttattaacaatactggctgtgactttttgagttcagtgttgtgggccaggcacttaaattattatttcgaatcttgccaatggtactttacatttgagctcttgcgtaccctgccagagcaaggattataaccttaattttttttcttaccccagaacttatgctcttaaccctattcaatgctgtctctctctttggctaagaaagacttctgaggcagatggaaggaaggaaggaaggagggagcgatacaaggagaggctttccgattccgtaatacacctggttgtgcaaagttcacctctacatataaagtttttgttttccaagtcattgaaccggcgacatattctaccggccattttggttgtggcaaccccaattcccttgatttttttttttgtgacagcaaatggaattagagtaggccgccctgcccgggctttttaagaaaccccagcaacccccccgggtaaggagcgccgctctcccgcccgccggtccagggtgtgtgcggtttccagcacggcctcctccttcgccccactctgggttcgcgggtcggcgccggcggggcggggctcggcagggccacgctgccacgcccagcgtctccaccccctcatttaaatacgcggcgccggcgagtgcgtcgagctcgccgcggactcaagatggcggcgtgtggacgtgtacggaggatgttccgcttgtcggcggcgctgcatctgctgctgctattcgcggccggggccgagaaactccccggccagggcgtccacagccagggccagggtcccggggccaactttgtgtccttcgtagggcaggccggaggcggcggcccgg

SEQ ID NO: 16528 - DNA, 2300 bp, Homo sapien
cacttgatctcacttcagaatcaataacattcttattaataagagtttgtattcatgctatttcatatgatggagagttctggtacaagtatagccaggttcatagtaatcatctaacatggcaaaatagagtcagatctatattcagaacccagctccactacttagaagttgtgtgaccttagttgtattttcttggcccactgtgagcttaatctgtaaaatctggtcaatgtagacttgctttaatagccacatgtcgctgggtgcggtggcttacgcctgtaatcccagcactttgggaagacgaggcggacagatcaggaggtcaggaattcgagaccagcctgaccaacgtggtaaaaccccgtctctactgaaaatacaaaaaaatgttagccatgcgtggtggcacacgcctgtaatcccagctactcagaaggccgaggcagaagaatctattgagcctcggaggcggaggttgcggtgagccgagattgcgccgttgcactccagtctgggcaacagagtgagacgccatctcaagaaaaaaaaaaatagccacatgtctagcacataggaagagatcagttaagggtaacctaatcaaaagtgatttaaaacttccctaatccaaagctaaaccaacttgtttgaagataccatattattattatttatcatttaatccagttatgagattgagaagtttataaagtgagcccaagttctgaggatggatggccaccagcaccactctgtcttagaatgtgttgagctgccctgtaggtataaagttatcaaaaagggagtagggtctgtgacctggccaaaatctgaagtatcttaacagataatttatgtttccaactggatatattaaaaagagcaaggagagccaaacataaagataccactaaagtaataattctttactgaaacctaggcccaaatagagtagacagtaaaatatggcaaggttttttttttttgttggtggtagtggtttttttgttttgttttgtttttttaagatggtgtctcactctgtcacccaggctggagtgcagtggcacagtcttggatcactgcatcctccacctcccgagtagctgggactatacgcgtgtgccaccacacctgactaacttttgtatttttagtagagatggggtttcaccatattggccaggctggtctcaaaccggtgacctcaagtgattctcccacctcggcttcccgaagtgctgggattacaggcgtgagccaccatgcccagccaaacacagcaagttttaaaatagcaaggaaagaatatttgtatgtaatgttcatttttatttttgtttactttgattacctttattgtgacagggaaaataaaacaggcaaagtagacactttggcaactttggcacgaacgacttcatagcagaaatgagttgataggaacacagtcggaaggatgatatttctgagagaattcttggcgcatagtcctggtcatatgcttgcagaaggaaatttagaaaacctaaaacagtcctgtttctgaattaaaatgtagctgcttttagctgtattttaattgtggggtctgtcaactacaacttgggatctttattttgttatgtatataagctttgtttcttttctgacttttcttatgtggctaaacccatttccagaagcttcacatcagtcaagcttcatagtaattgtgatcttgtatcccttaaatttcctagttctttttttccttttcttttagagcatctggtatctcacctgaaattagttgcagaatattatatgtatgtccttttgtttctacagagagggttgataatttttatcagatatcagaggatagtgactaaaggcgtttaacctcctctgcagaggtgggaatgtgcttgaggtctggtagtggggtctggagccgtccgagttttggagtgtgagatacagtttccttactttcctttcagatgcccactggtctccctgtcatacatgcccagagctgcctcagctgcatttccatatggtggggtgctggctggaaccttggaggatgcttcattctgggaacagaaaatggacttttctcattggcctcatgtgctgcccttggagccagggggctgcatagactttcagacagagaacagctcccggcactgtcttgtgacctacaggcctggtaagtagtgctggggtctcccatagcttatttgggagcacagtggtagagaaaagggaaggagggtttgatcctaccctttgggtggctgtgg

SEQ ID NO: 16529 - DNA, 2300 bp, Homo sapien
gctaggattacaggtgtgagccactgcgcccagcgaattaattctttttcttatcatgtaaagcatggttggtgtatggtggcacacgcctgtgttgtctcaactacttgggagggtaataatattttttttctttatataaatcatgctacactgaacttttttgagacagggtctcattctgtccctcatgctggagtgcagtggcacaatcatagctcactgcagcctcaatatcccgggctcaggtgatgcttctacctcagcctcctgactacttgggactgcaggcatgtgccaccacacatggctaattttttaaatttttaacagggacaaggtcttgctatgttgtccagtctggtttcaaactcctgagctcaaggaatcctcctgccttggcctcccaataagctgggactgtaggtgtgattactacacctggcctgcttggaacaatcttatataattatcttagaatatatttgtgactggctgggcatggtggctcacgtctgtaatccctgcactttgggaggccaaggcggacggatcgcgaggtcaggagatcgagaccatcctaactaacacggtgaaaccccgtctctactaaaaatacacaaaatcgggcttggtggcaggcgcctgtagtcccagctactcaggaggctgaggcaagagaatggtgtgaacccaggaggcggaacttgcagtgagccgagattctgccgctacactccagcctgggcgacagagcgagagtctgtctcaaaaaaaaaaaaaaaaaaaaaaaaagaaaatatttgtgactatgatcatgggctgcataatagttcagtctatgacagaccacatgtatgatggttgtcccattagatgataataccaggctgggcgcagtggctcacacttataatcccagcactttgggagaccaaggcgggcggatcacttgaggtcaggagttcgggaccagcccggccaacatggtgaaacccaccactgtgctacagttgcctacagtatttggtacagtaacatcctatacaggtttgttgtctaagtatgtaatagtttacaccgtctaggtttatttaagtacctctgggatcattcaatgacgaaatcgcctaaagacgcatttctcagaatgtattcccattgtcaagcaatgcatgactatatatccatgaggtatctctagcagagagattgctatgccaaaggaaagatatatgtgttttaattttcatggataatgccaaatggtgctccagaaatgtgtgccactttacatttaaggcaacagtatataagcatgtccatatctcatttacccacaacagtgcttggtgtcatcagacatcaatttataccagtctgatagatgaaaaatggtctctttaatttgcatttctttaattataagcaaacacttattgaccattgtgttttcttgtaagcatttgtatcctttgttttctttttttgccctctggtacacatgagttaaatattttatagctgctattctttatatggatagctgcttttcttcctttgagtgaaggaaaaagtatccaagaattttataagatttaagagtagtatagttttcatagcttatattttgtgacattgcattctagaaagaatgacaagtgattcataggtgttacaagtgttctgtagcccttttgattgtatcattttttttgcacttctgttaatttcttagttgcacatcttcttcaagattgattttacattttctctaatttgaatatattctgctttccatctagccatctccccagaagtctgagcctctgctaccttctgcttctatggatgaggaagaaggggacacttgtacaatatgtctggaacagtggaccaatgctggggaccaccggctctcagcattacgctgtgggcatctctttgggtataggtgcatttccacgtggcttaaaggacaagtacgaaaatgtccccaggtaaggaccataggtaaggacacattaacatgttaagtcaggcagattcctagaaccactctaattatgtcctattgggttctttagtgcaacaagaaagccaggcacagtgacattgtcgtcctttatgcccgaaccctgagagctttggacactagtgaacaggagcgcatgaaaaggtaggtggtaagagtatgcctggctggaatgttcccttttggttcattgtaggcacatctgaaaaagaagttatgagtcactcgtagtgaggttttacttgacctgtgacttgggatctct

SEQ ID NO: 16530 - DNA, 2300 bp, Homo sapien
caaccaagaaatagagaagactcaaaatactaaaatgaagaatgaaagagaggacatgactaccaaataggaggggaaatgactgcttgtggatacagggtcccttttaggtgtgacaaaaatgttttggaaccagataatggttatgattatgattacataaccttgtggttatgctaaaaaaaaacaacactgaattgaacacttttaaattgtggattttatagtatattatatctcaatttccaaaaaagaaaagcaacttgattgctatttctccttttggtttactgacatttctttttttaagaggtcaaaaaatcttctgtctattgagttggacactgagtagtgtttattttgttctagttagcatttagtcaaagccctaattcatcaataaattgcagccaaactattaggaataaaatttttctgtgtaagcagtcctcaacaatgtttctgggtaataatcaatattttatttaatgtcataattattaaaacttctagtaggtcacctgtcagtaatacttagttgcccttttgttttaaatttttttttaatagagatggtgtcttactttgttggctagtctggtctcaaacttctggcctcaagcaatcctcctgccttggctttccagagtgctgggattataggcgtaagccaccaaactcagccattttttaaatttttattttttcttcttctttttttttttgaagatggagtctctctcttgccacctaggctggagtgcagtagcacaaccatagctcgctcactctctgtggcctcaaactctcgggctcaagtgatcctcctgcctcagcctcccaagttttttgggtgtcatttttttgtttttttgttgttgagacaagtctcactctgatacccaggctggagtatgggcaccatcatggctcactgcagcctcaatctcccaggctcaagccatcctcccaccttggcctcccaagtagctggaactacaggagcacaccaccatgcctggctatattgtgtattttttgtagagatggggtttcaccatgttaatcaggctggtctcgaactcctaggcacaagcagtttacccaccttggcctcccaaagtgctaggattacagacatgagtcatcgcagctagcctaatgtgtctgtgtgtgtgtgtccctagatccttcctcaggaactcctggtttttagtataaggttttattaatttgtctgggtgtggtggctcatgcctgcaattccagcattttgggaggccaaggtgggtggatcatttgaggtcaggagttggagaccagcttggccaacattgtaagaccctgtctctactaaatataaagtttcattaattctgtgacaaaagtggcctcaaactcctcagctcaaactggagtatgccttgttattccaggagttagagaaactgaggtacagtagtggttattttaaactcagccagccaagatatatttggagtgttagatttggccccaggtcttctcatcattctaagttattttgtttgatgccatattatcatttatgttttttatcttaaaactaacattatttaaattttaaaagaaaaatactatcctaaaatgagagatgaagaaattacagaagccagaccctgtactgtactccaaaataccttggtctgggtgactgcaatagcaaaatcccatgaggccatatttgggcaacaaagccctttttcttcttgctaaccctcccttttcagccacctaataccagcatacagattgctgagtttgtcctttaaagatactgacaatatggccagatgccagtaaaatagaattagcttttaacggaaggatcaagctcctttgtgggctaatgtagcagtggttgagtggtaaaaaataatatctaggaggccagtctcccccccttatctgctatacctgcttcagctttcaaaggcagcatttaatggcctggagatgggttgaagtgataggatttacttcaaatcactatagattgtttttgtgatgatagttcattgtactataattccgttgtctttctgtgtacataggttgagagcaccattggatgcttactttcaggtgagcaggacccagcctgacttgccagctaccacttatgattcagagactaggaatcctgtatctgaagagttgcaggtgtctagtagttctgattctgacagtgacagctctgcagagtatggaggggttgttgaccaggcagaggaatctggagctgtcattttagaaggtca

SEQ ID NO: 16531 - DNA, 2300 bp, Homo sapien
atctcaaaaaaaaaaaaaaagaagcatgaccattctgaagattcttaaagctgtctgtttgttttcatctccactgctaccactcttgcctaggtctctctgacctctggtctggactcccacaatagcctctacactggtcacctagcttatgctcttgcacccctacagtgcattcctaacatagaagaaactccttaccaaggcccataggccctttaataatggtgtcctgttcatcagtgaaacccatgctcatcagggacctatgcactgatttccttctgagactcttcttggctctttgcatagccagctgcttttaatccttcatgcctcagcccaattttcactctttaaaagagtacttccctcacaattgtgtcttagttggtcctctttgtctcctcaaccccaaacatcataatctataatttttttcatgtatttgtttattgacatcttacttgctagaatctaaactctgatacatggggtcttatctgtttttgcctctagggtgtcttgtctgcataacaggtgcttaataactattagttgaacccccatttcctcataagtcagatgaaaataaaagcacgtgccttacttcacaaagtaattaaggggataagttatactgatgtactttaaaaactaggtggtagggaggcacagtggctcagtcctgttgtcctgatgcatgaggaggtaaggccaggcattcaagaccagtttgggcaacataggaagccttcatctatataacaaaaaaaaatttttttttttagtttaaaaactaggtggtagttttcaaactgatacaatggaattaaagataggaaacatgaaaagaacataggtgcttaataaatatttgttgaatacgctaacatgatggaattagagatggaaaacaaaaataatgaaagggataggataaagtttgctcagcctttttggaaacattaggtaagtttccattttgagttagtaacagttaattttgcaagtgtaaaaaatgtcctttctctatttatcccttgtaactgttgatgctgtgaaagattaatattgcctgctaaaattagatactgcattatatgcatttgattttggtgaatgtccatattcagcttgagagaactgcaaagtgtctgagagattacttttagacccagtagtttaatctccttggtttatagatctttctattttggaagatactactatgatcacaggacttcatgttttctaagggcaaaccggaaaactggttataaatgcttgttatagagaggaaagtccattaccaaacacttctgacttaagtagttaaaatcttctcttgaagcttctcagtcttgctaagaatgatattaaacataaaatcagaaagattaaatatgattctgtcacctacatagcatgttttatctattttattaatactttttacaaatactgtttctctagtgatggctcatgaagcaatggaatatgatgttcaggtgcagttaaatcatgccgaacaacagccagctcctgctggcatggccagcagccaagggggaccagccctcctccagcctgttcctgctgatgtggtcagcagccagggggtaccatccatcctccagccagctcctgctgaggtgatcagcagccaagcgacaccacccctgctccagcctgctccgcaactgtctgttgacctgacagaagtggaggtcttgggagaagacactgtggagaacatcaatccaagaacttcagaacaacataggcagggatctgatggtaatcacaccatcccagcatcttcgttgcattcaatgaccaacttcatcagcggactgcagagacttcatggcatgctggaattcctgagaccttcatcttcaaaccacagtgtagggccaatgagaacaagaaggagggtatctgcttcacggagggcaagagccggagggtctcagaggacagacagtgccaggtaaataaatatatggataagtctgtgatcattgctgtactagaaattatgaaactgaggctctgccattcaaggactgacagtgtgacttttggcaagtcaggtaacttctgacccccagttcctcataggtggaaataaaagtgcttgccttacttcacaaagtaatgaagggataagttaaactgttgtgccttgaaaactaggtggtagtttgttggcaatctctgtagagattggctgttgttcagattgtgtcttgtacaccaaaaattctttcttcacttgcaagtctctactcacc

SEQ ID NO: 16532 - DNA, 2300 bp, Homo sapien
gattattcatatggcacaaagtgatctcctactagtccaaagttcaaaaacattttaataaagtccattcatatatcttttgtttgctttccaatggaatactacgtttattgaggcaaaatcacattatttttagttcttggagtcaaaaagcgtacacgaatgttcttcaacacagttactaaaaatacaagaccaagttgaatgtgccaaagagataccattcagttgggttttctagagtcatcaggaagaatattagagaagggatttacatggttggtttccatagcttgatagaccaaacacacacaaaaaaactgccacaacaacaaacagcaaaatttttatccatacaggaatggagcgtcccttttttttgtattttctcacttgacgtctgccaagggaacatacttaggaacatatgtagatgaaaacgactcctccatcctcaaatcactgagttctaatggccggcctgcagctcctttgattgttctgcggcaactagcactaattcttgttggtgtagttgcttcataggggaacatttccttaagaatatccctttctactcttctttcctgtgttttttttctcccacttcagctcttgtcaatggtttctttggtgttcttctgggtatgtctgagaattcagtgactggcagaataggaaatgcatgcttgaaatttccagtcaccctattgacaattaaggattcgttgtttgaagcaattatagtttcagctatgggagtactcgctgaaattactgctccatctatacgaaaatattctgaagcgtgcacccttttgcttggagttcttcttgaccctcttgtagattccctagttaataatgcctgcagaggtccgccttttgaagatccacttgtccattcagtcccagttattccagcttgagaatagctctccttgtgctcaactcttctttgcttgagggttactggagtctttactcccctgtttagcggttctctcttctcaaacttgagcccaatttagagtcttcttcattttcaccatatctgtcagaatcattacttccattctgccttgtattttctgctgaagaagaaattgttgctgaaggagacgatcttgattctgttccttgctccctcagtttcaaaagctatttctcatacagcttcctggttgttcccacaataggaccacaattcactccgtatttcacaagctgatccaaaggatcttcattagtgagttctgttacatctagatcgtctttatcatcttgtctgggtttatcagttttctttgtggctttcctgccggcggcgggctcggagccgagacggctgtgggctcgcgctcctcgtacgtagctggagaattccgggggcccctttcttttggcgctggcggcgagcggcggccctaacaagtgatttgagactgttcagtagctcagatcccttgcagcggtttgagattgaagagattatgtaggcaaagtattttgcgtgagctcttcaaccccatgagaggatacatatgaactggactgtcctacgcctctttacaggctccgaaattcaaaatattgaaatattttgaaattattcgattagctgctatcctttggatacagataactccttcactaaagcgttagggataagcagcaggagtcagttttaatatcatcatccccattccaaaatggaccgagaaatcatataactttctcccgccagaaagttcaaataaaacgcgctaaaaaaaaaaaaaaaaaccaaacaaaaaaaaaacaaaaaaacctcccattttttccggggcgggtgcaaggtgacggacgtagattcctgccaattgtaggaggcttcctcaagcgcggtcccgcctcgtcaggacgaactaccagccaatgagagcaccgctgcttcagctatcgggggacccattgaagaagaagagtgggtattggccacagcgtagggcttctgtccaataggagcatgcctgccggcggctctggcgggagcttgagcggctccggaagtggcagttggcgtaggtgcattcggagtgcggccgaggtaactaccgagtcttcggcgggctcgcgagcccggccgcggcctgctggtttcaggtgaggaggggtgttgcttctcctcaggccttgggcctctagcttcgggataaacctccccacgcctgattcctggattgggattcaggagacaccccacgaggtgggctgcacgcgggcttggaacccggcggcctgaggggattcgggccctc

SEQ ID NO: 16533 - DNA, 2300 bp, Homo sapien
tactcacggcttgtgattctcaaaccttgcctctacatcccagtttttcctgtgtaactgtggacaggcacccatggtactgtccagcctcatcagcccagttatgattgtcagtcccccaaagaaagtttgggcaaaggtacttatgctccccgcctttggctgtgtcaggctacaccattcagaagcacctgaactccacggaaaaatcagaagctcaaacttcctggtaactcaaggctaccaagtgaaggtgagtgtgccttgcgggggcgctttgggtcaaacctgcatgactggtgctatgagaggggcacgagtgtctcagaaaggcttgattcttgtcttagtttatttatttatttatttagagacagagtctctttctgtcacccaagctggagggcagtgagcgagatcgccccgctgcaacctctgcttcccaggttcaagcgattctcctgcctcagcctcccaagtagctgggattacagccatgcaccaccactcctgactaatttttgcatttttagtagagacagggtttcaccatgttggccagctggttttgaactcctggcctcaagtgatccgcccacctgggcctcccaaagtgctgggattacaggcatgagccaccatgcccggccttgccttggttttagaactgagttcaattttagttttttagtttcagaactaacttcaactttctgtgtgcccaccacacaacagtctccatctatgccgcctgttctgatgactgccttccctcactgcccatttagcagggatgggctacaagtcatttccccttagatgcctggacaccacttctatgtccctacaacatacaatgggggatcttgttaggtttaaggactcagactcacaggacaggtctaggccacacttgtcattcagttacttagaaggatgtcagcagcgccaaacctttccctccagggtgagtcctcgcagtcatccaggagatactctctttgtcagagccacaggtgctggagaaagaggctcccattaggtgggtgtgggtcatccaggcttagaagcccatgacctgcaggagtcagcatctctggtaacaactctgcaggcatgccttccagtgtttctgcaagtgacatgtgagttgctgttttaagagctgccacatctgggtatggtggctcacgcctgtaatcccaacacttagggaggctaaggcgggtggatcacctgaggtcaggagttcaagactagcctggccaacatagtgaaacactgtctctactaaaaatacaaaaaattagccgggtgtggtggcgcacgcctctagtcccagctcctaaggaggctgaggcaggagaatcacttgaacccgggaggcagaggtttgcagtgagccgagatcgcgtggttgaactccagcccgggcaacaacagcaaaactccatctccaaaaaaaaagaaaaaagaaaagaaaagagctgctacatggccaggcatggtggcttatgcctgtaatccccgcactttggaagggaaggcaggaggatcactttgagcccaagagttcaagaccagccttggcaacacagtgagacctccccctcttcaaaaaatttaaaaatcagccagtcatggtggtgcacacctgtaattccagctactcaggagagtgaggcaggaggaggatgcctagagcccaggaggtcaaggctgcagggagctatgtttacgccactgtataccctagcctgggcaacagaatgagaccctgtctcaaaaaataaaaaagaggctgggcgcggtggctcacacctgtaatcccagcactttgggaggccaaggcaggtggatcatgaggttaggagatcgagaccatcctggctaacacagtgaaaccctgtctctactaaacaatacaaaaaattggccaggcgtggtggcaggtgcctgtagtcccagctactccggaggctgaggcaggagaatggcatgaacccaggaggcagaacttgcagtgagctgagattgcaccactgctctccaacctgggcgacagagtgagactccgtctcaaaaaataaataaataaataaataaataagaaaaatttgctacaaagcattcccatcagctgtttactgtgtagtcctgttacccccttgatcctgcccagaagcaatctaacaatcagcagtcatttttattttcatcatcagcaatgttactaagagccataggtgacagtctacctgtatcagatttccaggggaacagagctaagaagttcactg

SEQ ID NO: 16534 - DNA, 2300 bp, Homo sapien
aaaaacaaaaaacaaaaacaaaaaaacaaaaaaaaaataccaaacgcagactttcttcttgatgtaatcagaaagactggagcaaactgaaaggagagtaattttccctttatataatcttgcataccaccttatcccacacttttggaaacactgtcttagctattaatttgaaattaagtttgtttcttctcaactccctaaactagtgagtttaaggagaagtatttttggatgttgtaggggacactgttaatatcccctccaaatgacctctgatcctttttaccagctctatttacccatccccctctcggcatgctttgctgctgaaagttcacagctgcaatcttcagaggattgcctgtgggcactggagccctttcacccttatagacagctgaaagtgcccacgagttttatatccatctgtccctgccctccccaacacagtccataaccactgactggtgtaagtataaaagtccagttcctttgcttcctgtgggacacactctgaggtgtaattgtgcccacaggtctccgcgagaccacctgagcctgggatttcacctgaaatcaacctcttgcttgatttcttctccttcgccatcctacttcctgtactccctcaaccatttctcctgggagcaccttctttttgtttgtttgggggacttttggagttattttttttttgagacagagcctcattttgctgcccaggctggagtatagtggcgtgatctcggctcactgcaaactccacctcctgggtgcaagtgattctcatgctttagcatcctgaatagctggaattacaggcacatgccaccacgcccagctatttttttgtatttttattaatagtagagatgatgtttcaccatgttggcgaagctggtctcaaactcctgacctcaagtgatccatccaccttggtctcccaaagtgtggggattataagcgcaagccaccatgcctggtcaagggagcaccttcttgatacaaatccctcgtgcccaaatcatggctcatgatctgcttctgggagaatctgagctcaggcagacaccatgagtgcaacccaacctgggacgcaggggctttgtgaaaccaaagcccttgtctggaagtcagcgggaccccagcttcacattctgctttgacctgaagggtcccagcaaggtccagccacccagccatgcctctgagctctcggatctgcccagcacttcccaggcaaagcaacacagaggcaacgttgtccttctctacctaaaggcacccctgatgcccgattgcatgcacttcataagggctgtcatgcccccttgtgctatgaatctcatctctgttctatactcacggcttgtgattctcaaaccttgcctctacatcccagtttttcctgtgtaactgtggacaggcacccatggtactgtccagcctcatcagcccagttatgattgtcagtcccccaaagaaagtttgggcaaaggtacttatgctccccgcctttggctgtgtcaggctacaccattcagaagcacctgaactccacggaaaaatcagaagctcaaacttcctggtaactcaaggctaccaagtgaaggtgagtgtgccttgcgggggcgctttgggtcaaacctgcatgactggtgctatgagaggggcacgagtgtctcagaaaggcttgattcttgtcttagtttatttatttatttatttagagacagagtctctttctgtcacccaagctggagggcagtgagcgagatcgccccgctgcaacctctgcttcccaggttcaagcgattctcctgcctcagcctcccaagtagctgggattacagccatgcaccaccactcctgactaatttttgcatttttagtagagacagggtttcaccatgttggccagctggttttgaactcctggcctcaagtgatccgcccacctgggcctcccaaagtgctgggattacaggcatgagccaccatgcccggccttgccttggttttagaactgagttcaattttagttttttagtttcagaactaacttcaactttctgtgtgcccaccacacaacagtctccatctatgccgcctgttctgatgactgccttccctcactgcccatttagcagggatgggctacaagtcatttccccttagatgcctggacaccacttctatgtccctacaacatacaatgggggatcttgttaggtttaaggactcagactcacaggacaggtctaggccacacttgtcattcagttacttagaaggat

SEQ ID NO: 16535 - DNA, 2300 bp, Homo sapien
atttgaacaccacctatctggcaaaggattaatatctagaatatttaaactctcaaaactcaagttttttaaaaagaattcaactaaaaatgggcaaaagacatggacagacatttcaccaatgaggctatacagatggcaaacaagcacatgaaaacatgtccatcatcaccaggcactaaagaaatgccaattaaaaccatgatgagaccaggcgcagtggctcatgcctataatcccagcactttgggaggccaaggtgggtggatcacctgaggtcaggagttcgagaccagtctggccaatatggcgaaacgctgtctctactaaaaatacaaaaaatagacaggtgtggtggtgcacgcctgtagtcccagctacttgggaggctgaggctggagaatcgcttgaacccaggaggtggaggttgcagtgagctgagatggcgccactgcactccagcctgggcaacagagtaagactctatctcaaaacaaaacaaaacaaaaaaccatgatgatatatcactattcacctgttagaatagctaaaaattcaggcagggacaaaataaaatgctgctgaggatgcagagaaactgaatgtcttgtacattgatggtgggacagtaaaaaaaaaaaaaaagaaaagaaaagaaaaaaacttccaaaaggttatacattgtatgattttgtttatagcagatcagtatacccatcctgcagctgctatgagtgttgacagctaaacactcacacagcttccccctcgtccagaagaattgccctgggcagaaaggaggctgcctcttgttccagaccttcacattccagacctccccatggagcctccactgactacatacttgtttcactttttcttcctctgccctatcatacccaccactctcctaagagtcttccttcaataaatcacaggcacctgtgttacttgttgaaggtgtccaggttcttggcatcttgaacaaagaaatgggcaaaatgcacaaagcaaggaaagaatgaggcaacaaaagcagagatgtattgaaaacaaaggtacactccacagggtgggagccagcgtgagcataggggctcaagaactccgttacagaattttctgggatttaaataccctctagaggctcccattggttaattggtgtacaccctatgtaaatgaagaagatgaagtgaagttgctcagtcacttactcagtgaacgccatatgtaaatgaagaaaatatttcctgtcatagctgaaatgtgtccattttatttagttctaagaagtcagcgtgaatcagctttatgttccctgcctgcagaccctattctcctgcctcacctcaatctcttcacctaagacaggaagaaaactgatgatgcaggagacgaagaacaatagcaaggcgaagaaatgaatctccaaggccggcttcaagcgattctcccctctcaggctcccgagtagctgggattacaggcatgcaccaccacgcctggctaatttttgtatttttagtagagacagggtttccccatgttggccaggatggtcttgaactcctgacctcaggtgatctggccacctccgcctcccaaagtgctggaattacaggcatgagccaccacacccagctcccagttctgttcttttagaggcaaatagtctgttgagtaaatgcataacactacttagactttctagctgaagatgtagttaatcttaagaaaacctgactcacactgtaacaggatgttctgcaatgaccttagaagaggaagtgacttttttcccactttggtgtctcttccctcgtaccctccccaccccgccaatattatccagcacagagaagcaaacaccagaagcttctctccaactttcagtttttctctaaacttccagtccttctcatactgtgtcctggttataatagttgctgggaccttattctattctgaatccccagcccctaaagaaggcttggtactgacgtgtacagcgtagttacccagtgactttggggaaggcaggaagagtgtggaaaggacaggaggaaggaagggaggggccgtggctccgagctgcctagaaagcggctccagggagccagggcaccgtgagcctggtggttggcagctggagccacgtcggagggggaagtgtcgcagcattctctgcaggcatcacagacctgaggcagtggcctccggagggcactggacagaaacagccatccaagtggctgagtggagggaccctgctcaagtgcagctgcagtggccggggt

SEQ ID NO: 16536 - DNA, 2300 bp, Homo sapien
gctgctatgcaccggtcctcacctcgctctccctgccaccctgcagagtacacggtggcagtgcccaagtccatgttccccgggctcttcatgctggggacattcctctggagcctcatcgagtacctcatccaccgcttcctgttccacatgaagccccccagcgacagctattacctcatcatgctgcacttcgtcatgcacggccagcaccacaaggtgagcggggcggggtcccagcccggacctagcatgtgcagcccgagagggcccggcagccagccgcagcttcaggtgctgcggagcctcctgggagtctggctgtgggttgggagggacgggacgtttgatgtgactcacggggcaactgggttgggcatccgaacctaagccaggcggggacagcgtgggtgtgcagcatcaagctgaccccaggccctctgcacccttgtttacgcatcacctttaatcctcaaaacaactcattcattcgttcattcattcagcaaatgcccagtgagtgcctcctgtgtgcgagacactgttctagacatcattgaacaaaacaacaaaaagccttgcgctcctggagcttgtgctgaaaacagccccatggttctccccgttccacagagcaggagactgaggcctaggaggactaaggaacttgccccaggtcacacttggcacagccaggatgtcgtaccccattctggggattccagagtctgcgctctcaatcacccttcccctgaggcccttcaaggactccacgacagtcccagaagctggcccgagaagataggtctgcccaaaggaagctacctcccctgtaccccccgctgcttctctgtccctgcattgtgctgtccttggcccatcccaggctgttccccagcccgtctccacactctgttctctgctgggcataaatcagagaaaatatggcagatatgatactttcgggacaccagtttagaccctgatgtcgctgatactgaacgtgggtttcaccttggtttcccagcagcaacttaatccggttcatctcgatgagccgattcggggtttgatcggccgcctgggacagttctcaggttggttggctgtggtcctcccggctctccccagagttgatctgcatcctagggggctttcctaggggccagtatcagggtgggtgcccagtcctgggccaacctgtctctcaggtatgctctcagaggtagcgcagcccaggcctggcctgtgtcctccagcctcacctggcctctgctctgcagagctcactgcatctgcttctgtgtcccttgccctgtttgtgaagccttttcagatccactgccctgtccgctatctttcccatccacaggggacaccagaaccttctgggaacctgctcaggccattctggggccccaggggctgtctcaggctccctcttttgagacacttccaccccagtctgtccagtcccctgctgccacaccatgaggacccgaggagactgtatggcctgtagccacgtgggctccaatcaggaacgtgttctcagatccccagacctatccatctaaggatcctgatccagctgtgacccggatctggcccataccagctcacaagagcacccatgcacatcctttcctgtttctgttccagtgacgccacctcagcgcttgaaagcgccagggcagttttcacactgcaggaattggcaaacactaccaatcagggctctccctccctccctttatttccccctccctcattccccagctctctcccttcctccttttcctgagagctggttttccagcacatcactggtcctgttgttcctggtctgaagggagggaggcccacgccagcatctcattgtgtcactgtcacctgctttctctctctctcctccagcccagagaggctgcaggattctcttctcagactcctcaccaagccatagctaagatctcacctctatgccaggcccttggcttctgaagctcgagggccacggtgaagcggtgttctctggttcactgtggcgacacccccttggaacaaaaaaggcctcctgtttggacatgggggtggggaggacacctctagtgacacttccgggtcatcccgccacagaggctgcattaacctcagttgccctcagtgccttgctctcccagacaacatcaggcctcagtctaggtgccctgtctccagaatgcccctctagccaggggcacggcatttagggatgggatacctgtctagcacctgacaaattccagagtcacagtggc

SEQ ID NO: 16537 - DNA, 2300 bp, Homo sapien
ttcacattgtgcaacaaaataattttttttttgagacagagtctctctttctcgccaggctggagtgtggtggggcgttctcggctcactgcaacctccaactcccagattcaagcgattcccctgcctcagcctcccaagtagctaggactacagatgcgtgcctccacagccagctaatttttgtatttttagtagagatggggtttcactatgttggccaagatggtctcgatctcttgacctcgtgattcgcccacctcggcctcccaaagtgctgggattacaggtgtgagttaccgcacccagccaacaatataattttttaaatattacgttcaggtattagatatagtgatgactgagttttggggtgccccattaaattttgccctcgaacattattaaaaagtcaagaaacagtagatgtctgcgtgtatgtagtgaaagggggatgcttatgctatgcactgctggtgggaatgtaaattagtacaacttgtttggaaaacagtacagagattctttaacaaactaaaagtacactttggggctgggcgcggtggctcacgcctgtaatcccagcattttgggaggctgcggcgggaggatcactagaggccaggagttcgagaccaacctggccaacatggtgaaaccccgtctctactaaaaatacaaaaaaattagccgggcgtggtggcacgcgcctatagtcatagctactctggaggctgaggcaggagaatcgcttgaacccgggaggcggaggtagcagtgagctgagattgtgccactgcacttcagcctgggcaacagagtgagactctgtctcaaaaaaaaaaaaaaaaagtgcactatgggaggccatggcaggcaaatcgcttgagcccaggagtttgagaccatcctgggcagcatggtgaaacctcgtctctacaaaaaatacaaaaattagccaggcgtagtggtgcatgcctgtagtgccagctacttgggaggctgaggtaagaggattgcttgagcccgggaggtcgaggctgcagtgaaccaagatcgcaccactactctccagcctgggtgacagagtgagaccttgtcacgggaagggaagggaaaggaagggaaggggaggggaggggaggggaggagagaaaaagtagattcaccattcggtccagcaatcccaccactgggtatctacccaaaggaaaagagtcattatatgaaaaagacacttgcacacgaatgtttgttttttgcagcccaattcacaatcgaaaagatatggaaccaacttaaataaccatcaaccaatgagtggataaagaaaatgtagttgatatacacgatagaatactactcagccataaaaaggaacgaaatgaagtcttttgcagcaacttgcatggagctggaggccattattctaagtgaaagtgattcaggaatggaaaaccaaacactgtatgttctcactcataagtaggaactaagctatgaggacgcaaaggcatacagagtgatataatggacaatagggagaatgggagggggtgtaacacacacacacacacaaaaccctacacattgggtataatgtacactactcgggggacaggtggactaaaatctcaggacttaccactatacaattcctccatgtaaccaaaaaccactggtaccccaaaagctactgaaattttaaaaacaaacaaatatttgcacccgaggcgagcacctcattcgcctctcgctctctcgggcacctcctggagccagagggtcccatgcggccagctcctccgtggaagcagttgaagttattccagcagcgatcaggccaccgaggatgtccgcccagacaaccacccgcgacggggagactcgctccgcctgtgtccgcccaccctcctcccgcgcgggacacacctggcgggcgcggcactccctgtccgcggccacctggcgcgcagctcccggcgccgggcccgcccctcgcggctctgccggggctcccggccggccaatgggagcgcggtatgcaaatgagcaggtgcggtggcggcccgcccggaacggccgcggggctcccgggatgttagaggcgctcagggtggcagcagagcagacgccgggctgcgcgctgggagctgcggtctccggccatggcccccgctccgccccccgccgcctccttctcgccctccgaggtccagcggcgcctggcggccggcgcgtgctgggtccgccgcggggcccgcctctacgacctctccagcttcgtgcggcaccacccg

SEQ ID NO: 16538 - DNA, 2300 bp, Homo sapien
aaaaaaatttggtaaaactaccagtgaagccaatattccatagaattaaccagtgaagccatctaaaatttcttttgtgtgtacatgttaaactataaattcaattttgttaacagttatagggctgtttaggtgatctatatcttcttgaataagctttggtagtttgtgtcttccaaacaattagtctactttatctcattgtcaaatttattggagaaaaatctgtttgtgatatacccttactaatgttttaacaatgacggattctattgatctctcctctccctttttttcttttttttgttgagatggagtctcattctgtcacccaggctggagtgcagtagtgtgatcttggctcactgcaacctccacatcctgggttcaagcgattctccttcctgagcctcccgagtagctgggactacagccatatgccaccacgcccagctaatttctgtattttttggtagagacgaggtttcaccatgttggccaggctggtcttgaactcctgacctcaagtgatctgcccacttcagcctcccaaagtgctgggattacagatgtgagccacagcacccagccacctctctcattcttgatattggtaatttatgtcttttctcttttcttccttattggtctggctagagatttcccaattttattgatcttcccaaagtactaactttggtttcattgtctctgttttaaattttgtttgctacttcattgatttctgccttaatctttaatatttcttttcttctattttcttcgagtttaatttgctcttctgtttctactttcctaaacctgaggtcattgatttgagaactttcatgttttccagtgcaggtgtttggtgtttgatgtttggtgtttggtgctataaacttgaaagttctgctttaattgcatctagcacatttttatgagttatactttctttttcattcaatgcaaaatactttctagtttcccttttgagttcttttttttcccatcagttatttagaagcatatttagtttctaaatattagggtattttcagatatttttctgatagtgagttctcatttaattccattgtggtcagagaacatactttgcatgacttaagtccttatacattgactgaacttgctttatggaccagaatatggtctatcttgataaaagtttcacgcaaactttaaaaaaacgtattttgctgctgtgtgatagagtgttccataaatgtcaattagttcaagttgtttttataacattgttcaagtcttctatacctttactgattttgtttacataatgtatcaatcattgagagacagaggtgctgaagtctcttgctataattatgaattggtttttgaattatgaacaaattatgaatttgttctccttgcagttctgtcaacttttccttcctgtattttgaatttctgctattatggatataaaaatttaggattgtttacactgaaattcatagtaacattgttcacaatagccaaaaggagagaacaacccaaatgttcatcaaaaataaaatgtggtatatccatacaatggaatattatgcagccataaaatggaatgaaattttcatgtacactgtaacatgaatgtaccatgaaaacattatgcttactgaaataatccagataaataaagacaaatactgtatgattccacatatatgaggcatctaaagtagccaaatttatagaaacggaaaatagaatggcagttgccaggggctgagggaagaagaaaaacataagtgtttattgtgtataaagttttaattttataagatgaaaaggttctggagatggatggcagtgatggttgcacaaggtgagtatacttaactgtggggaaaagcaagagagatcagattgttactgtgtctgtgtagaaagaagtagacataggagactccattttgttatgcactaagaaaaattcttctgccttgagattctgttaatctataaccttacccccaaccccgtgctctctgaaacatgtgctgtgtcaactcagagttgaatggattaagggcggtgcaggatgtgctttgttaaacagatgcttgaaggcagcatgctccttaagagtcatcaccactccctaatctcaagtacccagggacacaaaaactgcggaaggccgcagggacctctgcctaggaaagccaggtattgtccaaggtttctccccatgtgatagtctgaaatatggcctcgtgggaagggaaagacctgaccgtcccccagcccgacac

SEQ ID NO: 16539 - DNA, 2300 bp, Homo sapien
gggatatcacttctgtgattatgttattaagcaattgactttgaagtcacctacagagagactatcctgggtggggctgacctcatcaggtgaggccttagagggaaggtaaagcatgtgtgagccattcctgctggtctcaagacgaaatttacagatgagttctacagctgcaagggtctgaattctgctgacaacctgaacaagcttggaagaggagctttgcatcggatgagaccactgcctggccaacaccatttcagcctgctgagaccctaagcaaggacacagaaaagctgtgtccagactcgcgacccacaaaaactggaagataagaaatgaatgttgttggaagctgctaagtttgtgggaatttgtccacagcaacagaaagctaatacattgggcttttcctaaaactgcttttgaagaaaggattcccacactcaaaaaaaaaaaaagttttgctaatcctggctaaatgatgagtgcagcagacttgaaattttgtacttacatgtacagctctcccagcgatttgtgaacaggcaggaggcaagcaatatcctggatgatgactttcccagcagccttgatctgtcgattgccagagtctgatccctcacgcttacttttccatcgtcttgatttctaggggtagatgacaggatgtaactaatggggactttgacaagtggaaaccaacaattgcagagctcatcatattggggtcattggcaatttgcactttttaaaaattacatcatgcccacaattatgggaatcagcatctgtaggaaataaaaggatgagctcttgttccaaaaatcctaacaggaaaataagcacctactgccaggctagatacattctgcaggtgctcaaaaacacatatcaggaagccaggattaatacattaattaatgaatttgaaaacagcaagtaaataagttagtaaaggccacaaaaatgtgggagaacaatttttagattgaattcagtcctaggttcaaaattcctgcctgaaactcatcaaaatttttttccttaggcagtttgaacagggtttgttgaaaatttattgcagacatagcagtgtgggctctgcaaaccttaatctatatggtaggaaaacagagaaactttgcaccttgaggagaattaccccgtttttctggcagacttgaattatttctaaaagtgatcgttctcaatgtcaaaaatacctgattcaaggggcttgggtaacagacatggaagattgtgggcaagtattcgatttccccaggcttacctatgggtggctacatgtgtgaggagcctgtatgtgtgaaatgagagatgtcctgaaaaacttgaattatcagagcacagccccatctggaatctttaaaatgacaaaccaaggagcaggattccattttattgccagaagttaaaaagggggtcaccaaagtgattcaactaaggaaggagtgacatatttattaacaaaaaaaggcaaaaggagctagtaaaaaggcctccaatttggaattagaaaatcaagatttccaggtcttactactacatgtactggctcagcaggaccctcggcaagtttttatttgttatgaatttagtctaaggcatgtgactttgtttgctcactgacaacttatggccaatcatgacctctgttgttccaatctcacaagattaatgagcgtacaatgaagaggcaggggtgcaaattaaatggaaaagtgtactctagaaacatgtaactattatgaatgtatataaactctcaggaatttaaattggaccattatttagattactcacaaataaattcattttctgtaagtgatttttatacaatcattcttccataaagggtttctgaccactgatatcccatttaatacctaaagttgtccaatgcatgtaacttcctatagggttatcatgtgtcttggaacctactaaattcaggacatgtggagttagttcagggcaggtaaatgaagaagtttagctgaagtatctgtgaactgtttatcatcatttgtaaatgcatgttacactatcaatttggaactttaacccgtttgatctttttatttttttttcttttgagacagagtcttgctctgttgctgaggctggagtgcagtggtgtgatcttggctcactgaaatctccgcctccggggttcaagtgattctcctgcctcagcctcccgagtagctgggattacaggcatgcaccatcatactcagctaatttttgtatttttagtagagacagggtttcac

SEQ ID NO: 16540 - DNA, 2300 bp, Homo sapien
accctgtcactagcaatgtttcagagcactggttgctctgtatccactccaaaacttggtattgctagtcctttcaactttagccattctgttgtgagtgtcctagtatctcactgtgggtttttttttttttgagacggagtcttgctctgtcgctcaggctggagtgtattgactggatctcagctcactgcaagctccgcctcccgggttcacgccattctcctgcctcagcctcccgagtagctgggcctataggcgcccgccaccacgcccggctaattttttgtatttttagtagagaccatgtttcaccgtgttagccaggatggtctcgatctgctgacctcgtgatctgcctgcctcggcctcccaaagtgctgggattacaggcgtgagccaccgcgcccggccgtctcactgtggttttaatttgcatttccatgttgatgatgaatgatgtcgagcagcttctgtgtgcatattgaccatttgggtatctttttttgtgatgtgcttgttaagtattttgcccattttgggggaactgtatcttatttgtttctggttgttatctattttggttgcaaattctttgctagatgtatgtattgattttctcttcatctgtggcttgtctttctccctctttaatgtttttcaatgaacaaattgtcctaattttgatgatgtccagtttatcactttttaattttatttattttattttatttttttattttttatttattattattattttttgagtcagaatctcgctctgttgcccaggctggagtgcagtggtgcaatcttggctcactgcaagctccacctctcaggttgatgccattcttctgcctcagcctcccgagtagctgggactacaggcgcccgccaccacgcctggctaattttttgtattttttaatagagacggggtttcaccatgttagccaggatggtctcgatttcctgacctcgtgatctgcctgcctcagccttccaaagtgctgggattacgagcgtgagccaccgtgcccggcctatttattttattttttattttttgagacggagtttcgctcttgttgcccaggctggagtgcaatggcgcaatctcagctcaccacaacctccgcctcccgggttcaagtgattctcctgcctcaacctcccgagtagctgggattataggcatgcgccaccacgcctggctaattttgtatttttagtagtgatggggtttctccacgttggtcaggctggtcttgaactcccgacctcaggtaatctgcccgccttggcctcccaaagtgctgggattataggcgtgagccaccgcacctggccttgtgttttcttttaaaagctttatagaaaaataaataaaaatgaaagctttatagatttaaattccttatttgaggtctgtgatccatttcaaattaatttttgcatgtaatgtgagttaaggggtcaaagttcgttttattttgtagagaaaaatagttgttctagcaccatttatgaaaagatttcctttctttgttgaatttgtattgatgccttggtgaacatcaatagaccatatatttgtggtctttctggactctcttttttcctttgatctatttatcctttatgccaacactacattcataatgtacttttctatagttaagtgtttaaatctgataggtcaagtcctccaattatattattcttgtttagttcaggttggctgttctaggtctttcaataaaattataaaatcaacttattagttcctactaaaaagcctgcttgtattttgattggaattgtgttgactctgtagatcaatttagagaaaattgatgtcttaagaatatggactcttccaatccttgcgtggtatatttctccatcgttgtatgtctcctttaatttctctcatcagcattttgtattttcacgcacattttcaaaaattaaatttattcctaggtatttgacgtgttttaatgctactataaatgagcttttaaaatatttattttccaaatatttgtttctaattgatagaactatagtagatatttgtaggttgaccttgtattcaaattcacttattctagtagtttgtagattcctttgaattttttatgtctgtaatcatagaagcattctatgcttgtgcagataaagcatttttcagtgttaaaagttttattgacttctttttctggagtttccatcttctcattttgtcttctccttttggtatcaagtgctaagaatagcaccacttggaaata

SEQ ID NO: 16541 - DNA, 2300 bp, Homo sapien
ttcaacctctagcaaatagacgttgaatccagaagaatttccaggattcttatttggtgatttctagggtccaaggactatcaactggtgacgtggtcccgggatcagaccttgagaatgtggcgggtggattcccagatgcagagggtatgtatgcagtgctattgtggagaaatgtacctgaatccaccaaaaagtgtaagattcaggatttgcggaaattagaggttacaggataaacaattttttttttttttttttttttttgagagtgcgtctcactgaatcgcccaggctggagtgcagtggcacgatcttggctcactgcaacctctgcctcccgggttcaagcgattctcctgcgtcagcctcctgagtagctgggattataggcgcccaccaacacactcggctaatttttgtatttttagtagagacggggtttcaccaagttggccaggctagtcttcaactcctgacctcaagtgatccacctgcctcagcctcccacagtgctgggatcactggtgtgagccaccttccccggcaggatagacatttaatacatacttactggttggctgagtagctggtgtgtaccacaccaaggctttgaggtctttaagaaccaacttcagtattcagcactttaaggccagagagcctctaaatgtctttcccctccttattctagcataagatagtatgggtagctccctgagtatgtgccctgtgggttcatttctttctcttctaaatgggctaagaagcctacccttgtacgctgcaaatgcttggaggcttctacatctatcagcaacactgcttttatgaagctgtttgtaattttttcccgataaatgatatctgtttcttacatgaaccacacacagtagtacctggcatgagctgctttggtggcccttgctctgctctgccttatcacagggttctgtcctctcctcatttgatggctaaatttcttgacagtgggaaggtgtctcacttgtattggatctcccacagcgcttggtacattgctttgcacagaatgaatagaaaatactggataaaaatttcaacactgcttagtatgaagtcactcttgagcagtttgatcaaatctcattaccttattgcattttcaatctgttttttccaaaaggtacaatttgcaccaaatgccttgaggttatggttttcgtttttttttttttgagatggagtctctctctgttgcccaggctggagtgcagccacgtgatctttgctcactgcaacctctgcctcctgggttcaagtgattctcctgcctcagcctcccgagtagctgggactgtaggcgtccgccaccatgcctggctagtttttgtatttttagtagagacggcatttcaccctcttggccaggctggtctcaaactcctaacctcaggtgatccacctgcctcggcctcccaaagtgctgggattacaggcatgagccactacgcctggccggttatgatatttttgctcctggattagctgaataactccatcaaagcttggagtttaaattaattttttttctgaggcttgcataaactctgaacatgatgaaaaaatttccagtgttgaataatagagtctgttatccctggtgtttaaccagggagagttggcaatgggtaaaatctattttgattatgtcagctcttggctgacacatccccatcctttgcccttcccatttttaagtcagaactctttaatcagacatgacaatcatttccacggacttctctagaactacatcttctaccctttgttgcagctttgtgcaaatgacatattagatggtgttgatgagttcattgagagtatttcccttctgccggaacctgagaagaccctgcacactgaagatacagatcaccagcacactgcaagccatggggaggaagaaggtaatttgtcaaactgatgtctcaggtaaggtgccactctacgcattgcagagttgtggcagataccccagacctgttctctgtttcattttcaaaaatgctttccaacattgaacttctctctcctgctagccctaaaagaagatccccctagaaatctcctggaagagaggaaatcagatcaactggggctgcctcagaccttgcagcaggaattctccctgatcaatgtgcaaatccggaatgtcaatgtggaggtacttagtttaatcaactgtatctcatgtttgctgatggcagtttgtgggagagggaaccatttcagcaatgatttcagttagcaaatagctt

SEQ ID NO: 16542 - DNA, 2300 bp, Homo sapien
ctctgcgcccagctgaaagtggttctttttttagcctgcctgttctcattgcttttttttctgttatagatctttcttaaaaaatggaagtagaagacttctttcctttgtactcagtgaggtttctcagtggtgcagatctaccctgggggaaaagaggcaagtgagaggcttgtggaccttgataagctgctggatctagcataccccgagtggtacagcctcgggtactgcctgcttcccagagcctgtggtccccatctctcagggggcacattattcatgccctttgggatagggagtcacgttgtgagtattccagagtgttctctgtgtctgagagttctcatagcccgggacctccattcgaccctggtgtaatgattttttttttttttttttgagacagtcttgctctgttgcccaggcctgagtgcagtggtgcagtcttagctcactgcaacctccccctactaggttcaagcaattctcctgcctcagtctcccaagtagctgggattacaggtgcacgccaccacacctggctaatttttgtatttttagtagaaacagcgttttgccatgtttgccaggctggtcttgaactgctgacctcaggtaatccgcctgtctcagccttccaaagtgctgggattataggtgcaagccactgcgcctggcctctggtataatgatcttgataaagcaggttgcattgagggggcttcccagagtcccttgggagccctcgagttctgatgcctccccactgggaaaggtgtgttctcttggactcttaagtaactctgtcaaggaggtagagcaagctcttctcactcactttctcctccagctgatatccttccgtgcgaagaagccacctcctaatactcttccttgcttcatcttcactggtctccaccatttgttctagatgacataagataccttatgtctcaagaaagaacaagacagacaaatagtgtcatcaaaaccaacacagcatatccttggacaggaccaagttctgggcttaatgctgtatgtcctgttagattctgagtcattgctctgtcctactctggacttcttggatcaagtagctccccaaagctgtggatctactatgggcttcctcagtaataaacaccaggcagagggacaggtgtcacagcagtaatgtcatgtgtgctgtgagcaagggcaggaggagacaggaaggagtgctgtcacttcagttctggtttggttcttgattaatgatttattttttaaaagtcagctagaggtgccactgtgtcccagttttccatgtctcagctctttctggcatctcacattatgcctcctgtcttaagtagcccttttgtcactaatgtatcaatgacactctgtattggcagagagggaaaaggactgaggtcacatactgccaagggtgttccctttcccttatcagtgtggtgccagtggccacggctgacatagctgatggggagtggggtgcggggagcatgtaacccttaggacagaattggtcaacatcggggcttattctgtagctggtcttcagctaaggctgtgtttttctaagactattgctcaacaattaaaaaaaaaaaaaagggggcaggcataacagctgaggctgttctaattaggagtgcgagcaggtgtcatttggggatgagaaagggtcaggttgtgtgacaagtcaattactagccagcagtgccatgctcaactactgctctgtaagaaactatgttttcctgctgattctgctcagagtgacctgtagattttttcccctgagattatttcctcaattaggtgactatgatcctgttcccatgtgttaattcatttattttttggcttcattttatctggaatagtggagttggtgcagtcacagaaacttgaagggttctgggcttattcagccagaactcattatccagctcccctggctgtgctctgctctgcttccgaaagcaccaagggcagcagctttcttccctgatttttctttgcagcgggtgcctcccaggtcaaatggaataaaaaaaatgctaactgccttgccaccagccatgacggcgatgtgcggatatgggataagagggtgagtaatctcttttttcgcccttattggtctttgatccctcccagagggtgtgaagatgattttatgagtgccaggacttggcttgagagtctggggaaccctgtgcagcatggtaaatgaccattttaagctcatagtaccagacgatatttgcgtctcaatccagtgt

SEQ ID NO: 16543 - DNA, 2300 bp, Homo sapien
gaggctgaggcaggaggattgcttgggcccaggagttggaggctgtggtgagctatgctcacaccactgcactccagcctcagtgacagaacgagaccctttctccaaaaaaataaaaataaaacatgaaacggtccaggcaacaagttagtcaccgtaatctgtcaacaagtctgtcttcccccttatagccaatactccaggagggaagagaccacactttcttacctctattcatacaatgacttgcacatacaaatagtgataatattaacaacaacaataacagtttattttattttatttttattgatttcctggcttctagaactgaattaatagtttatagttgagcttttctacatcccaggccctgtgcttagttccttacaacaatccaatgaggtaagccatttttcccttctatagggaaactgaagctaaaccagttaaatcaacatttaagagtgtgggactgaaaaggaaacttaatcaccacccaccatgttagtacagtggttctcaaactttttgatcttggaatccctttacactgctgttaaaaattactgaaaatcccaaaaaaactttttttttttttttgacaaggtcttgctctgtcgcccaggctggagtacagtaatgtgatcctagcttactgcagcctccttctgggctcaagccatccgtccacgtcagcctcccaaagtgctgggattacaggcatgagccactgcgtccggcccccaaaaacttttatatgtagtatacagaatttaaaaaatatattcattatttcatttaaacattaaggcccttcacatgaatacattttaaaatgaaaaagaacaatattttcaaaaaaaaaaaaaaacaacaaaaaattctggcaaatctgttttaatgtttggtttatcagaaaacagcggccgggcgcggtggctcacgcctgtaatcccagcactttgggaggccgagacgggcagatcacgaggtcagaagatcgagaccatcctggctaaaacggtgaaaccccgtctctactaaaaatacaaaaaaattagccgggcgtagtggcgggcgcctgtagtcccagctactccggaggctgagtcaagagaatggcgtgaagccaggaggcggatcttgcagtgagccgagatcgcgccactgcactccagcctgggcgactgagcaagactctgtctcaaaaaaaaaaaaaaaaaaaaaaaaagaaaaggaaagaaagcagctggattgcaggagggggtatagctcacaggtagagcattggactacagatcaagaaaacagctggattctcacatttaagtctaccttcattgttacgggaggcgctgctgtattgtatgaaacaataaattgcacattcagacttttaaatatctcgatgggataggcatcaggagaagaggtatcttcggtttgcacgagctttgatttttcttttttctttttttttccgagacggagtctcgctcttgtcacccaggctggagtataatggcgtgatctcggctcactgcaatctccgcctcccgggttcaagcgattctcctgccccagcctcccaagtagctgggattacaggcgcccgccacccggctaatttttgtatttttagtagagacggggtttcactatgttgtttaggctggtctcgaactcctgacttcggcctcccaaagcgctaggattacaggcgtgagtcaccgcacccgccccgaacgttgattttgatttgagactgggtctggacgaatgctggggactccagcgaggagctagtcaggacaacaggcacctcacctcacccaaacccaaacctgcgagcccttcccaggtcacccacgcttgctcgagcttggactacaactcccggcagagctcgcggcagggggtgtgcccgcaatcgcgaggagcgtgggtgactcaaaccaagtgacggaagtgagcgagggcgtgcctgtttgttgcaggcgcggtgtagcaattggaggacccaggaagaaggggcggagcctatgcttgggtcaaccaatggcttgagctcaggagcaaccagggcacggggcgtgtcggggctgattctctggctgtgtggggcgcacggtcccgggatactggggacggcggggtgggagggcgccgtcctggggccgcggcggccgggcgggggagatggcggcgcgatggagcagcgaaaacgtggttgtagagttccgtgactcccaggtgagctagaggccgagtggagccctctgggcatgcgtcctccc

SEQ ID NO: 16544 - DNA, 2300 bp, Homo sapien
tcctatttttacttctcttgcaaaaattcttacttctacagggctgtttgctcacctccaggtatttcatgcttgcaaataggtttcctcctgtttccaggctggccacaatggaacaatcaatacctgtgacgggctagccttgctctttttggttttcttttaatatttctgaacatcctgttttggtcccccagtttagaagtatctggggtcatttaataggtggaagtcagctaagccagggactgtgtgatactcacagccagcacctagcacttgataaatagttgttcagcagtcacagtggctcatgatgtaatcccagcactttgtgaagccgaagtgggaggactgcttgaggccaggagtaccggcctggacaacatggggaaactcccatctctactatatatgtatgtatatacacatatatatatatcatatgtatattttgagacagtctcgttctgttgcccagtctggagtgcagtgacgcgatctcagcccattgcaacctctgtctcgcgggttcaagccattctcctgcctcagctacccaagtagctgggatcacaggcgtgagctaccacacctggctaatttatttattttttattttcatttttttttagtagaaatgaggtttcaccatgttggtcaggctggttgcaaactcctaacctcaggtgatcccctgccccatctccccccacccccccacccccagcctcccacagtgctggaattacaagcatgagccaccgtgcccggcctgattttgaaatttttaacagacttttactcgggaggctgaggcagaagaatcacttgaacctggaaggcggaggttgtccagcctgggaggagcaaggctccgtctcaaaaaaaaaaaaaaagaaaagaaaaaaaagaaaaagaaaaacagggcgggcgcggtggctcatgcctgtaatcctaacactttgggaggccaaggcaggtggattacctgaggtcaggagttcaagaccagcctggccaatacggtgaaaccccgcctctactaaaaatacaaaaaattagccaggtgcagtgtggcatgtgcctgtaatcccagctactcgggaggctgaggcaggagaatcacttgaatccgggaggcggaggttgcggtgagccgaggttacgccacaccactccagcctgggtgacagggcgagattacgtctcaaaaacaaaaacaaaacaaaacaaaaaaaacagttgttcaataaatgaatgtgaatataggagaaagacggcttgaggtagcaaaggaacactcccttgcaaatgattcaggcttggtcaacaatacacctattgagtacccaccgtgtccttggcccgtggtgagggccgaaacacagcacatggtaaacaaaacagggctccagccttggacagaaggtttctataatcacttctagctgcgttgttctatttccatacccatatctattcactttttatggtacatctattgattctgaaaattacattttagctaaggaatctactcatttgcttaagcccaaaataggaagttatgatctagtgtcagcaaaacgccggattcacaagtgtccccatggcgctgtttacccccaaataactaaaccccgccaaatgttgagattccggacgtgaggggtgcttggatggggaacccccgaaagaatggacatcacgtccaccagagggtgctgtgggggcaaatttgtgccaggaggggagctcgaccggtgaccctcagagccaggtaggcgtaaggagtaaatctccttcttcccggtgtttccttcccaccccctcgaaccattgctgcccctcccccatacttggttccccctgaataatttgccactttcggggacttaagaagtgtttgcttttgaaagacatctggtttctgtggctaacgcccagtggtcaggccgcccaggtcacaggccggccgggggcgggcggtgggtggggactgctggggcgtcagcggcccaggcgccgcagggaccgcgaaagggttaacccggcggggggagggggagggggcgcgggccgcgcctgcgctctgccgccctccattgtctccacggcggcgaggagcgccggcgagcgcagcccgggaccgagcggggcggcgcggctggcggggccggcggcggctgaagcgagagcgcgacgcgacgcgaccgcggcttcccgagctgcgcctggccgcccagcgccgcggcccgcccgaggcctggaggggtccgggccgccgtccatggtcg

SEQ ID NO: 16545 - DNA, 2300 bp, Homo sapien
cccatgtctctgttccaaacctcagctctaggcttcagcagcctcctggaggtctccatcagctggccgggcctcctcccacccaactcagaatccgtcccttccttctcatgctttcctcctgggcaccctcccttagtgcaggcacctgctgtgtgtcccgctgccctcatccgcacacgcagggctgctgcgcactccttgttgtcggccccagacaccacagcagaacacaaggctgttccctgtgcccagaatctcccgtccccaccccagcttcatccatcctccaccttctccagaaccttcccagatcagcccccatcctgatgaggtctctttccccataccctcagccctgggcctgcgcgtgagaagatgtcctggaagtcctcatgctgtgccttttgatttccttgttcggcatccctgctagtctgtgagctgcttgaatcccgagatcatggctattcactgtcgccggcacgcagaatgccataggacttaataaaaaccagtgggttcccatgggtgcaagtagcttccttccattccttctttttgggatggtgagcggggtcacttttgtttctttctttttaaacattgagatgaaactcaccataaaattaaccatttttatatgtgcaatttaatagcatttaagacattcacaacccccatctttatctggttctaaacacttcatcgccccaaaagaaaacctctggtgtgattccacttacatgaggtagctaaaatactcaaactcatagaagcagagagtagactagtggtggccaggggctgggcggggggaaggggagtggtggattaatgggtataacattttagttatgcacgatgagtaagttctagacatctgccatacaacatagtgcctacagttgacaatactatgttgtacacttgaagatttgttaagaggatagagcatatgttagtcttaccacaataaaataaagtttttaaaaggggaaaaaacgggtcaggcgtggtggctcacacctgtaatcccagcactttgggaggccaaggtgggtggatcacgaggtcaggagttcgagaccagcccggccaacatggtgaaaccccgtctctactaaaaatacaaaaactagccaggcgtggtggtgggcgcctgtaatcctagctactcgggaggctgagacaggaaaatcacttgaacccaggaggcgggggttgcagtgagccgagatagtgccactgcactccagtctgggtgacagagtgagactccatctcaaataaaagcggggtggtggggggggagaaaaccccctacccattaagcagtcactccccatatccctctgtccccaatactgatctcctttccctctctatggatgtatctattctggacatttcatataaatgggttcatacaataggtggtttcttttactttgtgtagtatttttgacgtttatccatgttttagcatgtggtggttcttccttttcttggcttagtaatattccattgtgtggatacatcatcttttgtttatccgttgcgcagtttgtagacactgggttgtttccacctttgggctgttgtgaacaatgctgctgtgaacctccgtgcacaaggattttcttggggacctgtttcttcctctcattcttgcctcctaccactctacccattaccatatttttccaaaccagacatcagcacactggctacgtgtgtgtttaggaaagcatctgtggagggaaacagcttgcctcatgctgcccctgcttcctgtctacccttctccaagcctttttcgtccgctgtcacctaggcttttggttaatcacatgttgagattaatcccattttgtctttgggtaattaacatgtgatgtccacgcattatctccacggtgaaagtcttaaggtcaacgtccctcttggggttctgtgtcccctgcagagccgggcacagcttggggcagctaagcagtcccctagttcctaggcccttgcttgccccatgccacctgtccactggtgactaaccctcctgcactctcccctgtcccccttgcagatgatgtgctgactaaagacgcgggtgagtgtgtgatctgcctggaggagctgctgcagggggacacgatagccaggctgccctgcctgtgcatctatcacaaaaggtaggaggggttggcaaggtagcttagtgcaccccacctcccagaggggcggacccccatctccagccattctgtctcctttggttatgggatgacctctcccccgac

SEQ ID NO: 16546 - DNA, 2300 bp, Homo sapien
gaagtgaacagatcttgtccggaacaccctgcggactgacctgcgggcttgcttgctgactcctctcaaaggtgagcccgcgtttgggggtgctccgggctcaaggcttggggtcaggtcactttgggggcctgcagtttagggagccgggctgcccttatgccactgagaagaaagcaggagcagagggaaggagcacctcatcagtgagcagttagtcatccggaaatgattttccctgggaaggacaagagatacaaaccaacatggacagttatgaagaacaggctcagaagagttaggatcagttggggaagagaccagtacaatctacattcctaaagaaagttcaggaatatcccctgggaatgtgcacgggcaggaaaaggagcctgagcggtgggtttgtgcctggcttggcctcatcctcgctcacctctgagtctccgcctcttctatggtaacggggataatctcactccctgttgccataaggacattgcacttactaaacagccatgggcagtgcattgttccctgcaaagtgctggtcagcgatcatttgaccactgcttcttcccatgccgcttccagatgaatctgaggcctccaggccagactcgatccctctatcccacagcactgggtgctgactccacacatccccctggcttaccgctgggtctggcctccccatttctcccccaggggtaccccacttgctgccaaccatccacccctgacccccatctcacctgtcccctccaagttctgggctggcattttcctttttctggcaaacaagtagacaaaacccccataaaaaccaaaagcccaactccatctcacagccaaaggttttgggacctttttcttcccccctccctttctctctctcttgctttcgttttcttttgttaggtttattttatttattccaagtaaactcccagaacagctgatgatgtcagacaaatcagggacatttgctctttttacctccacctcaaaaactgatgacaaggggagaagaaagagccaggggggagagtgaggcaggggagtagaacctgcccaggcacatggctgcaaattccccgtgtgctgtttggcttctggggtcctgtgtagacgccccagccccgcctgccctcttgggatgcagctgccctgggatgagcagacagccctcggcccgatggagcacgacttatttattacggtccacacagggacagagcgcccctgctccagggaggaggctcaccggaccctggggcagagctgagcttgggacaccagcgggaacagggcaccccttctgcactgacttccagatcatggttctcccttcctccctgaggacaccaaattggatgagagcaagtttgagagaagaatgaatcaactgctatccttcccctcacccctcagcccaggagggaaagggcattttctttttcatctttgaaaggcattgtgggtctgtctttaaagtgtttacaaaaaaaaattatataaaaaaaaagtctagtgtcgactggtgttttccctcgtgatgtttacagcttgctgtttgctgcccagccataacccactcagtgacagacgaacacagctaaggcctcgctgccagccttctgacggcgggcgagcacacggtctcttcccctgccccaactggccctctccaccaccaacttctctactttgggtttgtttggttttttccctctatttttctggctggttttttgctcttttctccccttgagaccctaatatcttgacttcattgccaaaaaacaacccattgagaactttcttcctactgatcccatctcttttcccttctttcctcctggttccggtcagttcagaggatttaacaatcacaagtgtcctgcaaaaatgcctgaacattattcttaggccctcgtggattttttttttcagaaaacttaaacaaaaaaagacttactaagaaatatgtacagctacccctgttttcaggcactatgtttgagaacattttagccattgatgttcacacgtggcatcagcccatgcaagataggtttctgtatttatatattaaaatacaaaaaaaaacttataaaatgtttaaaaaaatgttcaaagcttgggagaaaagctttcttcattagtcaaggtgttttgatatggtattaaaatgtctaataaaagatggcactgcgtgattttattttaatgaagtgttatacaatcaagaaatgggggcaagggcctgccccccactccctcacctacctccttag

SEQ ID NO: 16547 - DNA, 2300 bp, Homo sapien
cagaggtccctgtgggggctgggggagctgccctgcaggtcttggcacatgcacagcaggctccccatagctttgtcaccacaaagggcactgttctattcacagcacctcctgcttctgcctggcaactgtgtctccctgtgctatatttaattccaccagcaaagctggcgaggcagggcccagccctgaaggagatctccttgcctgacccctggacctggaaatggaggcttcatgtgcccgccttggcggcttaagcctgctgctttggcagtgccatgggtgagccgagcagctgtgaggtgggtggggcagggctgtagcccacgccgggtgctattccaggctctaggggctggtgctcatccccacccccagcgacttccgtcctacctggcatgctgcagccctctgccggctgtggtgtcctctgaatttggacccaggttgcctgctcttgttgtgggggtgggattggggctgtctgtgtttcccaggtggagctcatgtttgtgatcctctatctggacagctctccagaatcctgtgttgcccctgttctgcctttctgggatgggagagaaggtgagggagccggcgagcaggttctaccctctctgctaagggcctagcacactttgatgaggttcctggacgtgagaccctcacaaagaccaaccattcctctaatagccatttaacggtactgcagttcatgggaaaatgtcctcattcttaggagatagatgctggattatataggtgaatgccttcaagaaatgtgtaatttaattccaaatagttccccccaaaatacacaaagcaaataaggccaaaatgttcattgttgaatctgcagtggctggtatttcagtgaacagtgtacttgttctttcaacttttctgtatgtttggaatttttcttaataaaagattgtgggaaatggtcatttgctgagcgcctcctagttgccaggcactggagggcgcatcaaagaagagtcctacccaggagggagagcgcagctgctgcaggattctcgcctggaagagtgggtggctggctggctggctggaaggggaggggcgagagggctgtctcggtgatgagcacacgcgtgctggggtggtttggggagagggctgagatttgtcaccagtgagcccttggcacggtctctgctccccaccagggcagcacgggacagaaacgtcacggaggagtagcctccaggctcaggttggtgtaactgctgtcggctggagcccagtattagcacggaggaggggttccaagaactgaagttggactggggcgtctcagcgcagctgcctctgcctaaggcctagcagcctgcctgagcactgacagctgatgggaggaggagaggggcggaggccagggagggcgtggggtgtgacatgcctctttccaaaagggaccgaaggctagaggggcaaggaagatgagacagcactgcaggttcctgggacctgcaggggatggaggactagcttggcttccaggctgccaggacttacctgaccctaggaggaggtttgcccagggctgagtgccgcaggccctgggcagaggagtcgtgagctgcagatgccgcgtggtatctgagcttcatgatttcgggcgccctcctgtgggcttaggggggaacaactgccaaggtctcaagacgggctccggcccaagacaggggcaggccctcgggtggacagaccttgagggcaaaacagctggtggtacgatacatcaccccatgaagaggtgggtgcaaaaatagtctcatctctgtttctagagacgtggcagctgctgaggaacacattcagtgtgttcagaggcccggttcaggcccagttggggagcccatcctgagtgacatgtgccgtgggcaggtcctcagctctgaggcggagtagctgggacagggacctgggttcctttccgaaccctgagcaccaacctcctccccaggctataagaagtcagaggacagccccaaaacaaaggggtcactgaccaaaggacagagaccctggagggggaggggaggaagtgctgcctgctgacttccaggtagctgtaggtgggtttcaggtttattacagatttattgggggaggccccaaggagaagacctatcatcatgtcacgggagctcacgttccataccaggaaaggagtgttcctgtcaccaggtgaagggggaagggtcctgggaccccggcagtgggaggcctcggggaggggtgtcatcagagtcttgaatggacccaga

SEQ ID NO: 16548 - DNA, 2300 bp, Homo sapien
aagaatgggaggcaggtttgccttaagcagttcccagcttgacttttccctttagcttagtaattttgggggctcaagatatttccctttcagacctcttcagtagaattctttcttctgatgaggcaagcattgagttttatgtagacctgtatggatttcccaccactcacatgaagaccatgacctgtgacacattccctggaggtcctgagaacatgtacccaaggcagttgagttacaactggttttatacagtttagggaggcatcagacagtaatcaatataagcagggtatgcattggttccttctgattgagggaggagcttacaggtcataggtgaattcaaagacttttctgattggcgctgggcacggtggctcacacttgtaatcccagcattttggggagccaaggcgggtggatcacttgaggtcaggagttcgagaccagcctggaccaacatggtgaaaccctgtctctattaaaaatacaaaaattagctgggcatggtggcactcctgtaatcccagctacttgggaggctgaggcatgagaacagcttgaacccaggagatggaggttgtagtgagctgagatcacgccactgcctgagcaacagagtgagactccatctcaaaaaaaaaaaaaaatttctgattttcaattggttgaaagaagttattatccaaagacttggaatcttggtatacaacaacaaaattttttttaaataaaaaattttaaaaaagacaacctggaatcaatagaaataagcatctgggttaagataaggagttgtggagaccaaggttctttttttttgagacagagtctcgctctgtcgccaggctggagtgccgtggtgcgatctcagctcactgcaacctccacctcctgggttcaagcgattctcctgcctcagcctcccaagtagctgagactacaggcgtgtaccaccatgcccagctaatttttgtatttttagtagaaacggggtttcaccatgttggccaagagggtctctatctcttgacctcgtgatcctcccactttggcctcccaaagtgctggcattacagatgtgagccgctgcacccggcccaaggttcttattatgtaacatagatggtaaatgtctaaggcgttaaaaggtgccagactcttagttaaatctcccttagatcaggataaaacctggaaagaggctggacgcggtggctcatgcctgtaatcccagcactttgggaggccaaggcaggtggatcacgaggtcaggagttcaagaccagcctggccaagatggtgaaaccctgtctctactaaaaatagaaaaattatctgggcacagtggcaggcacctgtaatcccagctacttgggaggctgaggcaggagaatcgcttgaacccagtgggtggaggttgcagcacgctactgcactccagcctgggccacagagtgactctgtctcaaaacaaaacaaaacaaaacaaaaaacctggaaaggggaggggattctctacagattctagattttccccacaaaagacagctttttggagctatttaaaaaaaaaatcagaggaatatattttgggggtaaaatacattgatttctttcagggcctgctatctgtcaggtgatgctagagtcaggttggaatttggtatcttattgctacaaagagtctgttttgtgtcttaagatcagaatgccttaaggtctctgttttaatgttaatgctggtcagttgtgtctgaattctaaaggaaggagggggataatgaggcttgtcctaaacctcttcccatcacagcctgaattaatttttcaggtttattttggaatgccctgggctgagagggaggtccattcagtcggttgggaggcttagaattttatttttgccttacagtttcccaaaacgtccagtgaacctcgcctctcctttagaagtgtcgtccctggagcccacgaaaatgtctgcaagatctgcaagggccaccttaaagcccgtgccaccttaagcaggccccacccctggcctagccaatgggctgacagcagcagtagctgctgccacagtagctgactggtcaccctgccacccagtgctcacaccctctggccagtgcctggctatggcccgactgctcaggtctgcaacctgggagctgttcccctggaggggctactgctcccagaaggcaaaggtaccgggagagaagagaagtcctctggagggatgaggtggggagcggggagcagggggttctgatcccaagtttcctggg

SEQ ID NO: 16549 - DNA, 2300 bp, Homo sapien
aaagtgctgggattacaggcgtgagccactgcacccggccgcaaccatacgatttacccaaatgaactggaaacttatatcctcacaaaacctgaacacagatgtttagagcagctttattcatagttgccaaaacttagaagcaaccaatgtatcttcagtaggtgaatggatttaaaacactggtacatgcagacagtagaatattatgcagcactaaaacgaactgaggctgggcacagtggctcatccctataatccccgcactttgggaggccaaggcaggaggatttcttgatcccaggagtttgagacgagcctgggcaacatggcaaaatgccatctctacaaaaaatacaaaaaattacccaggcatggctgtgtatgcctgtagttttagctacttgggaggctgaactgggagggtcacttgagcccaggaagtggaggctgcagtgagccatgatcgcaccactgcactccaacctgggtgacagagtgagaccctgtgtcaaaaaaaaaaaaaaaaaaaaaaagccagggtaacttgagggaaacatgagggaaacttaaatgtatattactaaatgaaagaagccaatctgaaaaagcaacatatgtatgattccacctatatgacaacctgcaaaaggcaaaactatggagacagtaaaaatatcagagatttccaggggttgtgggatggatgaataaatggagcacagatgattttttggggggcagtgaaactattctgtacgatactgtaatggttacaggcatttgtcaagacccatagaatgtacaacatcaagtgaacactaatgtaagctatggactttgggtgccaatgattttgttttttaatttatactttttgagacagggtcacccaagctggagtgcagtggcacaatcttggctcactgaaacctcagcctcccaggctcaagtgatcctcccacctcagcctcccgagtagctgggactacaggtgcgtgccaccatgcccggctaatttttgtattttttttttttttttaagagatgaggtttcaccattttggccaggctggtttcaaattcctcggctcaagcaatctgcttgcctcaggctcccaaagtgctaggattacaggtgtgagccactgagcctggccaggtgctgatatttaactgtaggttcaccaattgtaacaaatacactgttctggtgtgggatatcaactttggggaggttgtgtgtgctggggggacatgggttatatgggaattcaatgtattttctgctcaaattttgctgtgaacctaaaactgttctaaaggatgaaaggaactgagggtgaagggaaatgggaagatggtggtcaaggggtacaaagtctcagttatgcaagatgagtagttctggggagatgcacagctatgtgacgatagttgacaatattgtgtacttgaaatttgctaagaagatagatcttaagtgttctcatcagacaaataactatgtgaggtgatgcacatgttaattagcttgattatggtgaatatttcacaaatgtagatatcaagttgtacatcttaaatatatagatctcaacaaatatatatacctcaacaaagtggcctgggaaaaaagggaaaaaagctagttgcagcacatgatacctttatggccagttttgtaacaacaacaaaaaaatcaaagtgcgaacttaatgttatacgcagttaatctttagaaagtgagattatggatactttattttgtacatatattctaattaaatacagttatagattatttgtgtaatgtttaaaagccaagttgttgtatttaagggggaggtggtgaattgtagttcacgacccactctgggaaaaaagaaaacagtgcaggctaaggagattattttggtcggctcatcagaccgcctaacaaggcgaagactttcctgagagtccctaaagccgcggccccggaggcttgtgggaaatgtagtcccgaacgtggatggtccacccctccgaggaccctgggaacggcccgcgcccctgtttctgcgcatgtgcagtgctgcgagcgcgccggtggccgcccttcccccaccaccagcggcgagtgggtgacagagcccccgtctccgcgcgtcttcgccgccctgcgccgtgacccgctgtggcactgggccacgagtggaggctgcgcccctccaggtacgagaggggcttccaggtagctccgcgcggcctggggccgaggggaaggagatgagggatgggctcgtgcccgcgcaggg

SEQ ID NO: 16550 - DNA, 2300 bp, Homo sapien
ggagcagtggagtgggaacacctgtgcgtgcctgtccccgaccactgctgcagctgcacggttcccacaagcctctgtagcctttgcggggttggggacatggcgggtgacgtcctggccagcggttagctcctaaggccacacagctggggccacaggtcactcaggccaggtgagggcttgcgccctttcccccatctgccccagccagcttatagctaggggctgcccctgaggctctagtaccgtctccttagggccctcctgggcccgccccctcgacttctgagctcttcgctgccctagggacgcagacctctttgggtcctgcgaccccaggttcgtttcctctcctccgagggtgctctggactgctcccacaaactcctaggctgtttgcttaaatctccccttcagagtgaggccctcctggcctcagtatcagtaataataatgagaagaagaactctttagctgctggtgtgtgtattttacttattttaaaaattgactctcttccctaaactctccagcctcctcccggctgtcagctgccacacgcaggaatttgttggttttgttcagctgttcccgtgggcctggtgggcactggctggcaggaagagcccatgtgcatgcagaggtgggtgcgtctcatcccgaccaggccatgctccgtcctgctggtgcccgccaacccctctgtcctcagacaatcttctagaatgagcgaagggcctgaacaggtgattcactcaagaaagaggaatgtaggggccccgccagcgtggattgcatgcttggcctggtcctggtgctcaagaaggctcttccttttgtcatgggacccatactctaagcatcctcaattacatacaggatcagagagggcaagtcatttgcccacggctccacagctgcctgaccccacaacccgtgctgtaaacacacatgctgcaggcatcagtgtggtggaattgaaaacagccacgaggcaccttttcctgtgcattttggggaacttgccctccatctggcagcctcaatccaaaatttctccctcccccgtttcccagttgctgagaaagggctccaccacccatgctgccacccgcacgaggaaccaggtgtccccgcccatgctctgccctgaggctcagcctccatcagttctcatcagggcgatgccaggcccccaggccgggccctaggcccagtcttgccctctgatgccacctgctcagctccagggcccaggtgtgctggcgcctgtgtgcaggggtggcccagtgtgaggacagcaggtagctacccctcccctgtacacagcccaagtgaccaacacagatgtcgactgggccttcactgagccttcttagccatcccctgggacccggcgagcacccgcaccccagcctctggctacaccatggggcacaggcctgctcccccagcctctcctctacttggtcacattgcccattgggtttttttctttttttttgttttttttccttttttgagacagtctcactgtcacaaggctggagtgtagtggcgcaatctcgtctcactgcaacctccgcctcccgggttcacaccattctcctgcctcagcctcccaagtagctgggaatacaggtgtgcgccaccacgcctggctaattttttgtatttttagtagagacggagtttcaccatgttggccaggatggtcttgatctcttgacctcgtgatccatccgcctcagcctcccaaagtgctgggattacaggcgtgagccaccatgcccggcctgcccaggggttttcaaaccatgaaaagatcaagtgaattctttgcagagcacaagagactcagctggggctcaaacccggggatgctggactcagcccctggaggcccctgcccaagcctgggcctggaggagaaaggcaatggtcgaaggccacctgggttagcccggctcagctaaggccacagctgctgccatcccaggcttcctggccagccctgcaccgacacatcttgcccactcccagggaagggattatcgccccaaggtctccagataacagcaggcacacagggctataacggggaccggcagacaggcgtcctacacccctgccagcggcaccatggctttcctctggctcctctcctgctgggccctcctgggtaccaccttcggtgagtgccaggccctgcggaggccgaagggttttctcctctcactcccagccccgaggccagcaagaggcagcagggtcccagctcccagttcagctgtgcaccg

SEQ ID NO: 16551 - DNA, 2300 bp, Homo sapien
ttttctgtttctttaaattgtagctatcagcctggtgtgctggctcacgcctgtaatcccagcactttcggaggccgaggtggctggatcgcttgaggtcaggagttggagatcatcctggccaacatggcaaaaccccatctctactaaaaatacaaaaattagctgggcatggtggcagacgcctgtaatcccagctacttggggggactgaggcaggagaatcgcttcaacctgggaggcaaaggttgcagtgagctgaggtcacacccctgcactccagcctaggcgacagagcaagactctgtctcaggggaaaaagaaaaaaaaagggtaacatggtgatgtgaacttttgaaattttctctttagtatataagtttagttttgctttatagttgtgcattctccagcagcggtgggagtggggaggggatattctaaatgccaaggtgacctggcccgctgaccacagagcccaaggccttccatggaaacaccatccacccactgtgtcttactttcataccctcatcgtccggaaatgcagtacagcctgtcctgtccagccttgccccaggtgactgtggtcactatattacatgctcatctgtgtcgtgtgtgtctgtcatgagcgtctcaggcccataagggcagggatgctgcgggctctgtcccctgaatatctgcccacagggtgctgaggatcccttggccttcactttctgcccagtcaccgacctgtcacccacacctgtctttcctccttgttttgtgacaatgaaaaaagtttttctgcttcctcaaaatttattttcagacaggcgcagtgactcacgcctgtaatttcagcactttaggaggccaaggccacaggatcacctgaggccgggagctcaagaggagcctggccaacgtggtaaaaccctgtctctactaaaaatacaacaattggccaagtgcggtggctaacgcctgtaatcccagcactttgggaggccgaggaaggtggatcacccgagatcaggagtttgggaccagcctggccaacatggtgaaaccccgtctctactaaaaatataaaaattagccaggtttggtgctatgcctgtaatcccagctactcaagaggctgaggtgggagaattgcttgaacctgggaggtggaggctgcagtgagccaagattgtgccactgcactccagcctaggcagcagagcaagaccccatctcaaaaaaaaaaaaaaatagctgggtgtggtgggcacctgtaatcccagctacttgggaggctgaggcaggagaatcagttgaacccgggaagaggaggctgcagtgagctgaaattgcgccactgcactccggcctgggtgacagagtgagactccatcttaaaaagtttgttttctgtgtcattttatggtgcggaatccaagttccattttgtaagaaactgaaactttatgaaatgattagttccttatatcatgagtcattgcagaaaaagtgaattctgttgggttctacagcacaggtgggacgcgtgtcagtggctttgcccacctgttacggccaccagcgggttggtccttgtcacccagaccctcgccacagtcagaagtggcttggcttcactggtgacttgcagtgacactctggagaatccacgatgccctgagtcaccctttgcttctaggacagtgttaggcggaaacacccttcactgagagcctgagttcccggagacctggttccatgacagcagctggtcctccacgagccctggggtggaactgcctccacttcccctctgggaacagaagagcctggtgccgtctcctggcagggatactgcagctcacagctggctctgtgggatcatgtccccaaggctgaccggtgatgtcagcgcagctgcccctttcccagggactggggttgtctggtagagagccaggcggggctctgtctccacttattgcccaaggtccctgggtaacagggagggtgggctcaggcctccctggctgggggagcggggggggctgggctccctgcccccccaaggtggtaaaaggggccccgcagctggcaggccccacaccttctgaggcagcggcatggcttccctctggctcctctcctgcttctcccttgtgggggccgcctttggtgagtgctggtgcccgaggggtctgtcctgagggagccctgagcctggctgagagggggatctgagtcccctgctctgccccctggggcctcatccccagcacaggtaacctgagggctcaggagag

SEQ ID NO: 16552 - DNA, 2300 bp, Homo sapien
actcaaatcttctcacttcctgcatgttgacgtggagtttcagctcattcacctgcatttttataatgcgtgctctgttgtgtgagtatgccaccatctagttctcttatttatttatttatttttttagatggagtttcacacttgtcgccctggctggagtgcagtggcatgatttcggctcactgcaacctccacctcccaggttcaagcatttctcctgcctcagcctcctgagtagctggaactacaggcatgagccaccaccccagctaatttttgtatttttagtagagacagggtttcatcatattggccaggctggtcttgaactcctgaccttgtgatccacctgcctcggccttccaacgtgctctttctcatttttttgctattacaataccagtttttgatgctctgaaacgtcagggaggcaccttgcctgcctgtgttcctgtgggcaggagacgcaggggctgccttgtaagcaggcgaatatgaccccagaaggggacagctggtctgagggacgcgggtgtgctcaaatgtaaagcccagtttgttgggttggcccgcgcacaggagtcgagaatctggtcctgacatagcagaggcatggtgggcgtgtgtggaacacctgactattttcattgttttgttttctgcttccaatgtgccattttatggtgtggaagtaaagtccagctgtgtttgttttgattttttcttgagatggagtttggctctgtcacccaggctggagtgcagtggcacgatctcagcttactgcaacctctgtcccccaggttcaagcgattctcctgcctcagcctcccaagtagctgggattgtaggcctgtgccaccatgcccggctaatttttgtatttttagtagagatggggttttactatgttggccaggctggtcttaaattcccaacctcaggtgatccaccccgcttggcctctcaaagtgttaggattacaggcgtgagccactgtgctggccaaagtccagttttattaaataagaaaccaagaccggatatatgggggctcatgcctgtgatctcagcatgttgggagatcaaggcaataggattgcttcagcccgggaatttgaggttgcaaggctgggcacggtggctcacgcctgtaatcccagcactttgggaggccgaggcgggtggatcacaaggtcaggagatcgagaccatcctggctaacacggtgaaaccccgtctctactaaaaatacaaaaattagctgggcttggtggcgggcacctgtagtcccagctactcgggaggctgaggcaggagaatggcgtgaacccaggaggcggagcttgcagtgagccaagattgtgccactgtactccagcctgggcaacagagcaagactgtctcaaaaagaaaaaaaaaaaaaaaaaaaaaaggaatttgaggttgcagtgggccatgatgacaccacggcactccagccagggtgacagagcaagaccctaactggaaaaaaaaaaaagagaaacccaaactttacacaatgtttcctgaaattgtggaattcaacctgcccacccagggtccacggtgccatttcactctcccgtctgcaaattgtcagagccccagattcctggtggacttggggttatcagattttcttcccacttcccctctcgccaccagtctaacaaaggcacgtgggccagtggagctcacgtggttctgctgccctttttatagctgaggacaccaaggcctgagtgctgccctgcccggtctagggtcacacggcaaggaaagtgtgtcctcgaggctgagcccaggcagtcttacagcccggcctgttttctgcttcttcaggctggacaggccccaggtaggaggagacatgacgctctgcatcctggaaggatgactggagccagcaggccgagagttgggaacgtttgagcctagagacttggggaccagggaggcggaggcggcatgtgccagggaggtcctgagctggcttcagtggactggggtagaaccgggagagctgcacgcaggcaggtgaggcccaggtgggtttggggcctcagcccttattcaccccactcccccccaggctgcggggtccccgccatccaccctgtgctcagcggcctgtccaggatcgtgaatggggaggacgccgtccccggctcctggccctggcaggtgtccctgcaggtgagggggttctgcaaggtggggggcaccctgggtaggggccaggctgggggtgcccccgggtgggaggtgctgac

SEQ ID NO: 16553 - DNA, 2300 bp, Homo sapien
tgtgggcagcagactcccaggcctccgacgtggcctcttgtcctgtggggctaggcgccccagtaacggggggttccttgcctgtgggtagtgccctccagagccagggcctcagcccctcaccccaccggtgtcatcagctcatacccatgctcctctgtggagccttctgggtcagcaggctgtagagacgttggtgtcctggcccaggacgaggcagctctgaataaaacccagagttcttgccgtacctggcactgcgttctgctagaggaaggtcagatggtgcagagggggtgagaactggcatccttggggagccccgtcccttccacctggtgtgccctgcccacctcctaaaaggacgtggctcccaggtgtgagtggagcctccctaagggctggtttgagggcagcagtgaagtcggctctctgcccccaggtggtggtgcccacccgcgtggggcagggctatgtatacgaggccgcccagccggagcaggacgagtacgacatcccgcgacacctgctggccccggggccacaggacatctatgatgtgcccccggttcgggggctgcttcccagccagtatggccaggaggtaggtgtggggtgcgcagcggtgggagggcagggcggcaagtctgtgcctctgcttggccctgggccgagagctgcatcttctcagccccggccaggcctggggacggtgctgcggggttcccacctttcctattcccccaagtggccctggcgccgttaaccctgcactgtttctgccccaggtgtatgacacaccccccatggctgtcaagggtcccaatggccgagacccgttgctggaggtgtatgacgtgccccccagtgtggagaagggcctgccaccgtccaaccaccacgcagtgagcaaatgccagggcaatgccagggccaggctgaggctgtggggtgtctgggtgtgtgcacaggggtgctgaccagtgtctgcagggctgggggtggcgggcaggaagagactggctccagaccctggttctggatggttgacagatgaggaaatcaagctgtcttctgagcctcaggttctttgtcggcagaaccgcctgttgcgaggccttctccatgagctcctgagagggtatccgcaaggtgaccacgggatgtgtcatctcacctgggatacttccaagagtgaaggggggactagtaattatgtgggggcatcagggacaaaccagcactgtcctgggcaaaccagaatttggtcccctgataatacacacagagctcagtcgcacacctgctgcagagtagaaagttcacacgtggtggtggtgctgggtggtaacagtgatggtggtgatgaggtggcagcggcggtgatggtgatgaaatcatgatatgatggtggtggcagtggcagtatcacagctaacctttcagtgagtgtctgcagtgacacaattatgtgaattaacacatgcaattctttgggaggaagctctcccaccttcaggcacaggggtggtcacctggctccagagccggctcgtcccagagctgtcatggataggaattgtgaaggatgtgtgtgctagggctgcgagtgtgtgtgcgcgtgtgtgtgcctgtgtgcgtgcctctgcatttgtatgtgtgcctgtgtgtgtgcgcgtgcctctgtgtgtgtgtctgtatgtgtgtacgtgtgtgtgtgtgtgtggctgggtgctgcccccagtccctggggtgggcagatggacagatggacagtcttgaccaccgcttgtcccccaggtctacgacgttcctccatcggtgagcaaggatgtgcccgatggcccactgctgcgtgaggagacctacgatgtgccccccgccttcgccaaggccaagccctttgacccggcccgcaccccactggtactggctgcgccccctccagactccccgccggccgaggacgtgtatgacgtgccgcccccggctcctgacctctacgacgtgccccctggcttgcggcggcctggcccgggcaccctgtacgatgtgccccgtgaacgggtgcttcctcctgaggtggctgatggtggcgtggtcgacagtggtgtgtatgcggtgcctcccccagctgaacgtgaagccccggcagagggcaagcgcctgtcggcctccagcaccggcagcacacgcagcagccagtctgcgtcctccttggaggtggcagggccgggccgggaacccctggagctggaagttgctgtggaggccctggcacggctgcagcagggtgtgag

SEQ ID NO: 16554 - DNA, 2300 bp, Homo sapien
tgcggggggctctgccaggcctgcggctgctggggggtgctggcgcctctgccacccccatgctcagcgcccccctcacagcaccctcagcaagcagggctggctgcctgcctgcattgggagggcctctaggggttcaggggcactgggcccgggggaggggctgctttggcgctgctgccctgggggatgtgcggggaggccctgagtcaaccctgtcccagacatcccctttgatgaaggaacaaaaggtctttcagtggagagagctgaacagggagcctggtggtggaggcgtgtgggcgcagtgtgcccgggggctggagaatcccaccagggaggccttgacctccccaaggcagggagaccttcagggaaggaggctgcctggcatggcccctacccgcttcaggctggtgctggtgaggggtcctgtggccctgggcaggccattgtgctgcctgcctcttcacccactgtgcgggccttggcttccctgggctctgggtcatggtaagagcacctggggaggggagggctggccctggacccacttcccccactaggcctcatcctttcaggtcgctggggatcttacctgctgcaggcagctcccccggggcaggcgcggcagggagggggccttggtcccagctgctgcgccccccagcacacacccaacctgcccctctggccctgtcctccagagtctccccatgctgtgctgtggggcagggggtgctaggctctatctggtcctgggccggatgcagtcccctgctgggccaacccttctgaggaggctacagctaggtggtgtgggcagcagactcccaggcctccgacgtggcctcttgtcctgtggggctaggcgccccagtaacggggggttccttgcctgtgggtagtgccctccagagccagggcctcagcccctcaccccaccggtgtcatcagctcatacccatgctcctctgtggagccttctgggtcagcaggctgtagagacgttggtgtcctggcccaggacgaggcagctctgaataaaacccagagttcttgccgtacctggcactgcgttctgctagaggaaggtcagatggtgcagagggggtgagaactggcatccttggggagccccgtcccttccacctggtgtgccctgcccacctcctaaaaggacgtggctcccaggtgtgagtggagcctccctaagggctggtttgagggcagcagtgaagtcggctctctgcccccaggtggtggtgcccacccgcgtggggcagggctatgtatacgaggccgcccagccggagcaggacgagtacgacatcccgcgacacctgctggccccggggccacaggacatctatgatgtgcccccggttcgggggctgcttcccagccagtatggccaggaggtaggtgtggggtgcgcagcggtgggagggcagggcggcaagtctgtgcctctgcttggccctgggccgagagctgcatcttctcagccccggccaggcctggggacggtgctgcggggttcccacctttcctattcccccaagtggccctggcgccgttaaccctgcactgtttctgccccaggtgtatgacacaccccccatggctgtcaagggtcccaatggccgagacccgttgctggaggtgtatgacgtgccccccagtgtggagaagggcctgccaccgtccaaccaccacgcagtgagcaaatgccagggcaatgccagggccaggctgaggctgtggggtgtctgggtgtgtgcacaggggtgctgaccagtgtctgcagggctgggggtggcgggcaggaagagactggctccagaccctggttctggatggttgacagatgaggaaatcaagctgtcttctgagcctcaggttctttgtcggcagaaccgcctgttgcgaggccttctccatgagctcctgagagggtatccgcaaggtgaccacgggatgtgtcatctcacctgggatacttccaagagtgaaggggggactagtaattatgtgggggcatcagggacaaaccagcactgtcctgggcaaaccagaatttggtcccctgataatacacacagagctcagtcgcacacctgctgcagagtagaaagttcacacgtggtggtggtgctgggtggtaacagtgatggtggtgatgaggtggcagcggcggtgatggtgatgaaatcatgatatgatggtggtggcagtggcagtatcacagctaacctttcagtgagtgtctgcagtgacacaattatgtgaattaacac

SEQ ID NO: 16555 - DNA, 2300 bp, Homo sapien
gaaggagagccctgtgtcctgggcctggctgctctcccccaggaaacctcccccagtcttgattgtgtctgcttgtattttatgatcacaaaagcaatgcttgtttgctgtagaaaatgcataatgtatgggaaagtctggagatgaaattttccaatcgcggtaatcactgggaaattctggcatattttgtctagtatctgccctgtgtttcacagatttatacatgcagttttgcatttcaaagttgtaaatccaacattagatatcaaaagcattttgttgaattcttaaagcttgtccctgagccgccttggactttgctgggttgccccctctgctggggcgggccctgggcagtttccgattgctcatgccttcattacggtggcacggcggtaacacctggctgcgggacatctgtgtctgaacctccaggtgctcccctccaagcctcaggcctgcccctcaaatgcctgggaaactgagtctcccagttccagggtagtggttggctgggctgagaaggagcccttgccaggacttcacgtgggcgggagggacactggctctcaggaagccaagagggtgagtgacaaggatggtggccaggagggtcagaaccctgggccctggagcagggtccagtggttgctaaggtgggagcctggtggcccgtatggctgagggagaggtgagggccacactggcaccgagactctttgggccgggtgtgggctgtaggaatctgagggcagaggctctttcatggtcagatgggacccccgggggaaggcgtctgtgggaggtcgctcaggtagtgcccctggtcagtgtctaaggagacagccatggcgtgaggtcaggcgtgcacgtggtcctgtcgggcctgtgtttcaccctcctcgccctagaagcttcatcttgccccaggctcccctgtgctgggacctcaggctggggtgcctggagctggggagggaggggagcgggctatggtggtggcccctcaggccaccatgacccaggtcgggtgagcccctcatgctggggtgtgtcctggtggccgtggtcgcagcgctcctgtggtgctccatttcccaaggaggaaacgaggctcctggattgggacctgggggtgccagagccgggagccaacccaggtcaggggcgacacccattttgcagaagggggagaccagccactgagctccagggcgggggcccactttgtccccttcctccgacctgacacctgcctctggggcccttaccgggaggctgggatgtattcctgagttcgcttgtccccccgcttgatgcctgatagtaggggaggagaggggcggcaccctggccctggggctgcctgggttctgtgcgtgcacctggcagtgggcctgtgctgtgttttctctgcattgtatgaggcatgtgtgtcagagaccgtgtgggtcttatgtcagtgactgtgcctctgttctctcctcctgggctctggctgtgttcccctaacccccgggggacctccacggcctgctagtggggtctcaggtgtgcagcagggtggcctgtgattagcagtggggctgagtcattcccctaaagagcttttccccctggtggctgcgttgctctgtttttctaacagaaacatttggtcactgtggctgcctactgccacccgactcagctccaagagtggcaggcggccatttgcctggggaggcaggcctgggtccagctgcacccctgggcctcaccgcgtgaggttgggatggccaccggcagggtgcttttggaggatgctcatccctcctgctggtgctgggtcctggctgagccttgaggctgggtccccacctgcctttgggaggctgggaggcctggagaagcctcaggccgtgcctcgaggcccagccaacctgccacgtccctccgccccgcctgccccgctgttggcaggtccctgcatctaaaaatagttctggaggagactcaagtctggggcgcgtggagggagatgagtctggagaggcagccgccaaatccactcccagacgcactggaagggggcggggacaccccacggaggcccccagccgggactctgctaccaggcgtgctggagacctagtgggcccagttctgctgcgctgcggggggctctgccaggcctgcggctgctggggggtgctggcgcctctgccacccccatgctcagcgcccccctcacagcaccctcagcaagcagggctggctgcctgcctgcattgggagggcctctaggggttcagggg

SEQ ID NO: 16556 - DNA, 2300 bp, Homo sapien
agaccatatttgggaaatgcttgtcttgctggccgcctgggatgggggccctgagcccggtgggctgcaggacagcccccgccctcccgctcctctgtggggctctggcccctagacctgccgcactgcctgtcccgtcctgcctcagagcctgggacatagtccaccgttttctttttttttctttttgtgtagtttttcagccccaaagcaagaaacactcattcctgaaaaacaggaagagaaactatctccattgtctcagacatctctggtgtcttcctgaccctctcttgtctttacgtttcacaggacattttcttgagatgtgcttttcacttgagtgcctttttcattttgttgtaatcatggtgtggacagtgttgcagccatccagggcctctgcccttgtgctcaccttggctccaatatgactccacctgggcctgccctctcctagctgccccctggcccctcccttgggccttgctcctcctggctctccacactccagcctctggcccttttagggactggaggctcctagctgctctggagaaatgggctccctgctgatgatgtccacccagggcaagtgaaccatggggtctgaatgtctgatcctgggacctggggcaactactgcctacccaggccgctgcctggtatgccatcgccctctgatgccggccagggagatggcgctcagaggggcactgtccagcccctgctcatataggggaggagggtgggccctagggacttgaaagaggcctcacccccactcctctgccccaaggcacaggctcctgcttcctgtttctgcccaagggggcgtggccctttcttccttgtttcactccttgcagatggagtccagaaagtgggacttgggcccaagtggggatggtcacacagctactggctggccagaacccaggtcccatttccgagtcagagtctcgaccaggctgcacatctaagacgccaggagactctgaggagggaccttgcagggcagcccagagctgaggccaggctggtggggtggctggagcccagtgccggtcactgtccagccagcctggcactgttctcacacccggcttccctgtgtgtgaagtctggggcccctgtggaacccatgcagccctctgctgccctaggaggggccgcagccctggccttgtctcaccccgtgcctccctcacacctgccttttgctgcaaccgcccacaccctccagccagggatcctctgtctctctgggcccatcctgcgcctggcacctcgatggggcagcagcggcaggggcgaggatgcatgagtgtgtggtgggaaactgcgaggcctccctgcctgggctctagtgtcccagcgaggctccgcccctgccctcgccacggcactcatgcctctgatcccacagcctcctccaagtccctctcggactgcttggctcctgggccacatggagcacgtacccggctctgcaagggtttgctgagggcgacggggccaggacagggagggtgtgcctcctgtttctttcccagccttggggaaggtgtttgaagtttctaaattaattactgactttttggatttggggtagatagactttgttaaggaagctctgtcttattgttgttcatttttttatcctaagaagctgttctttttgtcagattattttcgtgcacctcgagagagaaccatttgctatttgttttaacttggcagctttgtcgtgattactgccgctctccttgtgttggtccaggtagcagagtggccttgggtggggcttttagggatatcttgagggtcatccctggagttttggtggtgacagtggtcaagaggattttgaggtgctatacaggtgcagttgaaagaaaggccaggatcagctgggcctttctgctggggaacaggtggggacagtggaggcaaaggcacaatgatctcgccaaactccactgagttcttttcctagtatcaaagctgggcacctccccagagcagggcaggagctggggagcccctgacgccccatgcacatccttctgttctcacacctgtgtcctctctccccagaacgtgctggccaaagcgctctatgacaatgtggccgagtccccggatgagctctccttccgcaagggtgacatcatgacggtgctggagcaggacacgcagggcctggacggctggtggctctgctcgctgcatgggcgccagggcatcgtgcctgggaaccgcctcaagatcttggtgggcatgtatgataagaagcc

SEQ ID NO: 16557 - DNA, 2300 bp, Homo sapien
gcttcatttcctggggtccttacacggtgggaccgtctacagtcggagctgtggtggtgatgattcgtctcctacaggctggggcacgccccctcccctttccctctagattcagatttgagtcccacggcccatggacacgcgatgaatgccctggggttggttagcgggaaagacaagtcgacttgaggccatgtctcggctctggaggaagaaggcaaaccgggcagccttcccagaagtggaggagtttgcgtaggccttcggtgcgttctcgcctgggtggaaggcggggacgtgcatttgttggagagcggtgtcctgcgccctaggctggaagcctggcctcgggcaggggcctggagcctcggggttggaggtggggggcggggcggggggcggcccctactgggcgggcttctgtctgcgcgcccgcgcccccgacaggcggcttatttgcatggagagcggcggcggccaatgggcgcgcgcggccgggcatgctgggatcgggctgggccggctgggccgtggcggcaggcggagagcggctggaccggctctgggtggccgaggcggcagctgcgcggcggcaccggggcggctgcggcgcgctcggagccccgagggcacgcggcccgggcagctcggtgtgcgcccccgcgagagccggggccccaggcccgccggacaccatgaaccacctggtgagggcgccaggtggggccgggccgcgtacgggcttggaggcggcagcgggctggaaggggttaagcgagcggcatttcctgccggacctgcggggcctgggaaccgccggccggggtccgcggccctgggatctccttctgccctggccgggaagccgggaggcaggaaccgcgggggctccggagcctgtgcgcctcgggtgcgttggcggggccgggcgcgggggccgccagccggtaggagggttcctgtgtcgggaaagtggctggcggggcccgcgctccccggccgacggccgcctgctgtgtcaccttgggcctctgcgccctgcctccgagcctcagtttcctcggctgcgaggaggggccgttgagcctctggcgggtggtccggctggtgtggcgtggggactgcccaccggctcccggagagggaggagctccgggggaccgaggccgggcgggcaagtgcgtggcgccagcggggaaggctgcgcagccggagcacccggctccagttaatgattcactccggccgccggcgcggggttccgggagcggagcgggagtgggggcgggcgcgccgcgggctttgcagccccgcacgccgagcgccggtggaagccgggtcctggccacaggagtcctagccgcacgcgagtgtcgcgggagggggccagggccgggttctgcagtgtggacatgaaggctttggagtccatggttgggggacccgcaagagctagagcagggtcggagctccctctcgagggtccgagaggctgatcgctggaccgaggtgagggagttgggaaagcggagatttgcctaggggtgcggggtgaggggcttacggcctggaagatgttggggtttcgagttccagatcggggacagcagctccttttctaccacaaggctcccgttccctcctgagagtccctggtttcctttcccacacccctcccggggcccgccgcagctttggtcaccttctcagaatgaccatgggttgatctcttctttgctagtgagatgtttcccatcgccctgggccgggacacgccccctcttgtgcccattcctttccctcggtggagagttgggtggtgggggctggccggcctgtgagagcaggtgtcggggtgcctggagaatcggggcccaggtacgggggtggcggggctgtggggaaaagagctttggggaggagctgctgacacttcctcctggcactgcttgcccgggagctgggtggaggcagggcagggcagggcagtcccaggttctgccaggaaagtcaccttgggctggggcaggaggcttggagcttctggccgttactgtttgtctgagcaggagggtgagcactgtgtactggtaccatggccccaggtctaggcgagggatggaaataaggacagtgccactagggcctcctgtctgtacaggaggggccctgagacagctcctcaaacccctttcccattatacggatggtgcagatggggacactgaggtacagagagacagtcagttgtcctcagaattggatccagaacctcgtcttctggcatggccccccagtgc

SEQ ID NO: 16558 - DNA, 2300 bp, Homo sapien
ctggggccttgtttccaaagcggaaatgccattctgggaggcacaggcttttgggggagggaatttaagtggaaaaggagcaaatttttgaaatgcctgtgtcggagcctgtttcccttgctgcctcctgctcacaccagcagccccacccccagtgctgttctaatgcagctactgggggaggagggtctcatcccccaaggttccagccatccacctcctctctgcaccgccctccttggccaactaggatggagcaggggccagctcccttgagggccaggccttttgtgtccttgcccgtccctgcagagactgctgcctggggccctgccagcagggcactgcctgcccatgaggcctggtctcccctccccacagaagtggaggcccagggatgacctcaggctcctgagggtcccgctggttcagacctgctctctgggaagctggtgtgccagccaggctgaggagtgggtggctggacagggtcagggtgcaggaggggcccggcacagctcttgggaacaagcaggaggagatgctccaggcagcttccctgaaggctggctcctcttctgaggcgaggcgggctgtgtcggggaggcacagggtgttggctagctgttctgttcctcctgaggactctgggtcatgctctgtctcatcccactgctccttcctcacccgctgtgctgtgagttctggccaatgcttcccaagccaaatattgaagaaatgcagacgtccagttttttgggaggggtgggacacaggagtctgttttttaactagctccccagagcacctgagcagcaaatcatgggctgtcctagccccttttcagatgagaaaggagcccagagaggggagagggcctgccaaggtggcacatctggccaggcgctgcgtaggctgagccctgggggtcagacagaggggcagctgcaggcccacctgggcttgtgtcttccataggccatgcttgagaattctctgctgcgtgaagccgggtctaccccgctgcttccctgccaccagggctgcctcgtggcatcccattgctcagccagtggcccaggattgttgactgagggtcctgtctggtctggaccaggctcggtcctatcatctccctgcagattgtgcctccctggcctggcccaggggctctggcaccctggttctgctgcatggggtgacagtcactgacctgcaaccgagcaaggggcaactcaggagagccaaggttgtctccactcggtttcccccgagtgattcttccttctatctccctcattcccccagtgccgctctcctaccccatgtcgctgaagcagatgagttggagcaggactcaggagggtactaggcccaggttttaggctgaacctaggaatgagtaatgagaggaggcagatcagctggaggaccagcccgagtccccagatgtcggcacaatgcaggggaaggtaggtgctgcccgtgaaaagcgctgggtcgagagctcgccagcctccctgcttgaggcttcatttcctggggtccttacacggtgggaccgtctacagtcggagctgtggtggtgatgattcgtctcctacaggctggggcacgccccctcccctttccctctagattcagatttgagtcccacggcccatggacacgcgatgaatgccctggggttggttagcgggaaagacaagtcgacttgaggccatgtctcggctctggaggaagaaggcaaaccgggcagccttcccagaagtggaggagtttgcgtaggccttcggtgcgttctcgcctgggtggaaggcggggacgtgcatttgttggagagcggtgtcctgcgccctaggctggaagcctggcctcgggcaggggcctggagcctcggggttggaggtggggggcggggcggggggcggcccctactgggcgggcttctgtctgcgcgcccgcgcccccgacaggcggcttatttgcatggagagcggcggcggccaatgggcgcgcgcggccgggcatgctgggatcgggctgggccggctgggccgtggcggcaggcggagagcggctggaccggctctgggtggccgaggcggcagctgcgcggcggcaccggggcggctgcggcgcgctcggagccccgagggcacgcggcccgggcagctcggtgtgcgcccccgcgagagccggggccccaggcccgccggacaccatgaaccacctggtgagggcgccaggtggggccgggccgcgtacgggcttggaggcggcagcgggctggaaggggt

SEQ ID NO: 16559 - DNA, 2300 bp, Homo sapien
gaaccccactcaagaggtgaaggggcaaccatactctactggagcagggaaggacccctcatcactgccagaacagggacttgggtctctcgtgggaggcctggatttccctctttctctcatacctcataccccctcattgctgctggcctcttgggatcctcaccgggacactcctggagaaaagatcaaggctgcacgccccttggggaaaaaggctgaaaacccagtcggtgacctgctactgggggcttttgggagctgggggaagtcagcctgctgcctggctctgcttcctccatccagccaccgtggcctcctggcacagcatccctggcaggcagaagggcccgccccccacatgggcacccacacagagattccctaggcagctggagctttctgcccccaggtccccgccatgagcccgggctgcggcaaaccagcctcatggagctggctccgtctttcctccctggggtgggcagcgctgacctccgggacagtgctctggaccccagccccacttgctctagatgctcacccaccgtccccaggaagcagaacagaggggtcggacccctggtccttcctttgagtgggtgagggatctcagtgcctgggcctatgaaatgtaacggggcatcagcaaggcctgcctggcaggagtggagcgatggggacgaacatgcacgtgcccagtggctgcaggtgccatgtgtgggcaccatggtagatgcgaaacagctgaaattgggggtgtttagcctggggaaaggaagtctcaggcccacgaaggctcgtcttccagcctctgggaggacggtgggctgagggtgggcccaggagtgggggttacagggacacaggatcctccctagaagccaggtcagatgtcactgtcagggcgaccccaggatgagctagactgtttccggggtggggagctcctcttccctgggggtctcggggctcgctctcagctgggggagggcagaggggctccgggaggcctgctatgctgccccgcgatcaccttccgccggccgagccctcccggtctgcgcccggacacagggcctaggagcccggccagggccacagggcagtgtagtgttgggggaggggactggttgggcgacccagagctggtgcgactggaggtggcccgcgagggatcggcgaggagcggaggagaccgcgcctccccgccgcgttgggccgacagaaaaaggcctaggtccggggtcctcacctttaacgcgtccctggccgcggagacggtggggggggcggcgcgggcggcgcatgcgcggcgcggctggagcggccggacagtccggcgtccgggaacgctcaggagccggaggagccggaaagcgccgggacccctcgcggggcctctgagcggcgcgggcggacccgagcccccagcccgctggcgccgctgcccgccaggccccgggggcggcggccaagatgtccgtgcctgtgagtaccgcgccgcccgggaccccgggccggctgtcccccgcccggctgcgacctcgccccgcccgctgcgggcctgatgccgcgttggctcccggactgggggtcgcctcactggggcctcctcggccccgggggagagcgcaccggctgggggaggctcccccaagccggcctctctgcccccgcctttccatcctctttcaggagagctggatcgggctggggtccgtactgtcccctcggggagccccccaagatggctaggtcgggaagactctttgttggtccccgggaaacccctgggacagctgggccaggcaggagtctgttgcccgccaggaccccgcaccaggacggctaggcctagcggggaggggtctctgccgctcccgcgactcccctccgggactgctgggccggatgagggggtgggaggcctgtgctgtcccgcaagacctccctcggattgctgccctgcggcgctcccgggactcccccggggtggccaggttggggcgcggtctctgccagtcgccggagccacccctcccccaggacggcttggctggatgggagccgtgcctgccctccacggcggatgggctcactttcctgggaagttttcctctcgctgcggaacccccggggccctgactggccgcttcctccccgctggccgtagggagttttctgtccgacaccccctcttcctggccgggcagcctggcttcggcagacccccgggccatgtttccacacttgggcactggcatctctgagcatctcagtctcacctcctgagaaca

SEQ ID NO: 16560 - DNA, 2300 bp, Homo sapien
cttgaagccccagaggctgttccctataggacggagtgagtcatcctgggatcatttgcctgccaggagtgggtgagggaggagcagccgccgccttcacagacacctggtagtgtcaggagagggcatgcactgccctggtgaggctcctctggctgcccccaggcccacacccaaggatccctgcctcagagtaagtgagggctctagccagggtcccctctctccctgctaagggctgagttactgatgccctaaataagcagcccctggggcggtaagaggcaggatgagatggattggagggtccagctccatctgcgcccctcccttgggctctcctttccctgtgcccaggcaggtagaagggatctttctccaccgcccgccccattctggctggggcacctagatatgggggagatgggaaaggagacaggaacagtgggccccaagcaggagcaagggagggaggtggggtctgggcgaggagcaaaggagagggccagggtggtggtgggtgggggcatcagagacagcagggcgtgtggccaggagcccgggcgccaggcagagctgctgctcccagctcaggagcccctgtgccagctggatgcgggcgggtgggcacgggcagggccacgtgccagacatgcacagagcgccctttgaggaggtggcagctgtcggtccaggccccccaccccccccccggcttgctgtggccctgcttggcccctccaacaatgccttgctgagcactgggctgcggacgctgatgtgcacagttgggaaccccactcaagaggtgaaggggcaaccatactctactggagcagggaaggacccctcatcactgccagaacagggacttgggtctctcgtgggaggcctggatttccctctttctctcatacctcataccccctcattgctgctggcctcttgggatcctcaccgggacactcctggagaaaagatcaaggctgcacgccccttggggaaaaaggctgaaaacccagtcggtgacctgctactgggggcttttgggagctgggggaagtcagcctgctgcctggctctgcttcctccatccagccaccgtggcctcctggcacagcatccctggcaggcagaagggcccgccccccacatgggcacccacacagagattccctaggcagctggagctttctgcccccaggtccccgccatgagcccgggctgcggcaaaccagcctcatggagctggctccgtctttcctccctggggtgggcagcgctgacctccgggacagtgctctggaccccagccccacttgctctagatgctcacccaccgtccccaggaagcagaacagaggggtcggacccctggtccttcctttgagtgggtgagggatctcagtgcctgggcctatgaaatgtaacggggcatcagcaaggcctgcctggcaggagtggagcgatggggacgaacatgcacgtgcccagtggctgcaggtgccatgtgtgggcaccatggtagatgcgaaacagctgaaattgggggtgtttagcctggggaaaggaagtctcaggcccacgaaggctcgtcttccagcctctgggaggacggtgggctgagggtgggcccaggagtgggggttacagggacacaggatcctccctagaagccaggtcagatgtcactgtcagggcgaccccaggatgagctagactgtttccggggtggggagctcctcttccctgggggtctcggggctcgctctcagctgggggagggcagaggggctccgggaggcctgctatgctgccccgcgatcaccttccgccggccgagccctcccggtctgcgcccggacacagggcctaggagcccggccagggccacagggcagtgtagtgttgggggaggggactggttgggcgacccagagctggtgcgactggaggtggcccgcgagggatcggcgaggagcggaggagaccgcgcctccccgccgcgttgggccgacagaaaaaggcctaggtccggggtcctcacctttaacgcgtccctggccgcggagacggtggggggggcggcgcgggcggcgcatgcgcggcgcggctggagcggccggacagtccggcgtccgggaacgctcaggagccggaggagccggaaagcgccgggacccctcgcggggcctctgagcggcgcgggcggacccgagcccccagcccgctggcgccgctgcccgccaggccccgggggcggcggccaagatgtccgtgcctgtgagtaccgcgccgcc

SEQ ID NO: 16561 - DNA, 2300 bp, Homo sapien
ctgtctcaaaaaaataaaataaaataaaataaaataaaataaaataaaataaaataaaataaaaatccataagtccatactgatataaataaattattgaataaataaataaatgagggagaacaggcaatctctcatccagaagaattccaaatcatctccatagagtccaccctcaggaggtggagcataggaactccctcctccttggctgtggatggcacacagggacttccttccaggaagtaccctacagaaagcagggggaaaaagagtcgccttacagtggagaaccctgacaaacactccctcagccaggtggtcagggtgagcctcaacagtgatcatacttcatgttgtcagtatgcaccccaatatgatgggatgaaaatggcacttgacctctggggtcttcctccccaaaacccacaacccagtctaatcgtaagaaaaacgtcagacaaatcctaattgagggacatctataaatgttttatttcattctgtaaatgtttcccgcacacctcaaaactgtcaaggtcatcaaaaacaaagtctgagaaactgtcacagcccagaggaacccaaggagacggtggaatcttggttggaatcccagaacagaaaaaggacgttaggtaaaaactggagaaatctttggccaggcgcagtggctcacgcccgtaatcccagcactttgggaggctgaggcaggtggatcacttgaggtcagtagttcaagaccagcctgaccaacatggtgaaaccgcatctctactaaaaatacaagaaaaaaattggcccggtgcggtggcttacccctgtaatcccagcactttgggaggctgaggcaggcgtgtcatgaggtcaggagtttgagaccagcctaagcaacatgctgaaaccccatctctactaaaaatacaaaaaaaaaaaaaaaaaaaaaaaaattagccaggcatggtggcgcgcgcctgtaatcccagctactcaggaggctgaggcaggagaatcgcttgaacccgggaggcagaggttgcagtgagcagagatggagccactgcactccaccctgggaaacagagggagactccatctcaaaaaaaaaaaaattagctgggcatggtggcatacccctgaaatctcagctacttgggaggctgaggcaggagaatcgcttgaacccgggaggcagaggttgcagtgagccaagatcgtgccactgcggtccagcctgggcaagaagagcgaaagtctgtcaaaaaaagaaaaaaaagagaaatctgaatcaagtgtggacttcagttaacaaagatgtatcagtattggttcattactaatgccacatgttccatgctgagttgtttttttttttttttttttttttttttttgagatggagtctccttctgtcgcccaggctggagtgcagtggtgcgatcttggctcactgcaacctccgcctcccgagttcaagtgattctctggcctcagcctcccaaacagctgggattacaggtgtgcaccaccacgcccagctaatttttgtatttttagtagagatggagtttcaccaccatgttggtcgggctggtcttgaatgcctgacctcaggtgatctgcccaccttggcctcccaaagtgctgggattacaggcatgagccactgcgccccacctgacgggagattattactagtgccgggtaatcattgcactctcccagggcaggagctcctttgccagagaagtccctggtcacctgaaggggggtacagggagataaggagccacttcccagccctcagcccctctagacatggcaaggccctggggacagaggccagcttggatgtcaggagagctggttgtgaagcttgtctctgcacagatttactccatggccaggtccaaattcctttccctccagaggccagggacaaaaatagtcccggtgtgagggcctcgcttagctctcaaggaccctctcagggcgctggcacctgctctggcagcccagctgttgcttctggttggaactgccagccttgaagccccagaggctgttccctataggacggagtgagtcatcctgggatcatttgcctgccaggagtgggtgagggaggagcagccgccgccttcacagacacctggtagtgtcaggagagggcatgcactgccctggtgaggctcctctggctgcccccaggcccacacccaaggatccctgcctcagagtaagtgagggctctagccagggtcccctctctccctgctaagggctgagttactgatgcc

SEQ ID NO: 16562 - DNA, 2300 bp, Homo sapien
attttctgtaacaccttcaaacccttcaaaattctccacgcagtctggccaaacattttcccaacagttattggtagtagcctgaccaatgctctcccaggctgtactgacataatcaataacgttgcatgtagtgaccgacttccaatagtccagcatggtggtttccttgttggtcctgagagcctcacaggccttcatataaagctcccttgtgtagtgtgccttgaatgcttttattatgccccgattgaggggttggatgagagacttagtgtttgggggcataaaaagaactcctatgttggcgtgtgcattttcgagttctttgcagcaatggattgtagcattatccaaaattaacaaaaccttgaaggtgcccggcgcggtggctcacgcctgtaatcccaacactttgggaggccgaggcaggcggatcatgaggtcaggagatcaagaccatcctggctaacacggtgaaaccccgtctctactgaaaatacaaaaaattatccaggcgtggtagtggacgcctgtagtcccagctactcgggaggctgaggcaggagaatgacgtgaacccgggaggcggagcttgcagtgagccgagattgcgccactgcactccagcctgggcgacagagcgagactccgtttcaaaaccaaaccaaaacaaaacaaacccaaacaaacaaaaaacaaaacaaaacaaaacaaaaaacccttgaaggcaaggtttctgccctggagacagtgttcagcttctgggatgaagcagttgtggaaccaatcagacatcatccacacttttttgttccacctccaatagactggcagatggttcacgtatttcccgttaagtgcttgtggattttgggttctttacaccattaggagtttgcactttagtcgctcttggcattggcgcacaataacaagggtgcatgatcctggcatgatttaaagccaggggctttggaggccgtttgcattatataggttcgtttgccaacatccttgtaaaataagccagtctcatccgcattgaaaacctgctctttcacataacccttttcctgtataacacttagcaagtatttttaaaattcttccgcagcctcctgatctgcagagctcgcctcacctgcaagtttaacatttttcaccccgtatcgccttttgaaacgcgcgagccggccagcactcgccgagaagggcttagcatttctttgactctgggtaacgtgaccacagatatctttggctttcagcctcaccacaatgctgtccactatgttttttttaatcgattgacatctcatgaatccacaaatttagccgcttttccatcttttccatctttgtcatagcttcatcacgcacgatggaggtcacttcagcactatccggagcggcctcacggacagatcggtgaatttccttttcctttttcttgatgtaccggattgtcgactcgttaacattgagctcatggccaacagcactgtaactcatgcctgattggagcttatccaacacgcggactttctccgtaaggcacatcacggtcttctttcgcttaggaacactgggcagagcttaagcactacgcttgggggccattttagaaagcaaaaccacccacaaaaagcagaaaaaaaagtgtcagtaaacagactgcggaaaggactctttgtttacagcacaggagctgcgactagaaggcggcgcttctcccagttcaaacttcagctgggaaccttacctccgccaactccaaattttcaccctctgcgcatgcccgggaagaaccccagacagtaccgtgatgattgattttagggttacaaatacattttagcaagtaagtgaatttggcattacgaattaatgattaatgaaggtcacctgtatttccatagatatgtaattttatttaagcaggtttattatattaaggcggcgaggcagcgccgaagactacaagttccagcatgcaccgcgtccgggcgggttcgggctcccagcgagggcttcagggacgccagcccggaggcatcggccggaagtgtcgtagggcaaccacgtagtactctctgcgcatgtgcaaagcgctgtcgggggccgccctagctgccgtcgccgccgccggggctctatggtctctccctagagctttgccgttggaggcggctgctgcggtcttgtgagtttgaccagcgtcgagcggcagcaacatggaggaattcgactccgaagacttctctacgtcggaggaggacgaggactacgtgccgtcg

SEQ ID NO: 16563 - DNA, 2300 bp, Homo sapien
attccatctctgctaaaaatacaaaaattacctgggcatggtggcacggagctataatcccagctacttgggaggctgaggcaggagaattgcttgaacccgggaggcgaaggttgcagtgagccgagattgcgccactacactccactccactccagcctggacgacagaaaaagactgcgtctcaaaaaaaaaaaaaaaaaaaaaaaaaaaaaaaaaaaatttaccagtcaggtgcagtggctcacgcctgtaatcccagcactttgggaggccaaggcaggtggatcgcttgaggtcaggaacgagaccaacatggataacatggcaaaaccctatctctactcaaaatacaaaaattagctgggcctggtggcacgcgcctggaatcccagctactggggaggctgaggcaggagaatcgcttgaaccagggaggcggaggttgcggtgagctgagatttcgccactgcactccagcctgggcaacaaagtgagactctgtctcaaaacaaaccaaccaaccaaacaaaaacattattattcgtcacaagcctcttcatcacctggaaccttgtggacattacttatccttggtaacttcccttccagaacactattgttaatggctgctatggtctgaacgtgttcccccaaattcatgtcctgaaacttcgtgggaatgcgatagtactgagaggaggggcctttaggagacgattaagtcagaagagtggagcccccgttatgggattaggacccttataaaagggatttggagagtgggctccctttgttaccgtgtgaggacgcccgggcggtgctatcagtgaggaacgggccgtccttagacatggaacctgctgcgaccttgatcttggacctcccagcttccagaactgtgagaaaataaatttctgttcttaataaattgcccactctcaggtactttgttacagcagtgcaaacaaactgaacattagcttattcctttttacgatttctctgccttcattttaacaggctttctgaagggaggtgagacaaaaatgtgtgatccacgaggacaggaaatcgagaccatcctggctaacacgatgaaatcccgcctctactaaaaatacaaaaaattagccgggcgtggtggcgggcgcctgtagtcccagctactcgggaggctgaggcaggagaatggtgtgaacccgggaggcagagcttgcagtgagcagagatcgcgcggccgcactccagcctgggtcacagagggagactccgtctcaaaaaaaagaaaaaagtgtgatctaattttattgctctgaaccgaatctctgtacattttattttatttaaaactaagtcgagctctatagaggctacatagcctccctcccattctggtcccacaccagactttgcatgggctctttctactatcagctttaaatagagaacgttcttgttctgttcatgaaggtttcataaatgctggagtccagtcataactagaactttacatatccgttccatcactgtatttttccagatccctggtaactccatagcgcggctctgttggggcgcatgcaattccctactttctcacagggggcgctgcagagaagggcagagcagagcgcgcggtcccagagcgcgccgtccaggagggggcgcgtccgtggggctgtgtctctgcgagccctgcgcaacgttgggggcgggaacaaccctggccctgcgcccgagcgctgcggcgccttgtgattggaggaggcaacggtcacttggcagcgccgttgggattgggggaagaggaccccggctggaggtgacgctgaggcggcgagggtgagtcggcgccggccgctaccgcacttcgggcgctcgtccctcatttctctgtggtgaatggcgacgggatggagcgcgaggggagcggcggcagcggcgggtcggccgggctcctgcagcagatcctgagcctgaaggttgtgccgcgggtgggcaacgggaccctgtgccccaactctacttccctctgctccttcccaggtacggcccgccccgcgcctgcgcactgcgcgccccgccgtcgccgctgccgtgctgtgggcgccccgagtctgggcggggtcccgggtgcgcagcctgctggcggcgtgggcgctgtcctccgggaggggggccgtgctgctcgcccggagcccctttccccatcacttcttcggcggtccctgaggcggagccccggagtcccgctgggcgtgagatgcagagagcggccgcaggtgggcccggggctg

SEQ ID NO: 16564 - DNA, 2300 bp, Homo sapien
tgcagccttggcctcccaaaagtgttgggtttacaggcatgagccaccttgcttggcagatcggtgaattggtcactttttaaaaagattttaaaaggtatgatttatgtagcataaaattcatttattttaactgtacaattcaatgatttttaaagaagttttcaggctgggcacggtggctcacgcctgtaatcccagcactttgggaggccaaggtagatggatcacctgacgtcaggagtttgagacaaacctgaccaatatggtgaaattccatctctgctaaaaatacaaaaattacctgggcatggtggcacggagctataatcccagctacttgggaggctgaggcaggagaattgcttgaacccgggaggcgaaggttgcagtgagccgagattgcgccactacactccactccactccagcctggacgacagaaaaagactgcgtctcaaaaaaaaaaaaaaaaaaaaaaaaaaaaaaaaaaaatttaccagtcaggtgcagtggctcacgcctgtaatcccagcactttgggaggccaaggcaggtggatcgcttgaggtcaggaacgagaccaacatggataacatggcaaaaccctatctctactcaaaatacaaaaattagctgggcctggtggcacgcgcctggaatcccagctactggggaggctgaggcaggagaatcgcttgaaccagggaggcggaggttgcggtgagctgagatttcgccactgcactccagcctgggcaacaaagtgagactctgtctcaaaacaaaccaaccaaccaaacaaaaacattattattcgtcacaagcctcttcatcacctggaaccttgtggacattacttatccttggtaacttcccttccagaacactattgttaatggctgctatggtctgaacgtgttcccccaaattcatgtcctgaaacttcgtgggaatgcgatagtactgagaggaggggcctttaggagacgattaagtcagaagagtggagcccccgttatgggattaggacccttataaaagggatttggagagtgggctccctttgttaccgtgtgaggacgcccgggcggtgctatcagtgaggaacgggccgtccttagacatggaacctgctgcgaccttgatcttggacctcccagcttccagaactgtgagaaaataaatttctgttcttaataaattgcccactctcaggtactttgttacagcagtgcaaacaaactgaacattagcttattcctttttacgatttctctgccttcattttaacaggctttctgaagggaggtgagacaaaaatgtgtgatccacgaggacaggaaatcgagaccatcctggctaacacgatgaaatcccgcctctactaaaaatacaaaaaattagccgggcgtggtggcgggcgcctgtagtcccagctactcgggaggctgaggcaggagaatggtgtgaacccgggaggcagagcttgcagtgagcagagatcgcgcggccgcactccagcctgggtcacagagggagactccgtctcaaaaaaaagaaaaaagtgtgatctaattttattgctctgaaccgaatctctgtacattttattttatttaaaactaagtcgagctctatagaggctacatagcctccctcccattctggtcccacaccagactttgcatgggctctttctactatcagctttaaatagagaacgttcttgttctgttcatgaaggtttcataaatgctggagtccagtcataactagaactttacatatccgttccatcactgtatttttccagatccctggtaactccatagcgcggctctgttggggcgcatgcaattccctactttctcacagggggcgctgcagagaagggcagagcagagcgcgcggtcccagagcgcgccgtccaggagggggcgcgtccgtggggctgtgtctctgcgagccctgcgcaacgttgggggcgggaacaaccctggccctgcgcccgagcgctgcggcgccttgtgattggaggaggcaacggtcacttggcagcgccgttgggattgggggaagaggaccccggctggaggtgacgctgaggcggcgagggtgagtcggcgccggccgctaccgcacttcgggcgctcgtccctcatttctctgtggtgaatggcgacgggatggagcgcgaggggagcggcggcagcggcgggtcggccgggctcctgcagcagatcctgagcctgaaggttgtgccgcgggtgggcaacgggaccctgtgccccaactct

SEQ ID NO: 16565 - DNA, 2300 bp, Homo sapien
ggctcaagcaatcctcccacctcagcctcctgagtagttgggactacaggtccgcgccactgcactgggctaatttttgtatttttagtagagatggggtttggccatgttgcccaggctggtcttgagcttctgggcccaagcaattcacccgcctcagcctcccaaagtgccctaattacaggcatgagttaccgtacccggctggctcttggatttaagcccctgcccttcctccttcttactggatattcatgtctctgagccccactgcttcaattaaaacagagaggtatggtcatttctgcctcccagggacttgggatgatagcatttaatcatgaagacagaagtacctatcacagggcctgcctgacttgttcttcctaatgtcaaaaccttggcccaaatgtctactgtgctgaacgtaaggctcctatcagaatgctctcagctaggaactggtcttctggagactctgtggcgtaggatgattcaaccaccttcctagttcttgagtttcagtaataggatctcatagcagttcctgtagtgtgtgagtcacttaagaagacctctggcttccctggaacacaggtaacaaataccttggcttgggatcaagatcctccctacccagggaagggctgagctggccaggacaactgtgtttgggccagagcagcagggtcctgcactctgcagggagcaatcacaggtgggagaagcccacagcctgggatcagaagtgccagaagcttaggaacaggagtcctggggtcccagctttctcgctgtctctccaagccttgagtctttcacctgaaaaattgacatcatcgtgcccacctcagggcccgttgagttaagtcatcgcgtggacttgaagcacctagcacttgtgatcattgaagtcagaaaatgagttcccttctctttcggcgccccattggcaggaagccaaccatcgtcagcccactggcactggaggagcgttgatcatgtgcagagcagatgagtggctactctccctgtcttccaggttttcccagagtggctgtgggatctggagtcggctggtgacagagctgctgggcatcctccacccacccctgttgcctcctgatgagggaaatgggcagagaggagatctgctcacaagttagaccctggcttctctcagtgggcgatgtggacaggggaagggggcaggcaaggagcaaaggatgcaggagcaaggagaaaacttccaggctcctcccttccaaagtcacccagccttgagatcattgcagatgcaacaggtgcaaacagaagaacactttgggaccttggaatgcgggaagctggctcagtgttccttccaccctgtgagacatgtgtgacatttttgttgttgttgctgttttgagacggagtttcccccttgttgcccaggctggagtgcagtggcatgatctcggctcaccacaacctctgcttcccaggttcaagtgattttcctgcctcagcctccctagtacaggcatgtgccacaacgcctggctaattttgtatttttaggagagatagggtttctccatgttggtcaggctggtctcaaactcccaacctcaggtgatctgcctgccttggcctcccaaagtgctgggattaccagcatgaacctccatacccgacctatgtgacattcttaaggtccacgaaagggctggtggttggaggccagagggtggcctgtgagatactgggattggaagagtaggtggcctgtgggtgtctcctctggggggagactccccagggggaggggttcctcctctccaaacagtagctcagcacagggacagtaacagtaatgggggcatgtgtgtaaggaatgctttcccaggccccctcttcataggtgtttgcagcagcatctcacagccctaagaggttaaatgttgcacatcccatcctacagaagtggaaatcgagcctcagagaagttgtgtcgcttttggggctatcttcccctgtagagtgtgactccatcgccctcctgctttaccaggtgctgaggaacctctaatcatctcccatggatttgtgatcagcgttgcagctctcccagcagccctggacagtggtgagtcccctcagctggccgggacagtcctctgctctcacctctctgcttctctggctccatcccagctccgcctcagctggtctccttgcaaacccacagggctccaggacatcctccctctggagcccatgctgccttcagcacttcaccccctaccggtgatggc

SEQ ID NO: 16566 - DNA, 2300 bp, Homo sapien
tccagtttctgccaaagcaggtgaggtgtctaatgccccactgagtgcccatcttgaagcttattaaagcaattctctctctttgcgtccctcttaccttatcctccacatccttgccccctctccttattcatgctttgtaaagaggttttggagctttctggccagataacttctaaatactgattaaggaaatgtaaattacatgatcctaaggaaaataatgattgccggccaatcccctacccagagttatggttggccttctggcacacatctttctatcccatacactatttctaactttttaaaaatcatgaacaggccgggcacggtggctcatgcctgtaatccgagcactttgggagacagaggcgggcagatcacatctgagctcaggagttcgagaccagcctggacaacatggtgaaaccctgtctctactaaaagtacaaaaattagcctggcgtggtggtgggcacctgtaatcccagctattcaggaggctgaggcaagagaatcacttgaactcgagaggcggaggttgcagtgagcctagatcctgccattgcactccagcctgggctacaaaagtgagactccatctgaaaaaaaaatcagtatcaaaatcatgaacaacacttatatgaaccctgtacataaatccttgtttctggtttatttccttaagatagctcctagaaaggaattaccaatccgaaaagcttacgaccattgtcaagaatcttaattcatcttgccaaaccacaaccaggaaggactgcttatttcttctcccagcagcagggagttcttgattaagatcccatcactaatttgacaagacctagaaatgcttcatccttttcaggtgcctgggctctgccctgttatttgtaaaggggattttttttttttttttttttgaaacagtttcgctctgtcgcccaggctggagtgcagtggtgcaatctcagctcactgcaacctccgcttcctgggctcaagcagttctcctgccttagcctcctgagtagctaggattacaggtgcctgccaccacgcccggctaatttttgtatttttagtagagacggggtttcaccctgttggccaggctggtctcgaactcctgacctcgtgatccacccactacggccccccaaagtgctgggattacaggcgtgagacaccgcgcctggccggattttttttttttttttttgcgagggagtctcgctttgtcgcccaggctggagtgcagtggtgcgatctcggctcactgcaagctccgcctcccgggttcacgccattctcctgcctcagcctcccgagtagctgggactacaggtgcccgccaccaggcctggctaatttttttgtatttttagtagagacggggtttcactgtgttagccaggatgatttcgatctcctgacctcgtgatccgcccgcctcggcctcccaaagtgctgggattacaggcgtgagccaccgcgcccagccctggccggaaatatcttatttattgaaacgtatcatgtctttatctggacctgctatgaacctgcgcctctgggcctaggctagggcagggaatgcgcaggaggaggggaaaagctgcggacccagctcctaaggccacctggtctctccgctcttcccagttgggacactgcaccgggtccatgtgtcatccaggtgccgtggccttgggaagggtttggattccaagtcacctcgccgcaaggatgcccccgagagtgaggagggtcaagattaagattcgacttccttcactagggcctttgtcctcccaggagccccccttctctggggatttggggtggggtggggtacaacgttcctctgtagtcagatgagaggtgactctgccagcgccctttgacattctgggctaaaagttgagcctctcagagccccagcccacctgggccctcctgccccgccctcggccggcgcccctcccccgaggcgtggcccctcggtcgggggtgggccaaccggctccttccttcccccacggcgctagctcccgctggccacctcgggaccgcagccacgtctgaaagcgcctcattgtgtgcgctcgggcgggctgcaccgggcagcgccgagggttgccggccggcgcgcggggagtagagggcgcgggccgcagtgccgggttccagagggagctctgcgccgggtccttccctgtggtagccccaggacacccccagcctcaacatcccattctgggactcctgccctgttcccacattcgttctacctc

SEQ ID NO: 16567 - DNA, 2300 bp, Homo sapien
catggggtatatgtatgggtttcgtatatagctaaattgtacaacctgggggtttggtgtacagattatttcatcacccacgtaataagcatagtacccagtaggtggtttttcttttctttttctttttcttttttttttttttttttgagacagagtctcactctgttacccaggctggagtgcagcagcatgatctcagctcattgcagcctctacctcccaggttcaagtgattctcctgccttaccctcccgagtagctgggattacgggtgcccaccaccatgcccggctaatttttgtgtttttagtagagacagggcttcaccctggtggtcaggctggtctcgaactcctgacctcaagtgatccatccgctttggccacccaaagtgctgggatcacagcagtttgatcacagaagttattatggttggcattctggcacacatctttctaatcttttttgttgtatgtaacctttttagtatcacaaacaacacttttataaaccttgtgtagaaatcattgttgctggtttatttccttaagatacattcagaaaacttatgaccattgttaaggatcttaattcattgccaaaccacagccaggaaagactgctaatttctactcccagcagcagggactcctcgtttcagataccaccatggattaaaggacctcccaatgctctatccttttcagattactggactctgcccgtttgtttctttgtttttgagatggagtctcgctttgtcacccagtctggagtgcaatggccccatctccgctcactgcagcctccacctccggggttcaagctattctcctgtctcagcctacctagtagctgggattacaggcatgtgctaccatgcgcggctaaattttgtattttcagtagagatggggttttgccacgttgaccaggctggtcttgaactcctgacctcaagtgatctgcctgccttgcctcccaaagtgccgggattacagtcatatgccaccaggccaggctgagctgttatttgtaaggggtgggtggggagcttttatttactgaaacatatcctgtattcattggaacatgttatcaagcctgcgcctctgggcggaggctagggcagggagggcacagctcctaaggccacctggtctttcaactcctcccagctgggacactgcaccgggaggcagcacggattcctgtgtcatcaaggtgcctgggtcttggcttagggctgaggttggggccttgggaagggtttggattccaagtcccttggctgcaaggatgcccccaagagcgaggagggccaagattaagattcgacttccttcactagggcctttgtcctcccaggagctcccaggttctctggcgattgggggggtgaggaagggttacaacgttcatttgtggtcagttagatgagaagtgactctgccagcgtcctttgacatccccggctaaaaggtgcgcctcttagagccccagcccacctgggccctcctgctctgccctcggccagcgcccctccccgagacatggcccctcggtcgggggtggggagagggagctgggggcaaaacctgctccttccttccttctcccatttccctggctcccgccggccaccctgggaccgcagccacgtctgaaagctcctcaccaggcagcgctgaagattgcggggcagcgccgagggttgttggccggcgcgcggggagtagagggcgcgggccgcagtgccgggctccggagggagctctgcgccgggtccttccctgtggtagccccaggacacccccatcctcaacatcccattctgggactcctgccctgttcccagattcgctctgcctcgagtctccaggagcttccagtggcttggttacccccgactcttcgtccatgcctcttagagcccctttcccagcctcactgggtgtcccttaatagtcttgggaccttaaggagcaagtcagcccctgcggaacctcccagtgaagagaaagagctggctgtgcggtggaacttggaagagacgacgtctgggagcttttgctgagcccagggggagaggcgtccctctggctgctgctccagctctggcagacacgccaagctttgaggtactttggttcttcattctccaccggaggtgtccccacactcggttgggctgggggccgggccagtggcccagctgtgacgctcctctgtcctgcaccagagacctgggttggcgggaagagctgggggtggcttttccatcagcaacgtggaaa

SEQ ID NO: 16568 - DNA, 2300 bp, Homo sapien
taagctcacagagatacttgtttaaataatgaactcattttgcagaagacgtaactggggcttaaagtgattaattttcccaaaggctcaaatcttgaaagataacagagcctgtctgtgtgcagaactcatgcatctaatcactcattcctcacttttattttatcacaatggggaccatagaagttgagctgaggtacttctgaaaatgaaaaagggatgttatcggttattacagccataaacccagacttgtagatatatagtgggttttactgttgctctgactataatcaatataagttgtaaagaataggaagctgcaacatatgaaatgaatatggcactttttgtttgaatgtctatatatcagattacattaacagcaagcaattatttcctcctttaagggattatatgcttatggtttgcattttatctatatctctatatttaaaagtgataaagaacttagcacccagaaaagaccaagaaaatgacaaaggagttggaagtatggtttcttttttttgtctttgtgtaggggtttttatttgtattttatttttatttttgagacagagtcttgctctgtcacccaggctacagtggagtggcatgatctcggctcactgcaacctctgtctcccaggcttaagagatcctctgatttcagcctcctgaatagctgggattacagccatatgccaccacgcctggctaatttttgttttctttgtagtagagatggggtttcaccatgttggccagactggtctcgaactcctggtctcaagtgatccatctgcctgggcttcccaaagtgttgggattagaggcgtgagcttccatgcctggctttttatttttttttatttttatttttttttgagagatgaagtctttctctgtttcctaaactggagtgtagtgagtggcatgatcatcattgactacggccttgaactcatggcctcaagtggtcctcctgcctcagcctcccaagtcactgggattgtaggcatgagccaccacacctggcgaaaatacggtctgttaaaataatttaaggaattctttctcccgctgagataaagaggggtattttaaaaatagctttaaaacctgtaaaacatggacactgaccccttatttccatccacagaaagaaagactgagagtaaatgggcttaaattgttgcaagagagtttattcatctttgaagagaagattattgatactgcagtaggccaccaagaacaagagggtgctctgtgggaccagcctgggtgggcagcagcctgttttattcatctttgaagaaaagattattgatactgcagtaggccaccaagaacaagagggtgctctgtgggaccagcctgggtgggcagaagggtagaaggaaaaggggaggagtctcccaggtgctcacaccacatcctcctcccgtgtcccagatatccgtgatcaacgggaccagcccctttgcctatgactacgacctcacccatattgttgctgcctaccaggagaggaacggtgagtcacaggtagagcccattcagccgctgctcaggactttcaaggttagtgggggcaacagagacaagcagaactggaacccttgtgatgaaaatgtcaaaacccgtgaatgctcaacgatgggagcaaatatgctgtccaggatttgtctttttcgtcctgatcttcagacctgggaccgcccccacccctccagcatcccatggtccagcaggctagtgatggttaaatgccatcattatcccaccactggcttagtgggtttctcttttaaaaaatataagcctaattgagttgttccccataccacacctatccacacctataacagatgccaaagacaaattgctgttcatgcttttcagagaaaaacagagaacgtgggtgactctccccacattagcagtccagcaggagaacaggagtgcccctgtttcctgccagaaggcacagtgtgcttattccttacagagctctaggccatggcatgtgtggactcggcacgtttgtctggtcggtggctgaggttttctctaaaagcatctacagtgttacttggcaagcagacatcatggagactatacacagacgtctcacaagggggatgactgcaaatccagtattgcttactgattttatggcatatactagtggcattattgcaataatagagggaattttaaaacaaaagtagaaaacattgccctacaaatcaactattttttcattcctttcattctttagccttctgcag

SEQ ID NO: 16569 - DNA, 2300 bp, Homo sapien
ataatgactagtccatcattgcctcagtaacttgatcatcagccctggtagcagatatccctccccgaagctgatgaaacagggcagagaggaagtatccaagagaaaagggagggaggtttctctaaaacaagacctaagagaaggaacattattgtctagaaagaaagaaataattgaaagtttctgaaaattgagatttcttcatttcaaatgaccttattattagcctgaaaaagcacacacacaaaaaatctcttccttacgtaatagtaatggtgggaatcaaaatgaatccatagatggtggatccagatgggaatgctgctacacgatagtagaattgttctgggaatccacagtgggaaaggatcagttgtagcaaaaagatccagagttgtgcagagggaccatgtcagcagtgatcacttttcagtaaccgtgctttcctgatcatcattttagcatcactgtttggcaagactgtggatggtaggagtggataccagttttttttcactgcctacatatgcttcataagctgtattttgtcttttttcctctacagacctctgtcttctttcctttcatgcccgtaatttatcaaatagatatggttttaatactttgctgatttgacatagcttcctttttcatttcattgattgctactaaaagatgcacaaggctttcaggtcctcacacgaatgatgagataagatccaacatcaagaatctgaagcaaagacactcgtggtttcagaatctataaacagagtttggtaaggccgggtgcggtggctcacgcctataatcctagcactttgggagcctgaggtgggcggatcacccgaggtcaggagttcaagatcagcctggccaacatggtgagacccagtctctactaaaaataaaaaaattagctgggcatggtggtgggcacttgtaatcccagctcctcaggaggctgaggcaggacaattccttgaccctgggaggcggaggttgtagtgagccgtgattgcgtcactgcactccagcctgggcgatagagttagaccccggctcaaaaaaaaacaaaaaaaaatagagcttggtgattttctgttgagtttgagtttgttggaggaatgcataatgattaggattaggtgtttttctattttaacaagttgacttctagagacatagaagactattctgacatgctacttaaaatttccatacaaattcaggcatatttgtaaaaaagaaaaaaatatcagtgcaaaataagcaagatcacatgagacaactgaaaggcacaaatactatccagatgttttttgttattgcccatttattttggccagtgaacatttgaaaggcccagatatgaagttcagggaccatgcactttgtgtctctccccagtattaatgcacttacatctatctgcttttctcttttagtggaggagataatgcctgttgtgtacagcaagacagtgggtcattgtgtatttacagaagtgatgtggattcctcccagactcattagtgaccagggctgctgggcctgtttgggtttcctagactagagaagaagacaggaaccaggatgggaagacggacatgttacattttaagctggagcttcccctgcagtccacggagcacgttctcggtgtgcagctcatcctgactttctcctatcgattacacgtgagtcagtccgctgggaggctgtcctctcccttgtgtctttttagtagaccagagtccttcttctgatttctagaagacccgcactctagcgggccctcttccccatgtagtttgggatttaacttaggccaatggaatggttttcactagtcatattaactgacatgggctattaatagctcagaaggttctaggcagtgtttcctgcatggctacgctaggtatgtgagggcctcttaggtttcagccaagacaggtgactcttagcacccagagcccttcagatctgatggcggttggtattgttggtccttctaatgatttcagaggatggcgaccctcgtgatgcagagcatggcgtttctccagtcctcctttcctgtcccgggatcccagttatacgtgaacggagacctgaggctgcagcagaagcagccgctgagctgtggtggcctagatgcccgatacaacgtaagagcgcttctcattgtccagctcctttgtttctctgtgttactgttcattaagttctttaaagaggggaatgaaaagtagaaatgtcaggccaggcgcagtggctcatacctgtaatcc

SEQ ID NO: 16570 - DNA, 2300 bp, Homo sapien
ctggaagccccaccccacctccacttgtctcatctttcagtactgaaccaatgtacatcttacacgtattgattgatgtcttatgtctccctaaatgtataaactcaagttataccctatccaccttgggcgtatgtcatcaggacctcctgaggctgtgtcacaggcatgtccttaaccttggcaaaataaatttctacgttgattgagacttgtctcagatacattttggtttacactactgacatgctgtcattagagtgacttttccaaatcacaaagcttatcatgtctttccacttaaatgtcattttactgaccctttaacaaatttacttatatttaaatattttgtatttatttttttagagacaaggtctccttctgtctcccagcctggagtgcagtagtgcattcatggctcactgcagcctcctgggctcaagccttcctcctgcccaggcctcccgagtagctggacctacaggcatgagccactgtgctcagccactcaggacctttttgttgttgttgttgttgtttgagatggagtctcgctgccacccaggctggagtccaatgtgtgatctccgctcactgtaatctgtgcctcccgggttcaagcgattctcctgcctcagcctccagagtagctgggattacaggtgcccatcaccatgcctggctaatttttgtatttttagtagagatgagggttcaccatgttggccaggctggtcttgaacccctgacctcaggtgatccgcccaccttggcctcccaaagtgttgggattacaggcgtgagccaccgtgcccagccattcagggccatttgatgaagaaattggctgtggaccatagatttttttaaaaagtccttctaccatgttagaaatattggttgggggtggtggcgggggggtgtaggcattcaattaagcaataagccagtgatctttggggaggaccatatattcctgtaaaactcgcggctgagctgtacccaacacagggttaacgaagtgcatcagagctttgtagtaattccactctatccgtggaagagccaggggatttgtgtttccgtgtctgtcttgcatgggagcatagtggaagcaacagaaaatctgggggcaaaagcacctggctttgatctcagcccaggaccaggtccaggaccacggccaggcttgtgactgactggacttcagtaggaaccacactgggggttaacagatgacacaaaagcaggtgttcgttctgtgcgggagacgcgctaggggagaagaaaaggcacacacacagtacctttaagggtaagcaagctttatcccacgtaaatggcaatgcagatattataataagcaaattaatataataagcagattgatataataagcaaattgcaatgggaagaggagaaggaaaaagacatatatatatatatatttacactcaccagactatggaggattcacctccagactgggaagcaacgacctgggctccagagccggccactcgtcagtgcacagacgaggagaggtctcatgaagctttttggcgtggtctgggaccctagatctttttgtaacatgttgtctagcatgaggcccagtcacgagggccctttgcgactgggctcaaggaacacaaaaaggtcaacttgtttttgcgattgttgtttttcaataactgacgtataggagtagactgaaatagagatttctccgaaacagcgctggatgaacgcctcaaggggctcccacaacctgtttagggacttggtgaccattgtttgtgtccatgtcagttgaaatttaaatatttagttcttcctcctcagtgttcaagtcaacttttatgggcatcttattttacacaaatgttaacacagacaacagccacgactctggtccacggaaacgttctatcgccgcccagcctttacgcaaacgtacacagctcgaaaagctaggccgaccgtccccggcagcgccacgcccgctaaccccgcccccgccactggctcctttcggtgcggccttgctattggctcctttctgtgagccgtcggttgccgtggagaccgaggcgatggcaaccaggagaagccaaacttggtcccccggctcgcggagtgcctgcgagcggtgctcatggcgctctatgagctcttctctcacccggtcgagcgcagttaccgcgcggggctctgctccaaagccgcgctgttcctgctgctggccgctgcgctcacgtacatcccgccgctgctggtggccttccggagccacg

SEQ ID NO: 16571 - DNA, 2300 bp, Homo sapien
ttattcagctccagccacaggggttccctagaatatgccaggcactttatctaattagcattccatcccaccacactctctagtcacctactgtgctttatttttcgaaatagcacctatcattacctaacatacttattttttgtcttatcccactagaatatgtcagggggacaagaatatctcatgctgccacccatgagaatagggatgtcatctgtcttcttcactgtttttccccagcacctagcacagagctcttgtatgtaacaataatttctaagtaggaaattcaaaggattttttccacttcattaaaaacaaacaaacagatgcagtggctcacacctgtaatcctagcactttgggaggccgaggcgggcaaatcacttacttgaggtgagaagttcaagaccagcctggcgaacatgacaaaaccccatctctaccaaaaatacaaaaattagctgggtgtggtggtgtgtccctgtagtcccagctactcaggaggctgaggcagcagaatcgcttgaacccaggaggcagactgcagtaagccaagattgtgccactgaactccagcctgggtgacagagaaagaccctgtctccaaaaaacaaaaacaaaaacaaagaaacaaaaaaacctattctagttactcagacacacagtcttaaaataacaaaaatacttatagaatgaagctagattccacagcatcgatcaggaatttccagtgtaggaaatgatgaactaccacattcaaacatacaggctttacaggtgcatcagaatcacaagcacgtggcagggttcatgtgcccaattaagtgaatattcctgctacatgttcagcagcttataaacagatggtgacccagaccagactgccttgatgagtctgcttggaaaaaaggcattacatcactgattggagaacctcaaagcatatgtccgggcaggtgacacacacacagctcaggctgtgattgctaaaccactcccacagccaaataaggaaacccatctcatgaccagctctcaggggaattctccgagtctgacagtcacctctaactcctctgccagttaaaattaaggggtctgtgatcagtgatgttacactcctcaaatgtgcatttttttttgaggcggagtcttgctctgttgcccaggctggagtgcagtggtgtgatctcggctcactgccacctccacctccctggttcaaacgattctcctgcctcagcctcccgaggagctgggactacaggcgcccactaccatgcctggctaatttttgtatttttagtagagacggggtttcaccatgttggccaggctggtcttcaactcctgacctcaggtgatccacccgcgtcggcctcccaaagtgttgggattacaggcgtgagccaccgtaccccgcctcaaatgtgcatttgtgataccttttcgtaaatgtttattcaaatatttattcacgaataaaggaagaaaacgggatttgtttaaattcaatttctaggtccaagacaacctactacggctgtccctaatacggacctccgggttgtcctcagtgccgcttccaacagtgtcctcaaacaccctcccctcccataatgagcccccaacctgtcaccactccgagcaatactccccaaactgtcaacgccctaaacagctcccttgttatcgccaagctctagaaagccctccttatgtcattcttacccctaaagaccgttcttgtcaccaattccccagacttcccctatgaaccgctctaagagccctcagctatcagccacacccccaaacagccctcagtaagagccctacactatcagccagacgttttccgccaccaacgctcccgagaccccactcctgtcaccagttccccgaacattcctgcgagcaatgtcgcagatactgctcacagacgtccccataaccaacttcttcgccaccgcagcccaggagcccccaaaggggtcctccgcggccccgcccctttacgtgcggccccgccccttggcgtggcgccctgacaaatggcgccggaagccccgcccccggccggttgctaggctccgacagccggaagtcccgcctgccgtgtagtcgccgccgtcgctgccgctgccgctgccgccgtcgttgttgttgtgctcggtgcgctgagctccgcggctccgcgagccggttccgtccccttcccgccgccgccatgaagtggatgttcaaggaggaccactcgctgggtaagcacttggtcgtcggcccggctgctg

SEQ ID NO: 16572 - DNA, 2300 bp, Homo sapien
cgttacagcctgggtaggagagtgagactccatctcaaaaaaaaaaaaagtaccgagaaggcattcactgaagtattatttaagcagtaaatgtgtagtagtcacaaatctgacaccagatttgcagtttgaaaagattagtcttgctgctctgtggaaaatgaattggagttaagcaagaaaaggtggaaattcagagatgagtgtagcaatccaagaggaatacgatagtggcttttactagcgtattggcatgcaagtggagagaaatggatggattcaagagataggaagtaagatcaacaggacttggtaatggattgcactaaggggattaagggaagggagataacaaggaacatgactcactttttagttacgcaactagattgctagtaataccaatccctgagataaagaaccctagaagaaggtctttgataccccttacccccactggaatatttcttaaaagacagaagaggcagtcacttgcagattaaagatattggagaggaatgaggagcaaagtctttggccttggaggagggccatgtcccatttcctttgaactagagagaaggatggggttgagcaagttgcataaatttttgaggggtaacaaagaaaaatgaattctttcatttttagtaatagagcattcagttactgggtgacaaaggcccctgaagtatccaggcagctatattacttattcccggcaatccaaaggtttttagacctgttctgcccactacactgtagtagtactgtactacagtagccagtagccacatgtgactatccagcatctgaaatgtggctgatccaaattgggatgtattctaagtgtaacacacaccagatttcttaaacttcgcattaaaaacagaacagaacataagtattttttaaaatattgagactcggcagccaggtgcggtggctcacgcctgtaatccagcactttgggaggccgaggcgggcagatcacgaggtcaggagatcgagaccatcctggctaacatggtgaaaccccgtatctactaaaaatacaaaaattagcctgacgtggtggcaggcacctgtagtcccagctactcgcgaggctgaggcaggagaatggcgtgaacctgggaggcggagcttgcagtgagcagagattgcgccactgcactccagcctgggtgacagagcgagactccgtctcaaaaaaaaaaaaaaaaaaaaaaaaaatatatatatatatatatatgagacagacagaccgaccccgggcatcgtgactcacgcctgtaatcccagcactctgggaggttgaggcgggcggatcacttgaggtcaggagttcgagaccagcctggtaacatggcgaaaccccgtctctactaaaaataacaaaaatgagccgggtgtgatggcgggcgcctgtaatcccagctacttgggaggctgaggcaggagaatcgcttgaagccaggagacggaggttgcagtgcgccgaaattgcgccgcttccagcctgggcgacaaagcgagactccatctcaaaaaattttttgattatatgttgaaataatactatttgggatgtatgggttaaataaaatatatatgattgtttctattttgacttttaatgaggctactggaaatttttaaattacgtatatggttcgaattatatatctattggacagtgatgttacagatagaaatacagcatagtcaggagaatcgcttgaaccgggaggcgaaggttgcagtgagccgagatcgcgcctctacactccagcctgagcaacagagcaagactccgtctcaaaaaaaaaaaagaaaaagaaaaaaattcagccgagtgctgcaagatacgtcattctagttgaaggaatatctaagccaacaagcggctcccatcatccggtttcacgcctctctaagacgcagccagggctgcgggacttgaagcgcgggaatctcggccctggcaccgactccccggaaaaactacagggcccggcatgcactgcgcgcctctgggagcgggagccgaaaggaaccggcgctttgtgacgtcacgtccgccttaccggcggattaagctcgctttcttctaggcgcgtttcctgaaggtgggaggggagcgtccgcgaggcgctggggcgacggggcaggtttatccgggctaactttgccgagtctgtttttgagggaagaggttgtgaggatcgtatcttccgggacgcgtttcacgtgggaaggcgctccacgcctggaactgtcagcagccggcgcctgaa

SEQ ID NO: 16573 - DNA, 2300 bp, Homo sapien
gacgccagcctgggcaacaaggtcaaatcccgtctctactaaaacacaaaaatttaaccgggtgttgtggcatgcacctgtagtcccaggtacttgggaggctgaagcaccagaattgcttgaacccgggagttgcaagttgccgtgggctgaaatcgcaccgctgcaatccagccggggcaacaacgactctgcctccaaaaaaaaaaaaaaaaaaaaaaagtcagtaaagaggaattaaccagttttttccgtttacctaaaaacacactctgaactggaaaccgtgctttcacctgtgatatacagtcctaaagttcaattcaatgtaattgattatcataggtggtttgaaagaatgaactaaactttaggatcgtatatcacagatataccacattcaattaaatttgacttaataaagtcaagtcaattttctctaaggtagcagtccaaagaccaggttccaaacttttatggaagtccatcggattgctctaataaaggacaatatattaaggtcctacccaactataaacttcgacaatttctcttatactttttctaagatatttgaagcacaaagccagggacacaaaaggaaacatcaggccaggggtggtggctcaggctcacgcctgtcatcccagcactttgggaggccaaggtgggcggatcacaaggtaacgagattgagaccatcctgcccaacatggtgaaaccctgtctctactaaaaatacaaaaattggccagccatggtggcacacgcctgtaatcccagctactcgggaggctgaggcaggagaatcgcttgaaccctggcagcgaaggttgcagtgagctgagatcgcgccactgcactccagcctggcgacagagcgagactccatcttaaaaaaaaaaaaaaagaaacatcatttctcttttctttttcattcagggtctggctccgtctcagtaactccttggggaaagcgatggagaagggctcgctcacgcagcacttctggcagtccctgaaggaccactacctcaagtctcccaggctggagtgcagtggcacgacttcagcacactgcaacctccgcctcctgggttaaagcgattctcctgcctcagtctcccgagtagctgggataacaagtgcgcgccacggggattaagccctctcgtatgcctctggaatggtactatgtaccatcttcctagcaatgataaaacactcaattacctgtgttctgtggttcaaatggggaacgctaatgagaatataagacagccagttaaagggtggctaatcctgacttatctatgttaacctacatactccagggatttgggagtggttaacaaagatatcaggctgaattaagatggtctctactgttagacgttgatcacttaatactcacaggtatctactgaataacccatacgggtagatgcatgacagttttagaactgatcccttttaatacataacgttcagaatgaccttagtgaggcccagaaaattttgaaggtctttctgaaaagctagggtatttaacatttctccaacttccacgtttactgagtggctcaacaaaagaatgcatttctcagaaaggaggatgaagctaagcaggaagtttcgcttttcttttctgataactcttagttctcgtcctagttcctcctccacagtctcttaactctaggagtatgatagggagcatcccgccggtgccagctgggaacggggagccggcgtgcccggggtatcccggggtacgtggtctgcagggcgcagccaccacgtctcagcatgtgcgtacccacgagagccggcaagaaggccccggcacagcagccttggtgggaacctcgcggcgcttcccagcccagactctcctaccgcaaaggctttaaagactcgcagcgacactcacttcttgctcagtttcggctcgctgccatccactttcacctcggccgcctgcacggccgccatcttcccggagggcccgacccaaaagtaaggaggatagtacgttaatttccaggtcaaggtgcgaagccccacctcttccgggggagagggggcgggcactctcgatgcgccgcggctgctgctgcgcaggcccagtgctgcgcttcgcggcagaggcgtctgcggtgacagctcagtcagttgagctctgtgtgccaggcgctcgcgagggggtagctcttctagtagtgctcggcgtcagacatggcggaggcgatggatttgggcaaagaccccaacgggcccacccattcctcgactctgtt

SEQ ID NO: 16574 - DNA, 2300 bp, Homo sapien
gcaagaccaggaagagaccttccaactgccgagaaccttcttaagtccataggcattcagttacgccagagcattaaagtaagtctggtacgcctttatactgaatctacctgaacataacagcaatcttttttaaaaaggagtctgtggaatatctcttaaaagaaacacaagaagccagttagcccgtgggtagctggtggacaggaaggacgagataatttttttttttttttgagatggagtcttgctctgtcacccacgctggagagcagtggcgcagtctcggctcactgcaacctccgccccccgggttcaagcaattctcctgcctcagcctcctgagtagctgggactacaggaactctccgccacggccggctaatttttgtatttttagtaggggcggcatttcgccatgttggtcaggctcgtctcgatctccttacctcaggtgatccgcccgcctcggcctcccaaagtgctgggattacaagcttgagccgccgcgcccggccaagagagaattttctatatactttttgtaacttttgaatatagaaccatgtcaatattctagtcaatggtaaagtaaattaaaactagaccaagaagctgggtgtgatggctcacgcctgtaatcccaacactttgggacaccgagacgggaggatcgcttgagcccaagagttcgagacctgtcagggcaacacaacgagacccccatctctacaacaattttttttttaatttagcgggacgtggtggcgcgggagtgtagttccagctacttgggaggctgaagccggagattcgcttgagcccaggaggtccaggatgcagtaggtcgtgatcgcgcggctgcatcacagcctgggcgacggagcgagcccccactcaaaaattaaaaaataaaaacgacgagaggccagacgtggtggctcactcctgtaatcccaacactttgggtggccgaggcaggaggatcgcttgagctcaggagttcagaccagcttaggtaacagagacccatcgcaaaaaaagaacaataataaacaacaagggagcgagaaggcaagaaaatggtgcaaatttacccggatgtcaacagggggcggggccaagcgctgctaccgaagatgccaagatggacgccaggcagccaggagaaagatcccaaccccacccgcgcagatatccgcgaggccccgcgctcagcctcctcacccccgctatccgcggcctccgggtcctcctccgccttccgcttgagcttctgggaggaggggctcaccggcgcgtcccccagcaggtacttatgctcctggccccgcaggtgcttgaggtagcggtccttcagggactgccacgagtgctgcgtgagcgagctcttctccatcgctttccacaaggcgttaccggtgacggagctgggcgagcgggcattttccttcacgtaggtaaggatggctacgtcgtccgcatccgtgaaggcgatccgcccggcgtgccgctgcggctccggctccgcggcgccctcggccagggccccgggctttgcttccgagccggtgtccgccgccgaggcggggcccagccgataggcctccagctccagcctctcgttgcgctccacgcagtccaggatgtactgcgtggagatgaaatcacccgaggcctcggccagcgcctccccgggctgggccagcagcacggccccgggctcctgcactcggcacacggtgccgccgccgtgcaggatgagcgtcgacagccgacgcttggccgggctgggccgcacgtagaaggacatggagctgccgtcgtccctcacgaacagagtcgaggaatgggtgggcccgttggggtctttgcccaaatccatcgcctccgccatgtctgacgccgagcactactagaagagctaccccctcgcgagcgcctggcacacagagctcaactgactgagctgtcaccgcagacgcctctgccgcgaagcgcagcactgggcctgcgcagcagcagccgcggcgcatcgagagtgcccgccccctctcccccggaagaggtggggcttcgcaccttgacctggaaattaacgtactatcctccttacttttgggtcgggccctccgggaagatggcggccgtgcaggcggccgaggtgaaagtggatggcagcgagccgaaactgagcaagaagtgagtgtcgctgcgagtctttaaagcctttgcggtaggagagtctgggctgggaagcgccgcgaggttcccaccaaggctgctgtgccggggccttc

SEQ ID NO: 16575 - DNA, 2300 bp, Homo sapien
tagcccattgatatggaaaaatccgccagtattggtcactataataatttatacattgtcccaaagaagttattattgttataaaatgtttatttttcatttttgctatgtgtacttatccatttaagatgcattctctaatttgttttaagagaacaattaaatacaatattgtaacaacgagacaacttttttcttctggagagcccacaaccgtcccacagacatgatattttcttcaaaggactgatataattattcaattagataacaaatggcatatagtatgtgttcagtaaaatttaatctccttcaataattagttaacataaactgttaatttatatctgcttttacttagcatatgattgaaaaaataaaatcaggaatgcaagtctaggaacacagaataaacactcaacccatgacctttctttattttattgtatttatcctttttttttttttttttttttttgagacagagtctcgctctattggccaggctggagtgcagtggtgtaatcttggttcactgcaacctctgcctcccgggttcaagcgaattcctgcctcagcctcccaagtagttgggattacagttgcctgcgaccacaccctgctattttttttatttttagtagagatgggatctcaccatgttggccaggctggtctcgaactcctgacctcaagtgatttgcccaccttggcctcccaaagtgtttgctgtgttttcctagggcctaaggtttttgctgccactgacaagggtcaggaaggaggtatactctgatttaggggcaataagtcctagggtgagagcagtaaaactggagtcagaaaagccaaatccagtcctcagcatttattactaactctatgacctcttcgaatcatttaaattctctgttcttgttttctcttgtaaaacaggaaaagaaaaaagatgcattctgctttgtttgcaggcatgagctaaacaagcatgtttagttcttacgggtatttctgtcattttctcactctttgacaaacctatctgatctttgacaaacccactctcattattccataagaaagtggtgttaaaggcttatgtttcttccaatttgtgattaccaagaggcacttaagaactccaggatttccatttgtataaaatctagcacattatcagtaaaacatcttgacatttattttaaatagattatttatctgctatgaaccatgtgacatgcttcttgttatgtgatagtaactccattatttagacattttaaaattccattcaagaaacagttgtatccatggaccagccattcaaagagtaatttttctttaatcattgatcttccaaattcaactttactcctctctcctttaagtcacctgaattacatcgtcacattgttcagtgtttgtgtgaatgtgtatgcatgtgtgtatgtggtggtggtggaggtccctttcttcagtattccctcatttcctactttgggcctttttggaaatgttattaaaaattttgattatagaatggtacttcatattcacagcatgatgcattcatcaacataaatctagccaaagcatttcatttgtggatttatacacctgaagcattaaaataagaaatgttaatttcttgcagactactaccagatgattttaaatatctgctaagcaggaatgtctgttcccatgtggggaatttccataataaaatcctggcaccctcgctgaagagtacagttttatagaaacagagaaaaacaacagcaagtattttccctgaggacggttttagctacaatttcccaatgctgcttagttatttctgtcttattttatgcttttgttttgaaacataatgcaattttacctggatgcactcccggataatcaggaatggctcagtgtgttttctggctcttgcaaatgcaagacctccagaaaatcagaaggctccaccgccttgtcccttcccccactcacacctccagctgggagaaaagggttaaggattattggaaaatagaagagaagggagggagccccaaggaggcccacgaacgggaggccgcgcctctgggtgcagcggagctcgagcgctgttgtgtgtttggaaggaaggatgctgctgccaatttgtgggaccgctgctgcgaggagtgggcgtggcctcggcggtgtggatgcttgttaggaaagatgctgagtgcttttcagtgaggagtcagggaggtgtgtgtgagagagagagagaaaagagagagacagagacggggagagagaga

SEQ ID NO: 16576 - DNA, 2300 bp, Homo sapien
tctggactttaaatagttgctattaaacctctaaaatcaatcagcccctggctgttctgtcattagaagttaactgccttcccattaatccattaattgtgaagattaattggaaaagctattcaaactcaggctataacttggagcatgtaagccagtgtttgcctccaaatgaaagcttaggtcaataacatcacagagaattaacagttatatataaattctactcatgtctcctataagagaaaatgcatagaaatttataggctgctgtctaaatgaattacttgacaattagaaaattatccctgtcttagtagtttagctctaggaaaacatactgatagttacttgttttaaattgcaggaacattttttttttagatttaagccaatgactgacagaattagaagctcatgtttgtgttatttcaaatatctaaaaccaggattctcaagtaaatgttaattttcatgtcaatgtcaaattaatacttaaagaagctaaagaactgcatagtagtctacactcgtggcatttaatcgagttgaaatatcattttaggtaatgatgagaggatgagagacgatgccaggattggctcatatttcatcacctatgcttagaaaaattatattttattcaatcctaggtgtattgtcagttttccctaaacttattctctttctcatcagaatgtgacagtgcagcagcttcctccacacaccgtcaggcaccatggctactacatagggagagaggggtggggtgtcacaccacaaaagttccttcagtccttcgggctgtgttccttcacagtcccgtgaaacagtatggaaagcataaggacattatgaaaggaacaatgctcatcactggacagaaattaatttgcagctctattttagtggtttccagactagcatggttctggctgtgggacacaatcatgggaaatttgacatctccccgaggtgatgctaccaggcagttaggatgaatcactgaagatgcacactacagagatgcgacaaccctgcaacctggagctaagccatagaattttatttttatttttaattttattttagagatggggtcttgctctgttgtccaggctggtgtgcagtggtgcgatcatagctcagggcagcctcgaactcctgggctcaagagaccctcctgcctcagccgtctgagtagctaggattccaggctaatttttttttttttttaaagagatggggcttgacatcttgcttaggctgatcttgaactcctggcctcaagagatcttcccaccttggccttgaaagtgctgggattacaagcatgagcgagcacacctggcctataatactttttaccaggtggctgatgctgctttttaaacatacttgtgtcttctgggtgcttaaaatggactttggtggctcttttttggtgttgagtgtagactgtacagctgcagctgtgaggatgagatggcagagctgggggaaagctccagggtatggagataaatgatgcccacccaaaggaaatcaagcagaggctgtttatttagagtttgctgcagcaaggtggttggccaccaccatttgagtttggcagagactcaaaggcaggcagaggagaggaaactttacactggagtaaaggggcaggctcaggtatgccctggttggaggccttggctaggggaggctgtaggcaggctgaccagaagtggggcatcctatgggattagttagaggtatacatttggctttctctatacttagtaaaatttctaaatatttcctaaacatattcagctggttctaaattggaaacatgggcaaaaatgagggaagctgtaagttattaagtcctggctatttggggctgataggatttggctgtgtccccattcaaatctcaacttgaattgtatctcccagaattcccacgtgttgtgacagggacccaggtggaggtaattgaattggggtttgggcggagggggtggtccgggctttcccgtgctattctcgtgatagtgagtaagtgtcatgagatctgatgggttgctcaggggtttccgcttttgctgcttcctcattttctcttgcagccgccatgattctgaggccttcccagctatgtggaactgtgagtccggttaagtctctttttcttccccgtctcgggtatgtctttatcagcagcatggaaacggactaaaacaggggccagttgctacaggagttattatttggcttcttgcactggttgcttcagacagaagtctggcttc

SEQ ID NO: 16577 - DNA, 2300 bp, Homo sapien
aagcaatatatgtgatacacataaaagggtagatagacgataaatatgtatatgcattaatatgtatgtatacacattgatacatatgtaaatgtatgtgcatgtgtaatatattttatatgaaacatcataattataagcctttgactatgccactattaccacaaagggatcccaatccagagcccaagaaagggttcttgaatcttgcgaaagaaagctttcagagcgagtccgcagtgcaaagcaaaagcaagtttattaagaaagtaaagtggtgaaagttcagtgactcgatagacagagtagggcattcacgaaagtaggaggaataatgcggtcacccttggtacaaatacttgtgtgtatatgtgtatacacacatatgtataggattagaaaagatcatggggagatgagctctgctacaagggtttgtgataaaggattaattttcttaactactacattttgcaagaatcaatgaatatctttaaagcaaaattagggatgcttttgttctcaaattattgggacatcaggacacgcccaagtctgggtctgttaagtaaacgttatcaatcggttcccttaaccataagcatctggaggctaggaatacctcactttctgggaatgcagcccagcaagtctcagcctcattttcctagccctcactcaagatggtgtcactctggttctaacacctctgagaccacctatccccaaattagagcattccatcacattaaaactgtatacatgtgtgttgattctgcttttttctcaaggtaaccaagatcctgaattttataattttcatttttttttgtaaaagtagttttttaaactcatatatgtccctaaacaacatacagtattacttagctttgctttttaagattctcaaaacgatcaacatattacatattattttataacttgattttgttttcctcaaaaatgtcgcttctaagattcaactattttgttttgtgttgttgttgtttcttttactggcgtgtattatactgttgtgaaaagcactgttttatttgttctttggccattgggtatctggtcgttaattttttgtttgtttgtttgctattatgagcaacgttgctagaaatcatacatgtctcctggtgcacaaatgcaagctcctctgagtacatttttatttccataggacacaaaattactaatatttatatatcacctttgggtaaaaagacaaaactccttgaggctgggggttcatcataggaggacctacgtatatcaaagggactggtggaacatagggtatgggaaagttcaaatatacgtctaatgacaagttgtttttataaaagtagttgctcaagtttatactcccacgagcaatgtgtcagagtttctcttggcctacattttgctagtctaatgtccataaactagtatccttttgtagtcccagtttacatctctttttgctgatatatttgaggatcaatttatataggatctgtgctgtgaagtctgttttttgagacagcgtcttactccgtcacccaggctggagtgcagtggtgtgatctcggctcactgcaacctctgcctctcaggttaaagcgattctcctgcctcagcctccctagcagctgagactacaggcgtgtgccaccacaccctgctaatttttttatttctggtagagatggggtttcaccatgttggctaggcttgtcttgaactcctgacatccagtaatgcacctgcctcagcctcccaaagtgctgggaccacaggtgtgagccaccacgccaggctgtgctgtgaagtctgatcgtgccttgtgttatttttgttaatgtgtgtcatgatttaaaggtggtttttgttttactttattttgtgttttattttcctttatttggaatactaattgtatactgggttataggttttgcaagtactttctccattttgtgatttttctttttaatttctttacagtgtcttttggaaaccttaagtatttaattttcatacagttaaatttgtgaatcttttataatgaggtataatcttttctaccttaagatattgttttattatataattttatgatttttaaagtattttcatattctcctgtctttaagttttttcttttctcattgaacttactagacttctagtaagccctggaagtagtaggcatatttttagagatcttagatcctagtttttgatgttgttgttttacttgttggttgttttgtctattgattccacgaaagcctcagcactaa

SEQ ID NO: 16578 - DNA, 2300 bp, Homo sapien
tcacttctgtgctcccagtccctctcaaccattcagacatgttgattacttcagtattttgggcacgatgagaaaaatatgggcctcttgagcaatactccaggtagctgaaggagtcagatgctctctcactatgctgtaactttcccttgtgggagaaacagcaaacaagtagggtgtctctcggcactgagcgatgctgtctcaggggtggaaaactcctttcctgccattttgctgacatcacctctatagatacctttcagatgttttattaaaagcttaggccgagcgcggtggctcacgcctgtaatcccagcacttcgggaggctgaggtgggcggatcacgaggtcaggagatcgagaccatggtgaaaccccatctctactaaaattacaaaaaattagccaggcacggtggcaggcgcctgtagtcctagctactcgggaggctgaggcaggagaatggcgtgaacccgggaggcggagcttacagtgagctgagatcgcgccactgcactcgagcctgggcgacagagcgagactccgtctcaaaaacaaaaacaaaaaagtttaatgatgagtaggtacagaaaataaatgtacaaaatgtatatgagattcgtgttctgatgacatacatttaaaaatatgttatgtattgcttcgtgtattacttcaacaaatattaactgccaaatttgtttcaggcttgaatcaacgatgcagaatgctgagaataaagtgataagtgatgcgtaacccttacccttggggaaacaaaatgtgtttcttttagctagacagatgaaattaataaaacctggggcataagatgagttatactaaagagtttagccttttcccaaagactctggaaagcagatagagaatctggttcatgtaattacatgtttatataggaaatatcactctggttttaggtaaaaatgaagggaggggaaaaagagtgagagtgaagtatggagatcagaatggagttgatacagtcacgctgggcgcggtggctcactcctgtaatcccagaactttgggaggcagaggcagaggcagacagatcacgaggtcagggaatcgagactatcctggctaacacagtgaaaccctgtctctattaaacatacaaaaaaattagttgggtgtggtggcaggcgcaggcgcctgtagtcccagctactcgggaggctgaggcaggagaatggtgtgaacctgggaggcggagcttgcagtgagccgagatcgcgctactgcgctccagcctgggtgacaagtgagactccgtctcaaaaagaaaaaaaaaaaaatgaagttgatacagtcaaaggtgggatatgatagctcccaaattagggctcatgactatgaattaaggaaagtagatgcattttagaaatatttatgatgtgaacttgcctaatttggttagtagatattgcagagataagaaagaaaaaagagattttaaaaaagctttatagcaaattaatgggacacccaagttaaacatttaaccagttttttatatacagtcttgaaacgtcctaaagatggaagttttcacttgtcagttcatatatgtagtatcataattagtctactcatgttgtgttaatttagtatttaatactttaaataagaaatatgaggcaatagctcgtattatgaaacttttttcaacctgcacagaaaaggttttgaaacctagtgtattagctattgcttaaaacaatacaatttattatctcatgttttctgtgtcatgagttgaagaataatttagtttgggtcccgtttagggtttaacaaagctgcaatcaatatgttagccagagtactagtctcatctaaggctcagttgaagaaggaacttcctttaagctcatgtgattgttggcaaaattcagtcttcttgcaggttatcggaatgagggttatgacttttttaccagctgctggacagaggccaccctcagttggttgtcatgtggccctctccatattctaactcacaagatgctccgacctcccgcctgtgcgccccagtggcgcgaaccggagtgcgcctgcgcgcgggccacaaagcgcttgcagccgggagctgcgcggccgcgctgagagtcacgtggtgcgccaggaagccgcctagcttcttggagagctcactgcctcgctccgctcctttcctggcgggaggctctgagccacccccacctgcgcagggcggccaggggtgagtgtccactaggagcgtcgcgcccacccggactgtccacgctgg

SEQ ID NO: 16579 - DNA, 2300 bp, Homo sapien
atccaaaagaaagttctgtgtgtgtgtttttaagtcagtcgagtttattaaaagtaattgtttaatgagaaagctttgtcagctgggtgtgggattacctgcagcacaaaccaggctcgtacggagtgcctcatcagtcactgtgatcaggaaatgttgataacaagcccagaacaggcaccacacactgtccacagcagcaggatgcctttgcttacattgagaaaaggagatcctaggcaatttgtggctttagaagaccaagtactcatccagtaatttaccttgccttgggctgctgccttatgttggatgcaggtgtctctggtgatggcctgtgcagtcacattcgagtgggtcacagggacactggcaaggccagggaagggcagggcatatcaacgagcaaaattagcccatctagctcccttgtccctccctgccctacaatcacattaaacctgccttattcaatttatgccgaagagctttagttgatttacaaaggattaatagatgttacttgaggaaatgtctccatagtctgaatgttgggaccattggattataaaagatgaagcacattatttttctaaacttctctggagtttcaatgccctgaggctccaggtgtgagatctgtgagctcttctcacacttgtataaacaaagaacgcttcatctgtgtctcgtctcatcggatcagtgtttttgcaataacatacttgtgaaactttgttttaaggtggcacctcctaaacttgtttatattttagattctctccagataaaagcaacaaactcctttggaataatagtaatattagtagctatcactgagaatctactatatgctgaacgtaccgtttgctgtggactgaatgtttgtgtcctccacttccaaatttatgtagaaacactaacctccaatgtgatggtatttataggtggggtctttgggaggaaattagggtcagatgagtcataaagatggggtgcccatgatgggattactgcccttacaaaaaaaagagaggagaagcaagtatctttttcacttcgtgcatgcaccatggaaaggccatgtggagacacaacaaggaagaggaccctcgccgagaaccaaaccatgctggcaccctgatctctaatggcccatctagtctctagaaccattaaaaaaaccaaacaaaaagtttcttgtttaagccatccaatctatggtaattggttaagcagccctaactgacttagatgcttttctaagcagtttaattctcacaatgaaataggtaaggaacctgaaacagaagcaacataagttatttgcacaagatcacggaactattaagtggcacctccaagattcaaaggcaggcagtctaatgttatatatttacagacatgatagacattgggaaggagaaacacacagggccttcggttgggtctcatgggagataagtgatatgtatatgggaggtttattggagaatgctcttggtacaaaatgcatgagaggctgagaagcaggaatgagaggagggagatagtgaacagttatgcaatcacagcagaggccttagccaatgtgatgggcaggactagagctaggatgatctcgtgaagatgttccaaattcagagaaggaagcaagagtttataacccatgctcctctactgacctattgctggacatgggcttgtctctgtgagtaaggtataatcttgaatggtatagcaccgtttggctgagggcaaggcttgaagaggggcagctggggagccattagcagccaatattcccagcagatggaagtaactcatctgttagttaaggggtcatcttggtagtgcaccactgcatcacctgcatacagggacataaatagggaaattgtgccaaatcaaaaggattaaggaaagatgctcctcaagaaatcatgacaaagatgctgtctaaaggaggagaaggatttaaccattccagaagagcaatgaggctttctaaggagaggaagaagcacacgcaaataatctgtgaaatgattaacaggttgtgtttgaggaattttaaaagccagggtggctgaagcagaaagcacaatgagtgcttggtgtggacgtgggagcagattatgcggagcttttgtgaagaggtaaggatgtcacctttattcacagaacaacaggaaactcttgaaccattgtaagtacaggaatgacaatggtaagatttatccttcaaaagattattctgactcaaggattgggactgaatgagacattgaagaggatgt

SEQ ID NO: 16580 - DNA, 2300 bp, Homo sapien
atgcacctaatttcatttctaaaatcaggaaaatgtgtgaatttaaaacacatctggcactaagggtttcagataagagactgtgtgacaattgttcttagttctgccattttccctggaaaacaatctttaaagttcacagagcacatcagcaagaatttttaaaaggagcctaattgtgatatggttttgttgaaatacaaggcaggtgtaaaaggaaaataaatctcaggactccaaaattactaagccaaaggtaaaagtcaagctgggaactgcatcaggcaaacctgcctcccagtttatccctaaataagatatttacaaagataaagctacatacttccctcataatttgccctctagggattccttgtgggctgcaagatctttaccctaaaacggttctgttgaattttaccctgacaacgtaaattgatagtttatcttcacaggtgcgagacaaaggagcgaaccccaagtcatccctctgctcacctgaaacaaatgcatatctgattgcttcctctgaggtaaaaatgcagattgacaaagctagatgaaggcgtaactattcctctactcccctgataaggtttggatctatgttcccaccgaaatctgatgtcgaatggtaatccccattattgaaggtggggtctggtgggagttgatcggatcttgggggtgaatccttcatgaatggtttagcatcatcctcttggtgacagtgactgagggagttattgcgagatctggttgtttaaagtgtgtagccctgggctgggcatgatggctcactcctgtaatcccagcaatttgggaagctgaggcgggtgaatcacctgaggtcgggagttcaagaccagcctggccaacatggcgaaaccccatgtctactaaaaatacaaaaattagccggacgtggtggcgggcacctgtaatcccagctactccagaggctgaggcaggagaattgcttgaacccgggagacggaggctgcaatgagtcaataacattttgccattgcactccagcctgggtaacacagcgagattaataaataagtttgcttatgagatgttattttattgtacttttttacatgtttattatatattatatacttctaaatgtattaggtaaatatattttgtatgcacataaatttatccattgtttctgttatataaatttaatatttattacttatcgattacctattgtatataaagcacatgatgctacactggtatttggaattcattaccctaactatactgtaattaaaataattatcctaactagtaccaaaggcttccccttagcaatcactcgaagtgtgccagcacctccactcacttcacgtcaagcgattcccatcattgtttcactgatggagaaaccaaggcccagggcacttggggcaaggcgttcagggggctttcggtccggaagcagcgtcggggcgggaattcgaaccctgggttcccacactggcccgtggcagggcccccaagccttttcccaaactgatcacagaaagtgacgacccgttcgcccggcggaccgggggcgtcgggcaggtcctggtccaagtgagtgcccgcccctgccctgggctggcagagttcttcccccagctgcaggtagacgtgggaacccggcagggtacggagctgctggcgcggcacgctgattagaagcggcgactgcccgtcaagcattcgcgcctctcccctcccttgactttcttggcagggttaagggataagagaaagtggagttgcctcagttctgggagagcccgtttgtgggtccggcacaggtatccatcgggactgacgctgcaaaagtcctcttgtgaaacaaggaataggctcgagtcttcgattgggtcgagggagacgtcaatcaatggatgggcgtgtgcaaacgcaacacaacgcacagtattggttaggatttggcggggggagtagacagcggggaaatgaggcggctcatctcgattggcccagaaagaagacggtcgcgccctatgtactccgggattggctagagcgagccgcgtcccccctcacgccaaccactggtaagcgaagtgggcctcgctctcccgggttagcagccgtagccagatccgttgaaaggagtgcagagaggtctcattgcgctcccgaacagacctgacgtagatccgaagtggcccgcgccatctcaactatgaggggacacccgtaggcggcgggagagggacgccgcgaggagccaataaagctccgcaaccggaagtgtc

SEQ ID NO: 16581 - DNA, 2300 bp, Homo sapien
aggaatcaaaaagggggctgttaggaccaaagagggtcactgaggatttagagtgtttagatcaaagaatgcgctgaagaaagtcaatagactcaacagaggaggactgttgagaagttagtgtttttgaggagtagggtgttatttattaaataatagaagtgggaaggggaatcagtggagttcgatgggcactcagagtatttacatcattgaagtcacttgtagactgttggggaagtctttaagggaccaaatgttagtggatgtgtaaagttgttcatttgagatttaatggaagtcactgagaagtctgtgccattgatcactttggaattagtggatgtaaatggagtcattgggaaggatcagtggacctcactgagaataaatgtggatggggaggttgaggacttgggaattaatagcaggtaagagcagttattaggagggagtaaagatatttggggacatgggagtgtcagtgaatgtcagtgacagaatatgcaattattgggattttatgggaaaattattgagacatagttgcacatggataataatggttgtcattgggggatgaatggaaatcaatgggaataaatggatgtgtcagtaggggctgttgaagttgtgggttttagtgaatgttaatgatggtcatgggtaggggcaatggaagtcattaaagtcttgtgtgttagtggatattatgatggttactgtagggaggggagtggataccaatgagattgaaggtggtcaggggagtgactgaaggtctctgaagtgctgggtgttagtggaggttaatgatggtcattgttgggggtaggggggagtagacatggagtagaataacttgtggatcagggcagtcatggagggtcattgaaaaaccaggtgttaatgattgttaatgtggggtcattggggtgtttgtgaaccacagtgggagtgaatagtggattaggggagtcctaaatatctgggtgttagtggatattaacgacagtcattgggagaaatagtggacattaccaagaatataaatgggcaaccaggagagttagtaggggtcatcaggtatcagtgggcatcactgatagggtagtagcgggggttggggcattcaaacagttaagatattaatagatgttaatggtggccattgggtgagcagatatcaggagaaaaaatagcggtcagaggagttaatgggggatcattgaagatgaataatcgtcatccagagtcaatggggtgctttgaagactttggaataacagtgattgaaagggaagtaattggtctgtaggaacatagcaagtccagtggaataacaatgagaatatgttggtttattagggttttaggaagttcattggaacctaaatgttagtggagatcattgcggggtcctagggcagtcatcgggtcattgaggggcataggagacacttggagttctgcgtcagcatgcaggggtcatggaggggctagtagatatttggtgggtccttggggatgtgggattagttaggagttcacatgcagatgacccaccaggggctccctttcaggatccaaggacaaggaccagccacccagcccatcaccaccgccccagtcagaggccctgtcaagcacctctcggctctggagtcctgcagcccctgagaatagtcccacatgtagccctgagagtagctctggaggccagggcggggaccccagtgatgaggagtggcgcagccagcggaagcatgtgtttgtgctgagtgaggctggcaagcccatctactcgcggtatggtagtgtggaggcgctgtcggctaccatgggtgtaatgaccgccctggtgtcctttgtgcagagtgcgggagatgccatccgtgccatctacgctggtgagcaaacaggtgggaggcagaatgggggacagtgactgggaatatggctggcacgggtaggtctgtctgcctcaggcactatccagccagccagggttgggtccatgtgtgtggatggtcagccagagctctgtcagtggcgggaggtgggggggttcatctctgtctggcctgctggtttcttagtgattgacttgctgggatctcagtgactagctggatacttctgtgtcacctgagaggataactgtgggggctgtgtggttgagctgtgtctttctggctctgtgtcagcccttgtaccatctctacccgcctgcccgtggtctttgctgtgtatctaacctacttgttcctttgtccatcccatcatgtctctgcaaatgt

SEQ ID NO: 16582 - DNA, 2300 bp, Homo sapien
gattacaggcatgtgccaccatgcccggctaattttgtgtttttagtagagatggggtttctccatgttggtcaggctggtctcgaactctcgaccttaggtgatcctgcccaccttggcctcccaaagtgctgggattacaggcgtgagctaccacacccgacatcttctgaacttttacctagcacactcctgttaccagaggtctctcatcctggtgcaccatgattttaattgcatggggaaacctgatgttagctaatgtgtgatactcaaccacactactcacactgtatgatgagcatttatgctcatttatgtacctaatcctcacaatgataattataggagttaaggctaatgtcaccctcccatcactaccaccattttacatattaggaaactgagacccagagaggttaagtaacttggccagggtctcggtgaagtaacagattagggttcaagccaggatgttatagaatctgtggtgccaaattaccacacgcctcacaaagctttcttgggaaggcagagttcattccatgggggacaggatggacagggtaatgttctcaacagaggcccatgaaggttctcattcaacaggagaaacaagaaaggtgaatgctgtgaacagacatcccaactcccactcctgctggagtgaatgatgggtcattcagagaatatgactgagggttgtctttcccttcccaggaagcacatgctgcaagagtgcatggaacaaatttttgcccataattctcaggtttcagagtctcaaacagaggaatctggggtaactcccaagcctggggcctggcaggccactgtgtagaaagtgggaacagggcttgcatcagggagagtttgttggaagaggtgctacgggaaccaaagcttagaggataaaacccatgaaggggctcccagcagagggagcatgggcaggatctgaaggcctgtgcatgaggagcccccaacagggtgtcaggcctagcatgtgttctcttattcctgggtgtcggcctccaggttggatgtcagaggacagctggaggatctgatgggccagcacaaggacctctgggaattccacgtgagccattatcattgcctgcaaccaaagccactcctccctggctttagtgtcgcactgactggcccagagtccacccctgcccaggctcaatgccgcgggatagtccttgattccttgcttccgcttgcccacctattcagtccctcagcttttatctaaaatcaacttacgcctcaccatgccccactgccacacccagcatcacctgcccagacgggtgcagtaccattgtgatcctgctttccccctgctcatctagtgtatgttcaccttgcagtggcaaatggcagcccagggaaagccatggtcaggtcattccttcatttagctaatgtcagtggttgcaccggtcagcatttgaggcagggagggagggtagcagatcaaagagtccacgtctttgctgtcccaagctggttggggacggtggaggcaccaagaaagttagtggctagatcgtggaacttcagtgggaaggcctctaagcaagtgacatctcaacgcagaggtgaaggaagtgagggaagaagccgtgcaggtatcggtgcagaaggaaggccctggggctggacggtgcctgaaaccgttgaggagccgcagattggggaatggaggatgaggagagtgggaagagttcaagtttgagaggtgcctggagacatggagagcgtttagggggaggtgggtgggtctccagccacagcaggaactgcacattgagttaataaatagttgaatgaatgaatgacctaatgtaggtgaagacttcgcgagaagcacaaaaggggaggggcgggccgtgtagccaagaggacggccaaacggggaggcctcctctttgtcctcgcagatgctggagcagcgactggcccgggagatccgtgccctggagagaagcaaggagcagctgctctcggagagtgagcctcccgcgccaggtgggcggggggagggggatgtgcccgggcctcggccctgcccctgacgcccgcccaccgacagggaggctggtgcgcgccaagctgcgggaggtggagcggcggctgcactcgccgcctgaggtcgagggcgccatggcggtgaatgacgggtgagaggggaagggaggagtgggcgaggagggcaggggcagggcggaggggaacccgcccaggtcccccgctccgcccccgactgccgcttccccggcctgtgc

SEQ ID NO: 16583 - DNA, 2300 bp, Homo sapien
attcgagcaccatatcttttttttttttttttttttttttgagatgaaatttcactctgtcacccaggctggagtgcaatggtgcgatcttagctcactgtaacctctgcctcctgggttcaagtgattctcctgcctcagcctcctgagtagctgggattacaggtgcatgccaccacacctggctaattttgtatttttagtagagacgggatttcgccatgttggcccgactggtcttgaactcctgacttcaggtgatctgcccgcttcagcctcccaaagtgctgggattataggcgtgagccaccacgcctggccgagcaccatatctacgttcctcatttacttgttgcatgagccttgtccaattattttagtttattttttactctacttgcacatatatagaatggagatgatgctatatcctgctttgcacaggagttgtaaaaatgaaataagaatgtaaataataaacttttattgcatgtgtactaagtacctttactatatgattagaatctcacaaatgtattttgaaatactatttttccccagttatttttcctttcactttgagtgctcattttctcttccattttaattttagtttgagccctttgatcttttaagggtgtatgtttgtacacatgcatgcatgtgtattgtccagcattttcatatttgagttacacagctggcctgaataatctcagctggtattagtagcaatagtgactttttattccagtttcattgatgaagagtctaagccttagatgagttatacaacttgctcagtcatctaataatgtcaggggagggatttgaaccccaagtgagtccaacttgaggctgtgatttttaaccataagctgtactgcttccctaatgttctgtaaatacagagaaccatatacctcttaattattcccagcctctggcttctctgatcttttattttctcacgttttttgtttttgtcacagctagtgggatgtgatcatgaactaggctctaaagcagtttcagatgcttgtggcgtttgcaaaggtgataattcaacttgcaagttttataaaggcctgtacctcaaccagcataaagcaaatggtgagagatgctgctgtttgttattgttaatgagatacaacttttgctaccaaacaagtttgagtcacgccaaatgtggttgagccttttactagttcactggacacactagtgatggtggcatttttcacttgtgcaagagtaagggagatagttgtgaggaatttcgtcgatacattacctcgtagaaacatgccaaataaatgcctttctgctttgcatttttagtatgccgaccaggccccatgtatgtccaagtgcatttgttaagcaaagaaacattgtgaaacttatgtgatctctactcacagtgctaaatgaatatttgaagcagttatctaaatatgttgagtgaaattaaacttttgatccctgttttctgaatttcatcactgaagatacatggttctaagcttcttccagacagattttttttttttgagacagagtcttgctctgtcacccaggctggagtgcagtagtgtgatctcagctcactgcaacctccacatcccaggttcaagcaattctcctgcctcaccctcttgagtagctgggattacaggcacctgccaccatgtccagctaatttttgtatttttagtaaaggtagggtttcaccacactggccaggctggtctcaaactcctgaccttgggtgatccgcccactttggtcttagatttttgaaaagtcttcttgaattttgtggccttttgtggtctgggaaggagaagagtgtatttgttctccacagaaaacatagttggaaggctttgggaagccacatacattttctctagtgttcttactatttggacaatgaaatcattgatcatgtttacttcatagagtaagaatgaatttagataatgatttaaaaacctcactctataaaactgaacactacatgtcgggccatttctagtcccttttctccaatgcatggggtggaattcagacatgttctcttctttccatttagaatattatccggtggtcctcattccagctggcgcccgaagcatcgaaatccaggagctgcaggtttcctccagttacctcgcagttcgaagcctcagtcaaaagtattacctcaccgggggctggagcatcgactggcctggggagttccccttcgctgggaccacgtttgaataccagcgctctttcaaccgcccgga

SEQ ID NO: 16584 - DNA, 2300 bp, Homo sapien
acttaatcgaggcttgacatagacctcatgttaactacttcagtacccacaggactgagcagagtaatacatctacttccactaccactaccctggtccaagcaagacactgtcattgtaccccttcatgccagcaacagctgcgtggtttgtttctctctgaccctgcctcagctcgtccaatccctacactcgctcaaaaaatggttcacatttttttattattggatatgatgttgcctcctacacatacacaaacccacattcatttaaatctaatggtttccaacatgcttcgccccagcttacaaggtccagctgacccagcaactgctgtgtttgcttcttcctctggcctgtaacacttttcacgtggcaatcacttaactaccttgagaccttcacttatgctgtgccccctgtcctaacatgcaagatcctactcccctcttcccttataaaaccgatccactctctctggccttattttaagtgtcagctcctaacagatgccttgcacgtgtatgtatgcgtgtgtgtgtgtatatatatgtgtgtgtgtatatatacacccacacacacacacacacacacacacacacacacacatcttatcccatctaaattagattctgctgccatctaatttaggagactattcttttcctttttagtatttgtgttcattttgcttctattaccgttgtcgagctatccaatcagattcgtttccactggcccgtgagactgtattttgttcacctctgcaaacagggatcaaaggatcaaataaatgtcttgagtaaacgaacaggcacacagcaaactggatgcacattcctagtgatggcgtgcgctgtttgttataactgatttctgtgggtttgggtatctggggccaagattcaatctcgaagagtgggaagcacggtcacgtcaagaagagagagagagatccgggagaagagggaggcccccgcgtgccatgagtttttacatgctgcagacagtgacagctcattgttctggtcctcccggctgcctcagatttgctgactctgggaagctaggtcagcttgtgcgcatctgagcctccttttcctcatctttatcaaggaattaataattcccacctgaaaaaggtagggcctgaggcaaatgcgatacagcaggggatagctcccagcacttaggaggtgttgaggacgctatcttgactctttgccagaagagttgaaaatgagaagtctgcacaggcagcgaaaaagtcgcgccactcacctgagcctttcgtcttccgaactcatctcccagtgcgcttaaattacgttttccaagcctgaccctgggcgctcccctccttctcatggcggtcggtccctccctccctatcactcccacccagcctccccgcccccttcgccccctccctcagagctggagccgggaatcccacgcccttgcaccagcccgggggctcggacgagcccgggagccgctggtcgccaatcaccgcgcggtggagaggcgggcgctcggctccggcgcgctgggggagccagctggcgctgtcttccccatcgcctcagacgctcacaccgacacagacagacgcacagacgggcgggcagacaccgacagtctcccaaccgtttgcgctccagtcccggcccagggagccccccgtaccctctggggtgccgcaaactgcagctcggcaggcccgcgccgggagaagggagggcgcgcaggcggccggaggaggggaggtcccagcgcgcccccgctgcgatgtgaacggcggcggctctcacctggagccgcacctggggcgccgagctccggggccgcggaaagaatgcgcgccgcccgtgcgctccgcctgccgcgtctggccacccgcagccgccgcgtccgcacctgaccatggagtgcgccctcctgctcgcgtgtgccttcccggctgcgggttcgggcccgccgaggggcctggcgggactggggcgcgtggccaaggcaggtgccgccgagcggagctccgagagcgggtggcagggggcgcccgacgccagccccgccgcgcccctcacgcgcgatgtcaccttttctcttgcaggcgctccagctgtgctgcctctgctgtgcgtcggtcgccgcggccttagccagtgacagcagcagcggcgccagcggattaaatgatggttcgtatttgccccccatccccaagaagggcctttcgcagcactttgacccttccttcccccaaagagagaaaagatggaaaagcgcacccccta

SEQ ID NO: 16585 - DNA, 2300 bp, Homo sapien
tgttttattcagtccgttgcttggtgatgtgacctccagcagtgttttactgcatgtctttgatgtccagtttcctcttgtgtccagttcttcatggaatcatatgaagcacttaagtcacttgtgtctgaatcacccacaagtgcttactacaaatgcatgcttgggccctacaccaaatccatggaatcagaatcacagtgcttcatggcctggaaatctgcatttttaagctagcattacaggtgattttgacgtatattcaagtttgacacaggatgtatgaaataacagaaatacaccatcacttcttaaagtccacttataatgtgctttgaaaaatatattcacttacccctcaggctatccttttgatgtagcatgttgattcctattttacagattataaaacagaggccacagagcttaaccagattaagtagggaaacccaaatgatttgtttagccctgatgttctgtgaggcttagcttcatgttccttaggcagacacatcaccttctctgccgctacagcctgggtttacctcttcccagctgcattccataaaaccgactatgtgtattgagctatcacttaatcgaggcttgacatagacctcatgttaactacttcagtacccacaggactgagcagagtaatacatctacttccactaccactaccctggtccaagcaagacactgtcattgtaccccttcatgccagcaacagctgcgtggtttgtttctctctgaccctgcctcagctcgtccaatccctacactcgctcaaaaaatggttcacatttttttattattggatatgatgttgcctcctacacatacacaaacccacattcatttaaatctaatggtttccaacatgcttcgccccagcttacaaggtccagctgacccagcaactgctgtgtttgcttcttcctctggcctgtaacacttttcacgtggcaatcacttaactaccttgagaccttcacttatgctgtgccccctgtcctaacatgcaagatcctactcccctcttcccttataaaaccgatccactctctctggccttattttaagtgtcagctcctaacagatgccttgcacgtgtatgtatgcgtgtgtgtgtgtatatatatgtgtgtgtgtatatatacacccacacacacacacacacacacacacacacacacacatcttatcccatctaaattagattctgctgccatctaatttaggagactattcttttcctttttagtatttgtgttcattttgcttctattaccgttgtcgagctatccaatcagattcgtttccactggcccgtgagactgtattttgttcacctctgcaaacagggatcaaaggatcaaataaatgtcttgagtaaacgaacaggcacacagcaaactggatgcacattcctagtgatggcgtgcgctgtttgttataactgatttctgtgggtttgggtatctggggccaagattcaatctcgaagagtgggaagcacggtcacgtcaagaagagagagagagatccgggagaagagggaggcccccgcgtgccatgagtttttacatgctgcagacagtgacagctcattgttctggtcctcccggctgcctcagatttgctgactctgggaagctaggtcagcttgtgcgcatctgagcctccttttcctcatctttatcaaggaattaataattcccacctgaaaaaggtagggcctgaggcaaatgcgatacagcaggggatagctcccagcacttaggaggtgttgaggacgctatcttgactctttgccagaagagttgaaaatgagaagtctgcacaggcagcgaaaaagtcgcgccactcacctgagcctttcgtcttccgaactcatctcccagtgcgcttaaattacgttttccaagcctgaccctgggcgctcccctccttctcatggcggtcggtccctccctccctatcactcccacccagcctccccgcccccttcgccccctccctcagagctggagccgggaatcccacgcccttgcaccagcccgggggctcggacgagcccgggagccgctggtcgccaatcaccgcgcggtggagaggcgggcgctcggctccggcgcgctgggggagccagctggcgctgtcttccccatcgcctcagacgctcacaccgacacagacagacgcacagacgggcgggcagacaccgacagtctcccaaccgtttgcgctccagtcccggcccagggagccccccgtaccctctggggtgccgcaaa

SEQ ID NO: 16586 - DNA, 2300 bp, Homo sapien
tcgatatttcattgatgtcacggtgtgtaaacactggatgttgtaaatatcacagcgatatttcattaatatttcatttcattaataatttcacaaactgccccactgacctagggccagccacaatattactttcatgggccctagctactttgtttttgtgcaccccttcttccataaaataattttaaagtgaatattttatgactgaattcataaaatgactatcatccaagctggattcattattatatattgcttttattacataccttttcttcttctaatttaaaaagaaattacaattaaaacattttcacaggtccctaaaattactgtgtgtgtcctgtgcctgtaagggagaagtcagccctacactgacccctggattctcagctcgcaccaggctccctcacacacactgttctccagcccctttctgctgtctttgcacaaactttgccctcttccttgaacactctcccttgcctttttcctcatttatgtcctctatcccgcacagagcatcagaatccccttacagcacagatcactgggcctgacacctggcttctgattcagcagttgtgacatgggccccaaagtccaccttttcttttcttttcttttcttttcgtcttttttcttttcttttcttttctcttttctttctttcctttctttctttcttggtttttgttgttgttgttgttgttgttttgttttgttttgtttttgagacagagtttcgcttttttttgcccaggctggagtgcaatggcgcgatctcggcccactgcaaactccgcctcccaggttcaagcgattctcctgcctcagcctcctagtagctgagattacaggcgcctgccactggctaatttttgtttttttagtagagatggggtttcaccatgttggccaagctggtctcaaactcctgaccttaggtgatccacccgacttggcctcccaaagtgctgggattacaggtgtgagccacagcgcctggcccagagtccacatttttaacaggaccaaagtgatcctgattctgctggtctgaggaccacactttgagaactactgctttcaagatgagctgcacttctatttcctctaccaagcctcttctgtctcctaattgggtcacatttctccttcacacgctctagaaggaccaaaggccactgctttatcagtgtgatttttttttttttttttttttgcattaaaaacttcttatcttcttcttcttatttttgagacggtctacctctgtcaggctggagtgcagtggtgctatcacggctcactgcagcttcgacctcctgggctcaagcgatcctcccacctcagcctcttgagtagctgggaccacaggtgtgtgccaccacgcctggctaattttttatttttattttgtagagatggggtttcgccatgttgcccaggctgggctcgaactcctggattcaagtgatcctcccctcttggcctcccaaagtgttggaattacaagcatatgccactgcatccagccctgtgtgattaatttatgtttctaccatttgactgtgagctccacgtgtcttttcgctagctgtgggatctgcacccagtgcatacaggtggtcggtgaacaggtgctgacagcagttccaaaaagttgaatgaatcaccttaaccttccagcaacagcgaatgcgagtgtaaaatattatcacctcaccaacactgtattttttttttttttaactcttccagctctaaattccacaactcctcctatacctcttgcttccatagaagcccaaggagcccggcagaaactgctttgagcaaccaggaacacccggccctaagtcccgccccgcgcctctccccacctcaagtcccgcctctggctataagccccgccccgccccgatcccggcctccgatcccagatctcgcaccgccccgccccctgtctccgccccagacaccaccccgcctcgtgctctaagccccgcccctctctctggctttaggccgctcccaagcccagagctgctctgcgcaagcgcgaccgaccgagcagctccgaggagtccgcccggaaacaaacattccccagggcaatgtcacgacttggtcttcccgaggagccagtcaggtaaaggctttccgggccctggcaccccgagcttggtcaggcccggccttgatcgtagcggaggccaccggggccttttggccgggactgattttgcagctcccgccagtccacctgcgagcgccggatgggggagcactcg

SEQ ID NO: 16587 - DNA, 2300 bp, Homo sapien
attcaggcttcttttagccctcttccttccatcccatggccattgcctcagttgggaccattctcatttattttgtttctttttggggatttttttttttttttgcctgcacttagtctctaactgatctcgatgcttccagtaactctatcatctaatccatcacccacttactgtcaaagttattatcctaaaatgcagttctggtaatgctctccccatgtttttgttttttaagcctttatggcaccaattgcctctgtgattatgtcttaaattttataacctggtatgtgagaactttcaaaagctggtcccaataaacctttcagcctcatctccaatgattgctaaatacagccaatgttctgcctacatagaacaaaccagaatctcaaaagcccttttacctgttacctttctgtgttatttgaatgagcttgcgaccttttctgccagaagaacctgccttatccttcaaggtctagcccaaatgttccctcctccatgagaacttctccaactctctggaccagtttttcaacaggctgcctctgtgcatattctactatgtaccaatcatgtattaagccctgggaaaaccacgctggataaaagtagaaatagctcctgctcacatgaagttcacagttggataaaggaaacagatattatcaggtaaacatataaaagttggctacaaagggacataagtgtctatagtcagggaggacaccaatctggaggttggagtgcctcccaacaggaatggacccttgaggtgagaacgaagtaggagttaacaccagataaaggagatggaacacataccccaggccaaggggacagcaggtgcagaaccctgtggaaggagggaaaatggcaatcgtcttttttttttttttttttttttttaaggaatagaagacaagggcatttaaagcagtgaggcacaggaagaatgaggggagagaagaggcagcacttacatcattcattgtaccacatttgttgactgtgtccttcatgcctcatgctctgaaattgaccttttccaatataaggaccatgtctcactgaaatcatgtccaccccagcacttcacacaatatagaaaaaaaaatcaatgtacccaatttatagatgagtgtgttgaggctcaggaaggttgaatgagttgcccaagatctcaaggctggcaatggcatagcaactataatagaatatagacctacttcctcacctgcatctctttccttaaactgcccctaggaaaaccacgtccttccccattattttatttcagaaattccaagtttttctatgagctgtttttctcaaagagcctgataacaaaacaaaacgccagttactactctgtgtatgtgcatgcatgttggggagcgggtacacactggtcttccggggatcagaacacgaacaggatcctttctggtacaggattcttgtctgaagcctctttaatagcccgaaatggtgtgggtggtgagaattcgccgtcgtaaggaagcccctggtgatacccagcaaagagcatcccggctgaccctgcaggtctggagtgaaaagaccctgcactggactcttcagggcagtgagcgggatctctagttccctgcttcccaaacctctccgcccttccacccaaaactggctgtttgagaaacgacccaatttcccgactatcccgcccagcctcgaagatgggagggagagagggcaaccttgtcgcggtaaggcatcctccaggcccagacattagtctcggtccatttcaaggcacccgagcctgtgccgtatataaccaagtactgggcccacaggaagggggatgacagggtggtctctctaggctcgttttagtcacagatcttcggcaaatttgggtttagggccgcgatcccgaccctaacttgggactatttcaggaactggagttgaggcttcgttgggacaggaaagaagggtggggcgggggtgaagcgcttagggcacggctcttgtgaggattacggcggaggctgtggaccgcggcggcgctcgcagaggctgcagccattgcacagccgagcatcccacattcaacaggaggaacccgcgggagaggagccccactcccccagcgccgcagccaccgcagccaccgcagcccgtgcgccccgcgccctcgagcgccatggccaaggaaggcgtggagaaggcggaggagacggagcaaatgatcgagaaggaggcaggcaaggagccggcggagggcggcggcggcgacggctcgcacc

SEQ ID NO: 16588 - DNA, 2300 bp, Homo sapien
ataaattgtatgtaccattgtaattaatggtaaggatcttattattaaatactggacattgcgctaagtgcttcatagccattatctcatttaatctttccaacagccctgtaaaataagcattcctagcccccactgttaagatgagagaagccttatagaggtttattgacttgcctgagatcacacagctaagcggtaggttgtgaactgagctcagcctgtcttcacaatgttctcaaatgcccatgcattaactgcccatgttggtacaaagagtcaacaccggaggtcagatctttaattgtacagttactttgctgaatcatgtcagactttcctacatcagtggtcttactatggtcttactatattggtaggttacaaaatggctttaacttggaggaaatgaagatgaaatagactgtggtttttctcattaagattcagaaggaagcactcattccttgattctttctgtattgtctcaaagaaaaaacaaaggcaaaatgaacttggtccttcagaccttccaaatctgcaaccactgccctccatttgcacctggtcagccaaataagcatgtggaatgcaggaaggcctttccctgggtctaaattcctccctctcggctattcctgtaatgcaagtccattgcttttgatgcaaaagcctatcaggtcccgaaaacttgcccttaaagcctatggttaaaggtaggaataattgagtttctcattacattaattttatttttattttttatttgagaaggagtctggctccgtcgcccaggctggagtgctgtgacaaaatcccggctcactgcaacttctgccttgtgagttcaagcgattctcctgcctcagcctccagagtagctgggactacagactcctgccaccacgcccaactaatctttttgcgttttttagtagagacagggtttcctcatgttggccaggctggtctcgaactcctgacctcaagtgatccacacacctcagcgtcccaaagtgccgggattacaggcgtgagccaccacgcccggcgagtctctcactaggtttctgtgctattacatcatgcacttgaaagtgttgtttaatgtgttcaaggaaaaatgattggtgaggacctgaaaaaatagctattgatctattacattaattcttattctaatggaaataattcactttttaaaattttcttttcactgtaaggtacattttcccaagaaagtaatttgcccgggctggagggcagtgatctcgaactcctggggctcaggtgattctcacacctcaacctcccaggtagctggcattacaaatgtgtgccaccatgcctgatgaatttttttatttttttgtagagatggtgtttcgccatgttgcccgtgctcttctcgaactcctgacctcaagggatccacccacttcggcctcccactgggactacaggtgtgagccaccacatgcagccccaaggaagtaattcttgatgagtctacaaaatcctaatggaggaaagccctatattttatcatcgagtatctatttccgcaatctccataaatcccactgagaaaactacttccaagctacacttgagctgcgcagacacatgagtatgagtagacacactggcttgaatggtgctgtggcaccacacacacacacacacgcagtaactttcctttttctccaattttttttttgccctgaaaactaaattgaatccattttccagaacatttagtgaatttcagagttccaaatcaaagaatttttcacaaagaccccaatcttctcagagtttaaatttaaaaaaagaaagcaggctaaacctgtagttaagtttgacacactccaaaaaggcaaatcactaggaaatgcagcagaaattaaataaatagaaagcctaacatgaggcacaagaacaagaggccaccttatgctgtggccagcagaggcattcaaacattccgtcagcaggattccagccaacctccgaagctcacttttataagccagccccaggcatcccagagcaagatgtagctgtgtagtctccttccatagctgctctaagggggctggcaacatggctcagcaggcttgccccagagccatggcaaagaatggacttgtaatttgcatcctggtgatcaccttactcctggaccagaccaccagccacacatccagattaaaagccaggaagcacagcaaacgtcgagtgagaggtaatggggcttctcaatcaagcaaaattctaggcttagacagtgtggggag

SEQ ID NO: 16589 - DNA, 2300 bp, Homo sapien
aaaaaaaaaaacctctgtgctttttttctcagctgaggctgagaccagagcgtggtggcacatgcctgtaatcccagctactcggaaggctgaggcaggagaattgcttgaacctgggaggcagaggttgcagtgagcagagatcacagcattgtactccagcctgggcaacaagagcgaaactctctcaaaattatcaaaaaaacaactatgttgtcatattagaactgctttactaataaacccaaatggtcagtgactaagaaaagttttcttgtctatgaataaaccatgcaatagagcaagcatatatataagagcagagggagaaaaatagaatccccgaaatacctagaattttaactgagcagtacattgacgtgcagtatggatcgttaaatacaagtgaggaaaagccccagatctccctcaataataaacagaatgaaacaaaggcagtcatctgggcttccatgtagacccaaggttggcgatccatggtccgtaggtcaaatctgcctgctccctgttttagtaaagcttttggaactgagccacaattatttgcttgcatattatctatgtttgctttagccctgcaactccctcttggaaggagatagcctctactgcttaagaaatggaatataatcagaccctttctgatttcaggattttaaaaggaaaagctggccgggcacagtggctcatgcctgtaatcccagtattttgggaggttgtggcaggtggatcacaaggtcaggagtttcaagaccagcctggccaagatggttgaaaccctgtctctactaaaaatacaaaaattagccgggcgtggtggcaggtgcttgtaattccagctactcaggaggctgaagcgggagaattgcttgaacctgggaggcagaggttgtatggaatgagaccactacttctcctgttgtccttcccagcttctccacagcctccccttttccctagtttataagaccaggagaaaagggagaaagcaaaaagttggaaagaaacagaagtaagataaatagctaggtgaccttggcgccaccacctggccctggtggttaaaataatattaacccctgaccaaaactactggtgttatctgtaaattccagacatcgtatgagaaagcactgtaaaactctttgttctgttagctgatgtatgtagcccccagtcacgtttcccacgcttgcttgatgtatcatgaccctttcacatggaccccttaaagttgtaagcatttaaaaaggccagtgatttcttttttgaggagctctgctcttaagacgcgagtctgcggacgatcccggccaaatgataaacctcttccttctttaatccggtgtctgaggagttttgtctgcgactcatcctgctacatttcttggttccttgaccgggaagcgaggtgattaacggtcggttgaggcagccccttaggcggcttaggcataccctgtggagcatccctgtgggggactccggccagcttgagcgacgtggatcctgagagcgctccggggtaggcaattgcccgggtggaacacctcgtcagagcagtgcgtggcaggcccccgtggaggatcaacgcagtggctgaacaccgggaaggaacgggcacttggagtccggacatctgaaacttggtaagaacggtctttggaacttgcccactccatttgagtggaagcgtggcctgatcacccacggcgtgcctgtaccggcactttggtttttgtttttgacttgacttgaattgcttgatactttggttttggttttgacctggcttggatttctggatactctgattttggttttgattttggtttggtgtaaactgaaaaagtgtgtgtgtgccctttttacccgttctttgttctgtggtgtgcgtgtggtgtgagcttggtgttttgtctcgaggaaacatgggtcagacacaaagtaagcctactccgctaggaactatgtagaaaaattttaagaagggatttaatggagactatggggttactatgacaccagggaaacttagaactttgtatgaaatagattggccaacattagaagtgggttggccatcagaaggaagcctggacaggtcccttgtttctaaggtatggcacaaggtaactggtaagtcaagacacttagaccagttcccatacatagacacttggttgcagctggtgctagaccccccacagtggttaagagggcaggcagcagcagtggtagtagcaaagggacagatagccaaggaaagatcccctttc

SEQ ID NO: 16590 - DNA, 2300 bp, Homo sapien
ccttggcctcccatagtgctgggattacagttgtgagccactacgcccaatccaatggtagcagatttaaacacaggtggatttggaaaaaaaatcttacgataggtttaatatgagtcagcaggcctgttgaaacaaaacagtgctttgttaagcttgtttttggttggtcaaatgtagaaaggcaggtgtctccgctaatgagtacgtagagcaggaatcctaagcaatcatccatttcagaacatgaagacaaaaagcagctgcccctcccatacactgcccattaaaatacatacttttaaaattccttattttcaattttatttttttgctctctcagaagaatcaaatatatgtaattattctgatggaggcttgcattctttgggacctaggcctgagaaatcacggtcagtagatttccctataacatggggctggggagcaagtgccaaacagggaatgttctgaaaactccttaggcacaagctgaagatatgtttgaggttttggatacagaacatttataggatatcttttggtggtccaagaggacttgagtgtaccttgtaaatacaggattttgtttttaattagattgattcacagagaaccaaacctaaggaatcacatcattcattcatttgttcatttaataaatttgtaggttgaagcatttaccaagtgctggcaatagaaagaagtcccgggtgtgctttgtcagtttagtcgggactacacaaatgagtcaataactgtagtggagtgatgcgatctcaactgccaggaatcccccggctctcctctcttcctgtgcctcttcaggtaattagctatcctttctttcttttattttccttccttccttccttccttccttccttccttccttccttccttccttccttccttcctccctccctccctccctccctccctttctttccagattctggacctattccagacttactaaaggaaattctctaaaggtgaggcagttttttaaagacagcagctctctctgtcgtccatgctggagtgcagtggcccgatcatagctcactgcagcctcgacttcttgggctcaagtgatcctcccccttcagcctcaatgagtagctgggactaccgatgtgcactaccacgcccggcaaactaaaaaaataattatttttggtaaagacaggggtcttgcgatgttgcccaggctgttctcaaactcctggcctcaagtgatcctcctgcctcagcctcctaatgtgtttggattacaggcatgagccactgagcccggcctagctaccctgtctgagttgtgcccactacacaaaggtgtcagctacatgtgatgtctgtgcatttctggcctggaccgcacattaagtgctccgtaaacatcagtctctattatcaacagtctctattatcaatcagtctctattatcatcagtctctattatcatgagtctctattaaacaacagtctctattatcacagtctctattatgtgttttggctgaaagaaagttctctaaaaccaggaaatcaggaatcagcagttttaagttctccaggttatattttaacattgtgttcatatgcaaaacaaaggttgtgaatcagcacgaatgctggcaagccctggaaggtttgtgatcacggactttcacgagaccccaaggcaaggagagacagaagcccaggacaacagcatgggcgccgctttttagtcgggcgccgctttttggtcaggcgccacctggactacatttcccatatccaattgccgggctcctgcaggattggccagaacaacgcggaagtgattacgggtcgcccagcaacgggcggagtcctggcccgaaactggatgcgcacgccccttccctgcggcggggaggctgacaaggctccgctctatctctagcgcctcggagcgctctccggctttgctgtctagcccggcggcagcgcgatctcttaggcactttcaccgccttcctctccaggccctgcccctttgacgccggccgtcgcgatattgcggagactggatttcagcttcgtggtcggcggagcggcccctggagggcgcagtgcgcaggcgtgagcggtcgggccccgacgcgcgcgggtctcgtttggagcgggagtgagttcctgagcgagtggacccggcagcgggcgataggggggccaggtgcctccacagtcagccatggcagcgctgcgctacgcggggctggacgacacggacagtgaggacgagctgcctccgggctgggaggagaga

SEQ ID NO: 16591 - DNA, 2300 bp, Homo sapien
ctgctctacctagttcattgctgcagctgtaatccagcctgattctaattttcaactggagatggttgtcttcttttttattccatgaaacaaattgattaatgtgtcgagggagcaaggtggtacttatacctacccagcctgcttgtgtgtgtctcaaggtggagagaggctgtggaaacaatagagagaatagcatggaaggccacgttgcaattaaacaagattgggaaagaagacgggactaaaatcatgccttgaagatgtttatcatatgaagttgaccttgagaccccaagaccggcttcagttttccacaatgcggctattatgagaaaaacagtgactaactgagcactgtgcataactcagttctcggaattttcaatcagaaattatctgatgacgggactaattcttattacgatagttccaatggatccacccaggatccacctccacaactaggtgtacagaagctggagatcccatcatgccgccgggcaccggtttacgagaactctatgtcttatcttggtagtacgattaggaaaacaaacacaatggtttctgccttcaatgtttccatggtgagggcagttattaggcatatgctaaagtgtaatatccgctttttcaaaccacatttcaaagttgatagcatcaacggctttaaaatcacttttaaagaatctgggcttacccagttaacagaaatagaacctgcctgtttatcagtgggtttgcctcacttttctgtgggtttcttttcttttcttaattatgcattaagaaaataacttaagtttctgtgcatacaacatcttcctttctcattcccagtaccctagaaacacagccgttcactgaagaggatttgagtgttgtctcctctgtggggtcaaaacatcatgcttctttctgttctgccccatggcagtggtgacgatggcctagcttccatcccgtagcttcttgtgtttttctattccaccagtctatcaaccctgtatttgttgtcaaatttacactgtccacaggcaaagatctattctcctttagaatttaataggagggtttggaaatgatgccatggaaaccctgagcagcttggcaatgctgaccccaaatgagaaataactatcattggtgttttccttctactactattatcttgcccattgatcttcaaaaagttcattggtcaaattgattgaggaacgcaagacttaaatgtaatatggctctggcaaattctgagatgctaacaaaaacaagttttcttaagaacaatgtcaactgactcacagtatccgactatataaagtcgagtgctctcatgccaggaagctgatacagttcatgaaacctcagtcattctttcgtattactcctgtcttctctttggaaaacaatctcatgaatttggtcttgacgctgacttaacatcccaggaaacagatactcaattccactgtcttttttgagaaatgaacagttctcaaactttgtttaaatttccttttcacagatgagtaataaccaaagatatttctgaaagggctctgaaaacatgcaggcaattgatctttaaaaataagatagaaatagtaggttttataaaagaaggaaatagaaatacttcagaagaaataaagtgtgctgaatcatgttttaaacataattatatccggaatgcacttacccatttgaaaaaaaaaaaaagtcaccaagttgtttccaattgtttttgtaaatttgcttagtcattttcagagacaaaaatttgggaaaaggattgtagaatgactggcttcccaaaaccacttggtgtttacaaagttatcaaaaacgggctgggaccactgatggtaataacaaaacctggggccctgaatcgtgtattctacatccgttagcacactgaagccacaccgcaaacttgtgaggccagcgttgcttcccctaccccttccgtcaaaaaccgtctgaggctgatcattaacttgcataaggtcacatagctaatgagaagcaaacgcatcataatgacctgggacatatgacactgaagcctactctctttccacaaagcttgatgtactcagatagtaattagtaaacattttcataaataatcttaaccttttcaagcatttttgtcgattggattgtagcactcaaaagtaaggtctgttttactaatataaaattgggcctgtggaataattctcttcacagaagtgtgtgtgtgtgtgagagagagagaaaatgtatatgcatacatatacatatattat

SEQ ID NO: 16592 - DNA, 2300 bp, Homo sapien
aacagtgcagaggtcatctccagatacctcggtgcttgggatacagccattcctcacaaacaattacagcttcaatctctcattggaaacacaaatgaaagcaaactgctccaaaaggccacttgttccctactcactatccaagagcaatcttttaggggacacatttgccacaaattgcatttgttcataaagtaatgcagcctatacaggaatgaggctcataggcctccctggctaggtgaccacaccagtaagtcaccctcttcttccaccgtgatacttctataatgaaattatacaattcaatttggaataagtgctaaccaacgaacacaccaacttccaccaaaatgatgggaagcagcagacgagaacagagatgtctactccaaagtcctcagccctgcaaactgcccggctttttcagtgagttgtagccaacgagtactattcaagtgacatcaatgactagcatttattgagaggttacgatttgccaggctctgcatggagagctttgtaagcattgttgcctaaccctcacagagctctatgagccagggacagttagtatttccatttatttagagagaagcctacctgatatcagagatcaaaagcaactcgtccaaagccatacagataattacgtagagtgagtgacttcagactccgtgtccgttggtacatgaaacctgctccccaaatatgtgacacaaatatttgcacgtggcccatttcctcatctatgtcttccacggggctccggcttcctatgcctctctgcctgctctgccgccttctcagccaggccatgtctggccatgaggtgatgccctaacatggcctaaaatgaaatgtgggggctgtcgtgtgttcacccgagaaatgttaaaaggagatttttttttccattgatttactcatggagctaaattgaaatgatatccatttggatgaacaaaaatgaagactcagcacccccttcgatgatccaacagcaagtgacccttactaaaaaggtcgtccgattcaaaatgccatctccaggtgccagatttgcagaactaagaaacctactctttgatgatagaattttttcaaagcaccgacatcccatacaagtgaagtggacacaacccccatcttatcagttcccacgcatgtaggtgcgggctctggagtgtttcatcaggtttgcagagaaaatactgatccatccctctgactccctctcctccaatgattcctaacacagtcattcctacaaattcctgacaactgactcccacaaaggccttcaacaatccagccttagacacatgcaaatacttcctgtaggtattgaaatgtaactttcttcataaacctttgggagttttgctaactcacaggctattcttaacctttattatagaagaggaatgcactcaatttcccaaaaagaaacaatgaagatgatcaggaaagcaaatatttgttttcaggctttagaagtgtgagaaagtgttctggagaatccatttagatcccatgccaactcttagccctccagaagagaacatgccctccctaacaaattagacgtggacaatgtgtttagatgttgatcttttgccacaaggaaaaatatttctttgctagcaacaggttcacaaaggtagaaaaacctcaggctccttttcagttgcctctcccatgacaggtgaagagtgtcattccccaggtgacactagggacagtgtctatgacaggggcttgatggccgtggctcagagagagtaaagtgccagtccatcaccataaatgcaacaggttcaagcacagaccacaaccacaaattacaagggacaccttgagagaaacgcatgcagggggaagagtgccatgcagcttttaaatgacaggcacgtgctcacaggcttctgttcagagagaacctgtgagctgtcctgtggcctttcctgtttacggtgcagccatcccaaatatgatgcccccaaatccgagtctggctagaaggaagtgtcatacaaaggccatgccattctccctgacaaaagacatgagtttcttgcaagagcactaagaagttttaagaggtggactcgaagagaggagaatgaattggaaagccagcaagaatgtggctcttactcctctgtgaaatatttgcaggaacgagcctggagaccagcaggttcaggatggaaagctggaaagaattctttcctaaaacttaagttttagagaaaaataggcagccagtcccaaccacccaaaggcgtccaaagcca

SEQ ID NO: 16593 - DNA, 2300 bp, Homo sapien
cagccgtaccaatggcaacctctgagtgacatcttaatatgatcagatgtgatgacagtttagtaacaggttctcatttttggctcaccagcttttcggcctacatatcatcagaataagactgaggcacattagtgaaatctcaatagtaaacaagcaggtactgccaataaaagagaaagcattcttaaactgattaaaaaaaaaatttaaagagcactttaatcaccatcagatgactttcattcataccaccttttggggcatcagttcataatgcagaaaagatgaaagagccatctaaaggaaataatgttaacaactccgttataaaatatctgaagcaataccttgccagttgtcatcaatgcttactgatccattgtgataaataataataccttgacatacaaacactggctggagctatgggttcccctaaacgattttttttttttgagaatcaatcatttatcagaagcctgtaggttgtatatggttgctaatcatgggaaacgggggaggtgtctatcccgcagcaatggcaatgagttaggttgttgacgacacaggactgagaatttctgggaagcccagaagaatctttttaatcatgcccgaatgccatttccgatctagtcaaacatttgtgagctgccagaggagaactgtgcaatcaatcttgagagtatatgtaaaattacccaggactcttgtttgggattaagagtatcttggtaataaggattcatcattctctttcaaaaatcatctgtcagatttgcagcacaatcttcaactacagaaaggtgggatttagaaagcagttgctgtttatttatagttgaggccctcagatctaaattatccatccttccaaaactcggtgttgggatgaaaatgttaagtagctgcttttcatcaacattcatttgataactgctagccatcaatttatagttgtcagcacagaatacaaatgcatattgactcctttaaaggaaagggtacagaggtttctgataaacaatatatggtaaagaaaaaaaaagcacccacatattgatatttgtaatgcattggttagtactctaatataatactcacagggacacatgttacaccgtgttttgctttcaggtttttctattttaaaatgcatgctcatttaaaagaaagaggagattcctgtcttaaagtagacttaactatgagatatataaaaaatagacacaatatcatggcatatctatatattcaatgattgtgagagagtagatgttctaagattgctttcttacagggacattgcacagcaaatgctgaattaatccacttatgcaaaaagtagagttatgaaaggaatgaaccctggaagttagattaggcttggaacaccaagagcagggaaggagaacagcccttttgaagacggcagtgttcccatgactaacgtcccaggacaaagtggtgatctgaagtgagcaggtttggctaaaaggaaagacacatacctcttcaaaccctgcctacttccattgttactcatctggtgtctgttggacaaagcaaatacttctcaaatgcaaagccagccaccttatccattgactctgtgaatacaccactaggaacagaatcatttatcagagagctacatttatcagagagctgctgcggtggagatgagggggtgagccctcatgtcacaggtggaatagatggccgtctacacgccctgtctttccctgtctcccagtaacactcccccaggagaggctataaccactctcccagaacagtgcagaggtcatctccagatacctcggtgcttgggatacagccattcctcacaaacaattacagcttcaatctctcattggaaacacaaatgaaagcaaactgctccaaaaggccacttgttccctactcactatccaagagcaatcttttaggggacacatttgccacaaattgcatttgttcataaagtaatgcagcctatacaggaatgaggctcataggcctccctggctaggtgaccacaccagtaagtcaccctcttcttccaccgtgatacttctataatgaaattatacaattcaatttggaataagtgctaaccaacgaacacaccaacttccaccaaaatgatgggaagcagcagacgagaacagagatgtctactccaaagtcctcagccctgcaaactgcccggctttttcagtgagttgtagccaacgagtactattcaagtgacatcaatgactagcatttattgagaggttacgatttgccag

SEQ ID NO: 16594 - DNA, 2300 bp, Homo sapien
ggcttaatatatgactaagtgtcagaagtcaggttttctgagaattactttccagataaacaactttatagcactgcacttaatcttacttactagagacatctcatttatcactgaattacaagtaactttaatcctattgatattgccataaagcccgttgaaaatccatcctggcacttttaaagggtttggggccctgttacatggggatcctcttgcaaaggtctcagccagaaattacaccccgagggtgtctgtatcccctggcctctttgtcaacaatcaaggagaagaggaggggcaaaaatgatctctgcatctgccagcactttcttcggcccctttcctatagggtcgggttctcccacttcagtcaaactaactttgtgtgtctctttcctcctcccacactgggtaaccagctgcttttcacttcatcgacaaaactggacacggatcaatttcaactgacctttgccgaaaggtggcgctgttgaggtaaaaaccaactcgctccaacaatagtttccactcttcgatccttttgcaggcttttcagaatttttttttttttttaatgcaccctcctagcgtctcccccttctcataaagtaaaataaatacgattaaaaacaccaaatgcatttcattaattgaaggaatcaacagtcccaacttctaagcagacgggctggtcttccaaaggctgggtcggtttcaggagctttctctccaaataaatctctgcttcttcgacttgcctatcgctttaaaatcttagaaacagagttagttgttggtttccttcttttttctttttcttttttatttcttttttgcataaacttttagagaatcaatctagaaatttgaactacttattagcatttgcaactgggggtggggggagcagcctcccccaccccaccccccactctgcgtttccggactagttccagaaaccgcggtttaaaatttaacccttcgagggtagctggtgagggctggggtattgtttttcccccttgctccctgccacgatcaagtccgaaataattaaaggaaacgtaaaagtgcaaagggcgcgcctgaccctgataaacagaggtcagatttcgtaaggggacgggtgagtgtgagtgtgtgtgtgtttgtgtgtgtgtgtgtaagagagagagagagcgagcgcgcaatatgagtctcaaaggccaaactccggccagtcaggagccggaaggctgagcccggctgacctgactttgagcttccccggagttatctcgcataggcgctcgctctgtccaagggcacgcgacgccagcgggcagccggtctccgtgaagaatggcctctaaacaacttattttacctcgttgtaaagagagggataaaatgggctttccctctccacggatgcccagccttctgggcaggcgcatggccgggcggcgcccagcccgcagccccgatccggacaccccactgcatccctcccttcccggtcccttccccgcacgggcgcccgagagacggacaaagagttggggccaagtttgagcgccgggcacggccaggctcagggaaggaaggtccccggcagacacctgggtaccagagttggtgcgaggaggaaaagctgggaggcgaattcacaatcctgggggtggagggcaggcaggggaggggaatcaggccaatcccagccgagtgagcccccagcgagctggggctccggatgggaggcctgtctcgcgctccaaagaaaagcaaaccgccctcccaggtccgcccggattgccgaagcccctctggaaaaactccttcccctcttacaccaaactttgcgccgggcctcgttccctcccgggtaggcagcggcgcaggaagggttaagccagcccgtcccagctgacagtcagctgattgggccctgattgacagctccgaaaagtttccttgtttctatactattatgctaatcgcggccgctctcgccgcctcccattggcccggagtgccagtcaatttctcatttggacctgacgtcacgagtgctataaaactcagcaattgctttaaactcttcttgctggatcagaggctttaaaatcttttttcatcttctagctgtagctcgggctgcttgtcggcttggcctccccctcccccctttgctctctgcctcgtctttccccaggacttcgctattttgcttttttaaaaaaaggcaagaaagaactaaactcccccctccctctcctccagtcgggctgcacctctgccttgcactttgcaca

SEQ ID NO: 16595 - DNA, 2300 bp, Homo sapien
agcacagctctggatattcattacaggtccaaaaaaggcatgaaaattaaaccgagctacctccaaggaataattagaagtgaaaaattgataaaggggaaatggctcaagttctcctcattgattttctgtgcacagagtcaaacttgactgttggttggaagtcagtttggctacttcttatttctttttcagcagttgggttctcccgtcagtgcgttttatgctagaatcgttctttgctctaattacagctgtcagctattgaatgagcttgacatcctgactccagaaacaaggaaattcacactccatgcatatgcagttggttccttcattaaagctgattgacatatcagacatggtgcactgtcactgatttttgtaagaaaaacaaacggctacacaatcaagtggaatctccttgatcagaaacacccagagaacccaagaatcactcttcattcaactcagccagtatttctgtaaagacctattatttgtattactgcaaaatggtagctatagtcaatcaggtaagagccagatctgtacacacatgcatgcatacacacacaagcacacaaatgcacacgcacacgcacacaccagactcagactccttccccacagctatagcagtcctttccaaagcaactttgttggagtaccaggtgttgagagtcaagcgggattctttggctagtaatagtgaactggctgagatatacagatttcttggagggaaaaaaaggagagaactacagtgatcagaatcacccacacctcaacaaaaattagagcagaactacagtttctcagagtatttctgtagttaatataataaaatgacagatgtggagttgaaatggatcatcgagtccaagcctgccaatgagttcaaaactgtcccagagcacccctaacatggaccattcagaatccagttgacattcctagcacgatgtatgccttgttcagtgtgagactactttctggaaatggatgcacaaacagaatcggtattacaggaagttgttatggcatgatccctatgaagatgcattcccaacttacagcttgtattttgtaatcaatatttgtcctcctctaacctcaggaagtcataacacgactccagccataaaattttcctgctgtgcttcgtcgtacaatagtggctcttttcctcctaggctataaggatattatcaatgtccctcaaaaggtcaagtgacttctgatcattcctaactgatctttaacgtgtttcctccaacagttccttaaacacccaatggaatgctcttctatggcaacgtatagaacctccggaactaccatttgcaattttttagtaactcagaactgttgatttttaaaatggcaaaaatacagatcctaatggatactgacaactaacagaaatactgacaagtagcaactcttcaatggagttgagaacaggaagagggtgctataactaggtgagaacataaaatgtgcaactgtgcttactctactgatcttagagtagacagatagaaagtaatttttttaagtacataaggttgtactatttgatgctctgatatatttttcttcaatataaaaactactgggaggcgagcgaacagtatctgccctgaacagggcagtactaatggacggtcacaggcagctaagactatcaccaaacccctagagcagcccaaccccgaagtcagatggtcctgtcccctccttacttgctccagggcaagtatcacacgtggacattactgcttccggtactgtttcgtgcattttgtttggtgcattttgtccgtctccctggcacctggtgggtggtgaatcagcagtttttgaacgaataagtggttatcacattaattcgtgcctcaatgaatgaatgaatggacaaacacaggccgggagcctgacccacttccctcttccctcccgggacccactgctccaggattgggcgaacctcaggtgagcgcctgctcccctcttccgcgaaccttcgcctacggcggccgggaggcatcaggagcgcggtcagggcgaaaaagccgactcgcgagcgcgcaggcgcagccctgacgcttccgtggggccacttccttttttgtctcctagcaacggcgggtagcgttgttgacatcccgggaggctgtgccgccggcctgagcccagagtttcgcggcctccgcgatggtaaatctggggtctccgtccacgccccgccgttccaagcacgccgaccgtcaaggaccttcgcacccagcttctgg

SEQ ID NO: 16596 - DNA, 2300 bp, Homo sapien
tagcttaatcacatcttgacagtccctgttgccatgtgaggtcacccagtcacaggttttggagattttgggtagtgggcacctttggggcctattattctgccgatcccaggaaatgagccatgatggaggcttggatggtgccagtgggactggagagcgtccactggggatttattttgaggcagaaccacaaagacttgctgatggaggatgtggggctgtgaaggaaagcccaaaatggagaagatgccctttactgagatggggagggagggcaggcttgagtggggaggagaggctgatcaaggggttttgtggccatgattattttgtggcccactggagagttgaggggacatgtccaggaggcagctggatgaacgagcctggagtcaaggacagaagctggactagtgatgtgagtgtgggggtctccagcccagaggcaggatgtagccacaggacaggacgagagcacccatgatatcaggaagaacagaaggtcatggggtttcaaagatggaaccaaagagcagaagccagcaaaagtatacaccactcctaaaacacagatctgacctcatcacccaatgcctagacacttctctcctctcagcagttagtttcaacatcagcacttggggatagagatggtccccaccttgagtgattgctcactctatgccaaaaatagtgctaaattccttacatacattattgcatttcagacccccttttttcccttcctccttccccattttgggggaagcgtgggagtgatggaagtaggttgactgtggagggtgggagtgatgggggtggggttgagtgtggatggagggagagtggggtgggcttgaatggggagagtgggagtggtgagggtggggttgagtgtggagggtggaagtggtgagggtgtgattgagtggggagggtgggagtggtgggggtggggttgagtgtggagggtggagtggtgggggtggggttgagtggggaaggtgggagtggtgggggtggggttgagtggggagggtggagtggtgggggtggggttgagtggggagggtggagaggtgggggtggggttgagtggggagggtgggagtggtgggggtggagttgagtgtggaggatggagtggtgggggtgaggttgagcggggagggtgggagtggtgggagtggggttgagtggggagggtgggagtggtgggggtggtgttgagttgggagggtgagagggtggactagtgggggtggacttgagtggggagagcgggaaaccacttagcctttgttgatttttccagccaaggcaggaactttgtctttttattaagatcaaaaggaatgcatgaggggtgtggacaagggctggcgggctgcaggtggaaagtgcatgcagtgggaacgtgcagccatgaggtccagggtgcattttagagaggacgggttggaggtcatggtgtggtctggaagaaaggtcaggaaatggaatcatggtgttagtggtttagaaaagtggtccgatgccagaggctaagttacttggcttggttcacacatcagcaagttcaaaccgagttcagttgtgctgcgaagccaatatgctaagtcaccataatttaacaacaggtttcccctcaaggtatcatgacattatttttttgggtctcaaccaactagcatttgtcaaagagagatggagagagagagaatgaaaagaaggaaggaaggaaggaaagaaggaaggaaggaaggaaggaaggaaatagaatagaataaaatcacagtttatttcacggagtgaaggaagggttgctgcgtgcaaatgtgtttctgtgctgtatgcttatctgcagatggatgtaccgggctgtgatatgaaacctatttttatggctggttgtggctcctctgagctgctattgggtttgccctccaccccctctcacgctgactctgggcccttcaaaatgagtcatagagagtcattaccactccccccgacccaaccctgactctgctgtacacctcatggtttctgataatacagcattgtgaagtcgggggaaggctggcagaggggcccagtctagtctgtgacctgagccatcatggtagggtgtccagggtgaggggagggtggtgtgaatccccagtaatgcaggtcctttccaggccaggcccctggtccccaggagtgcggggatgcctgaggtctactgctgccttatccagagctgccatccccggcgatgactcagagttcctgtggccccagcatcatcc

SEQ ID NO: 16597 - DNA, 2300 bp, Homo sapien
aagtcaagcttttggtgtttttgtaaaactactgattatatattcaaatttggcttagtatattatttccaagcccagtttccttcttgtcttcttccaaattacatcctcatgctatggtggtgcatttattcgtgagtacaaattaagactcattaaaatttgtttagctacctacagatagagaactgcttattattactgttattatttaaaaccatgaccaccgggaaaatatcaatatgaagagagaagttctataacaatttcaacagtttctaagccaaatatgctttctgatttattaattccttatcctcaccattttttccttatcttcatgcgggattttaactagaaattggtataaaatttgttatattggcatagttcgaaaaacaatcactgtgtacctactctctctcaggaacagtggaagatgcttgcgatacaaagataaacaagcccctatacgaagaacaagaatgttccagatggattcaatgtggaaggacattctaggcagggggaacagcaaatgcaaatccatgtgtcctggaatgagccagacatgcttcaggttccatggagttttttttttttttttttttttttggattaaaaaatttggtgacttttcaaagtttgacaacctcaggattaaacaatttatcgagcccctctgccatctcactctccatgagggcagtccaggttgagactcagatacaaatcacctttattgagttctgctgggatggacaggtcacttcatgtatacgtagatcctctccttaattctatttaaatcacttaggtgactatcaccatctcccatcagggttcggtgacctgcccacagcctcccaagtagaaaatgatccagggagcatgtgagttaatgatacatcacatctggagccaggcaggcatttcatgggtggggatgaagatcttccctccaatttcagaagtctgaccttgcaggttctgaagtaactatatacataaatatttataaggagaaccctttaagcagaggggtgaccatttatccatgagagatggcttaggaacggatttgggttttggagagcttctctagctcctccagctccgcagcctgtcacacgcaggatgaccttttagaacaactgagtgctccattacactcctcacttgcggattcaaactgtctctgggcagggtcccagttttgcctgtccagggacactgtgcacttgggttgactttggtaaatgtttgagtaagggatgagtgaataaattcggggagaggggttgttgagggaaggccacccctggctctaaagactttccagggtttatggggtggccacgcctgtcctggatccccatggtgcctctggatgggccatttcatccttcctccctgtggcctccacatcttacaacccagcctggagggaggggccgcgcagccccgaggggccaggtctcccaggcggcgtccactcccctcgagggtggaggaggtaggtggggaccccgggccggcggggctcggctggggccccttccctgaggtctgcagccgcagccctctacctggctccccggccgccccttcgcggccccagatcgggcgcacccggcgggcacctggcccgccgccccccgggggccccgccagctgctcccgaagccggcccggggtggcggggcgggcccgagcgctagtcgactctgggaccggtcccccggggcgcggccgggcagcagcccccgcctccccgccccgggggccgggccgggctcccggggggcggggactcgcccagtggcagcagcgtccgggccggcggcgggcgccgggcggcttcctgcaggcggcgccggggcgagccgttgccggctgcagccaccgccgccgggtcgccgggtcgcgggggccgcggcgctcgggccgcgtccgtgcctcccgggcgcgctgcgcggccgtcgctgctgcccgcgctcgtgccgccgccgccgccgccgccgctgctgccggttacgccagccccgccgccgcccgctctgattctgcgcataggcagcccccaagcctgtcattctgcaaaaacacagtttactcaacacaccacacacactcgcacacacacgcgcgcacacacacgcgcacaccggaccccgcgcgcacacgcacggagggcgcgagcgagcagacgcgcacaccggcgagccaagttccgcagcctggcatggcttctggggacctttacgaggtacggggacgcgggggcgcgggccggcccc

SEQ ID NO: 16598 - DNA, 2300 bp, Homo sapien
tgtatggtcaattttgcctctgtttctctgcctttacctcccctagcttggtaagcagtttctgatccctgcagggcccaggtggtggagggagggagcagaacgatcttatttgtcaggttctgtcccaaacttgtcaccgtatcatgtggtagcataaagggaatataattttagcttaaaaaataaaagcatatttgtttagttttggaggaaagagatcactgggaaataataatggtggacaaaatatattgagctatttttctgtattttcaaacacatacacaaccagaagtggctactattactttttcccactttgtttttaagaaaacagaagctctgagatgagtaatttgtcaaggtcaaatagctttttaagtgggagagcagggctttgagcccagagactttgactgcggaacctggcctctttactgctctgctatatgaagttgggaaatactgccagagcagattgcgtttccttttaatagctggtatcaaagcaaatctaatgaaaacgtgtaacttgaaaacaatgtctctgaaatttatgctcttaaaggggatttcttgtgtttgaaaataaccaactcaattggatgatatgtaaggaattaggaaaaaaaccaagcaattctcaagggaactaatttgtataactaggaaatatctcaagagaattatttcttgcattgtatgatacttgggagcatataccatacagtcagatttgcaaccagaaataatttgttgtgcgaaataagacaccttccctccaacacttggtctgtagggagaggagacgagatcaccgataatgattttcacatgtaaggctgtgatttcagttgttgcaatttgttcctttctcgacgcttcagtttggttggtattcacaggagcattgacatactttttacataatataattttccaaagcgtttttaacccaagaggttggaatattttgggtggaagcaggcattttggactgggtaccctgcatacaccagtcttcaccctgttgcccaagctattgtctctactgttgaacttctactcatcattcaaggcccacacagattgtcacctcctcattgtaagcctttctaattgtcagaacaaaatgagctgcctgcctccattggaccatagccaatttttttttttttttttaagatagagtttttctcttgctgcgcaggctggagtgcaatggtgctaccgcaacctctgcctcctgggttaaagtgattctcctgcctcagcctcccaaatagctgggattacaggcatgcgccaccacatccgtctaattttgtatttttagtagagatggggtttctccatgttcgtcaggctggtctgaaactccggacctcgggtgatccacccgcctcggcctcccaaagtgctgggattacaggtgtgagccactgtgcccagccgaccatagccaattttgtaactcacaacattttaccttctattagattgtcctgtctttgcgtcattgctctgcttaaaagtttccatttagtaggtagcgtagtcttgtttccgtgcttgccaaactatggcctgagggccaaatccagcctgctgcctggtgtggtatagcccttgggattaaaatgactttttgcttttttaaatgattgggggacataggccaaaagaaaggtaacacttcatgacacatgaaaatgatataacatcctgatttcattgtccatcattaaagttttattggagcacagtcatgctcatttatttatgcattgtcggtggctgcttttgcgcaacagcgactttgagtagttgcaaaacagaccatctggccctcaaagccgaaaatattttctatctggccctttacagaaagcctttgttgacctgtgacacggtttggctctgtgtccccacccaaatttcatcttgtagctcccataattcccacgtgttatgggagggacccaatgggagatgcctgaattatgggggcgggtctttcctgagccgtttctcgtgagagtgaatagttctcacgagatctgatggttttaaaaacgggagttgcgttgtacaagctttctttttgtttgctgccttccgtagaagatgtggcttgctcatgcttgacttctgccatggttgtgaggcctccccagccatgtggaactgtaagtccaataaacttccttcttttgtaaattgcccagtctcgggtatgtctttatcatcagcctgaaaactgactaatacaacctgtgtagtagagcagggagaaa

SEQ ID NO: 16599 - DNA, 2300 bp, Homo sapien
caaactctctctcttgtttttgttcactcattcattttataaacatttattgaccacctactatgtgccagactctacactaggtactgaagctacaacagtgaagaggtaatcccaacacagactgacacctgcaggagggaggctccctaccctgacagcttttttttttttttttttttttattattattattattattattttttttttttttttgagacggagtctcgctctgtcgcccaggccggactgcggactgcagtggcgcaatctcggctcactgcaagctccgcttcccgggttcacgcccttctcctgcctcagcctcccgagtagctgggactacaggcgcccgccaccgcgcccggctaattttttgtatttttagtagagatggggtttcaccttgttagccaggatggtctcgatctcctgacctcatgatccacccgcctcggcctcccaaagtgctgggattacaggcgtgagccaccgcgcccggccttttttttttttttttttggagacggagtctcactctgtggcccaggctggagtgcaatggcatgatgtcagctcactgcaacttctgcctcccgggttcaagcgattctcctgcctcagcctctcaagtagctgggaccacaggtgcgcgccaccatgcctggccaatttttgtatttttagtagagacagggtttcgccatgttggccaggctggtctcgaactcctgacctcagttgatccaccagcctcagcctcctaaagtgctgggattacaggcgtgagccacctctcccggccccctgacagctttggggaccaagcagtgctgtctacccagacttaaaaaaatgggtaggaattagccaggcaatgggaaaaggttgggggatgggttggagggacagtgcagagagtggcccatgtgttgtggcccaggcagtgggaacaaggtggggggacaggttagagggacagtgcagagagcggcccacgtgttggaggaggtgaatgaaggaggttcatcctggctggagcctgggtcaccaggaagggaaatatagagctgggataactcacccacgtgaggtcatgaagtgtctttatcctaagagaatgtgggccgtcagtggctgtggaatgatgggatttgagaaggggtgataatgaaggcagggagacaaatgcaatccctgtgcctggctacagatgccagaggtgggtggagaggaggagagaagggatgcctcggagaggcactcaggaggcaggaccagcaggacgcaatcacggaatgcatgtggaggtgaggaaggggcagtgttgaaggagatgcatgattctcaacacaaacaatggtggtgttagccactaagagaggggaccccagagaatgtcataagttcaatatttgacatattgaggtccaggtttctgtgggacatccagcgggaggtgatcagtggggaggtgaatgcagatggtgcttctgtcattagtgactggtttccaggttccctgcaaagtgtgtgtccctgtccaaaatctccatgctagtaatcagctgtttctctgcttgggtactgggttttggattctgagtcttacctaattctgaagcaaatggttacaaagagaaaaagctaaacaacttgttgttttatctacatggtatcaagaattttaaaaaatcacctaaaactaaaactaaattgtggattcacaccggcatgtgggcttgagccggctcctcccgcagcatctgccaacacataaggccttccctccactccttattccaggaacccaaactatcgcggggcccacttcagcagctctgcattccgatggggctcaggaagtcacactgcccagttagtgtcctcaggttaggctgagaataccaaatccatgaggacaaccccatactccatagctagcttaagacttggctgccaatgcgggacaccagacaccttaacaaggaagatatgaaggccaaagatatgaaaagaggctgtcagggtgtattagtccgttttcacacagctgataaagacatactcaagactgagtaatttataaaggaaaagaggtttaatggactcacagttccatgtggctggggaggctacacaatcatggcagaaggtgaaaggcacgtcttacatggcagcagacaagagagaatgagagccaagcaaaaggtgcttccccttataaaaccatcagatctcgtgagacttattcactaccatgagaacagtatgggagaaaccgcccccatgagtca

SEQ ID NO: 16600 - DNA, 2300 bp, Homo sapien
tgttgctgcaaaggacataatttcgtccttttttatggctgtttagtattccatggtgtatatgtacatattttctttatccaatccattactgatagacacttaggttgattccatatctttgctattgtgaatagagctacaaagaacttatgagtgcatgtttttctttttgtaaaacggtttattttcttttggctatatacccagtaatgggattgctggatctagtggtagctgttttaagctctttgagaactctccagactgctttccacagtgggtgaactaattgacattcccacaacagtgtataagcattctcttttctcacaacctcccccagcatctgtgtttttttgactttttagtaatagccattctcactgatgtgaggtgatatctcattgtggttttgatttgcatttctctgatgattagtgatgttgagcattttttcatgttttttggccacttgtatatcttttgagaagtggctgttgatgtcttttgcccacttttttttaaaatttgtttatttgttttgttttttcgagacggagtctcactctgttacctaggctggagtgcagtggcgccatcttggctcactgcaacctccgcctcctgggttcaagcgattctccttcctcagcctctcgagtagctgggactacaggcgcccgccaccacacccggctaatttttgcatctttagtagagatggggtttcaccatattggccaggctggtctcgaactcctgaccttgtgatctgcctgccttggcctcccaaagcgctgggattacaggtgtgagctaccgtgcccagccttttgcccactttttaatgggattatttattttttacttgttgaattaatttctttatagattctggatattagacctttgttggatgcatagtttgtgaatattttgtcctattctgtaggttgtctttattctattcatagtttcttttgctgttttgagatctttaattaggtttcagtttttgttgtaattgtgtttgagtacttagtcctaattctcttccgaaggtgaatgtccagaatggtgtttcctgggttttcttctaggattcttatagtttgaggcattctgtgtaaatctgtaatctatctagagttaatttttgtatatgatgaaaggtaggggtccacttttattcttctgcatatagctagccaactatcccagcaccatttattgaatgggaagtccttttgccattgcttatttttgttgactttgtcaaagatcaaaagtgtgtggctttatttctgggctgttatgttccattggtccatgtgtgtgtttttgtaggagaagcttgctgatttggttattgtagccttatagtctgaagtagggtaatgtgatacgtttggtttttgttctttttgcttaggattcttttggctatttgagcccctttttggttccatatgaatttttggatagttttttctaattgtgtgaaaaaatgccattggtagtttgataggagtagtgttgaatatgtagattgctttgggcaatatggccatttcagtgatattgattctcccaatccatgagcacggaatgtttttctatttgtttgtgtcatctgtgatttctttcagcagtgttttgtagttcttcctgtagagatcttttacctccttggttggatgtattcctgggtattttatttttttggtggcaattgaaaatgggattgtattcttgatttggctttcaggttgaaccttatagtgtatagacgtgctactgatttttctatgttgatcttgtatcctgaaactactcaagtcatttggcagagtctttagggttttctgggtatagaatcatatcgtcagtgaagagagacagtttgacttcttttcttattcggatgccttttatttctcttgactgattgctttggctaggaaataagtactgtgttgaataggagtggtgagagcgggcatcctgttcccttgttccggtcctcaagggaaatgcttccatcttttgcctgttcagtatgatgttggctgtgagtttgtcatagatggctcttattttgaggtatgttcttcagtgcctagtttgttgagggtttttatcatgaagggatgttggattttatcaaaggctttttcgcatctattgagataatcacatggtttttgtgtttaattctgtttgtgtggagaatcacatttattgatttgcgtatgttgaaccctatatatatgttttttgactggcttatttcattc

SEQ ID NO: 16601 - DNA, 2300 bp, Homo sapien
gggagcgaccccagggactgcctggggaggaaggcttaactactctgacttccatcagtttgtcagtctcatctttacaatggcatttaagaaaacatcaaaaaggtaaacttgtcacgattccaccacctccctcctcaatccagccccatccactgtgtatgcacacaatgataccaaaacagtccactgaaattccttaaaattttcagctgtcaaatgtgttttgatagctagctaaggggcccataagggcaattttaacttttcctggggagtaagctgggagggtagaagcggtagggtactcttagtgaagatataaaaattatagctttcttttactcactccttcaatctttgtctactgactctgaggtacaattttcctcaagagtagtctaagacagatttcaaccaccaggtggcacaattttagaaaataaaccaagagccagcgctgtattaactctagtataaagaaaacgggtaagcattctaataactcacttcagcaaatctataatcacaaggaagaaccctgtattttaatgccagttggcttttctttagaaagattttcctattgtgcggctgcacaggaaatttacactacagttgtaatttctaatgctactgcaaaataagcaaaaaacaaggccagaaaagtctgttgtgcagagtctgaagaaactgttctccagaaaaaaaaactgtaaacactccgctttctaaaatatatctttttaggctaggcgcggtggctcacgcctgtaatcccaccacttcgggaggccgaggcaggcagatcacttgaggtcaggacaagcctggccaacatggtgaatccccgtctctactaaaaatacaaaaattagccaggcgtggcctgtaaccctagctactcaggaggttgaggcacgagaatcactagaactcgggaggtggaggttgcagtgagccgagatcgcgccactgcactccagcctgggcgacaaaacaagacgccgtctcaaaataaaatttaaatatatatatatataaataaataacataaaacatttttaaggcctacatttcggccctggtattaaagaattatttttcaacttttcaagctatgagccatactgcagcagaggtcgcagacacggtcggggacggcctcccctgcccacttccacttatcacaggaccagttctaaaccgataccactaagaaagcgactggcgctggcactgtagaccccatgccaggctgcttctgggagggacccgggggtgctgcctagggagaagggcttaactactctgacttccaccgaagagtttctcagagaatgcgccctcgcagctttccctgaataaacattaccaggacttacaaggtgcctagcactctgccagaatcatgtgaatttcagaggaaaatactcgttcacacatctcaaggaacgcacaggctcgtgagggagcattcttgccaatgcacatggtaaatgcccaatcgatgttcgcggaatgtcagaaactgacaactagttcaggcctcaacgcagtaggaaaaggatgaaaaagaaactcattttaaatcaactaaacaagtgcaaaagccatacatataaaggagaggagatacgaatggcatcacaacataattcctttgccatcgaaaacttccatgcctttgaggttttaaatgaagacttccaaaactgatttacttaagactctacgtaaaacgcctgatctttaaacgcaagaaaagcaagatgaatgtattactttcctggaaaaaaaaagcattaaaggagaaaaaagagtaaagtgtactgatggggctcttggtgggttctcacatcacagggcactgcagctgagacttgcttgaacggcccccgttttctacccgcaaattctcaattgctagataaacaacaataacaacactttattgggcgctcatcgtgtcaaaccctgtgttgagggctccattcctcaaggtccattttaccggcgaggaagccccggctccgggaggggaggagcgcgcccaaggtcaccagccagttgagtgagtggcgggcggatcccaaccccgagcgacgcccacggcctgtctcggccaccagcgtgttccagcgagcgcccagccacctcgctcgcagcctccccagcgcagcagcccggctgtgggcctgcggcagccgggtcttcctggtccccacctcctggggccgacgggcggcaggaaggggctcggcgggacgcgccatcagggacctgaggaggaacaacgg

SEQ ID NO: 16602 - DNA, 2300 bp, Homo sapien
aaaaaactgtaaacactccgctttctaaaatatatctttttaggctaggcgcggtggctcacgcctgtaatcccaccacttcgggaggccgaggcaggcagatcacttgaggtcaggacaagcctggccaacatggtgaatccccgtctctactaaaaatacaaaaattagccaggcgtggcctgtaaccctagctactcaggaggttgaggcacgagaatcactagaactcgggaggtggaggttgcagtgagccgagatcgcgccactgcactccagcctgggcgacaaaacaagacgccgtctcaaaataaaatttaaatatatatatatataaataaataacataaaacatttttaaggcctacatttcggccctggtattaaagaattatttttcaacttttcaagctatgagccatactgcagcagaggtcgcagacacggtcggggacggcctcccctgcccacttccacttatcacaggaccagttctaaaccgataccactaagaaagcgactggcgctggcactgtagaccccatgccaggctgcttctgggagggacccgggggtgctgcctagggagaagggcttaactactctgacttccaccgaagagtttctcagagaatgcgccctcgcagctttccctgaataaacattaccaggacttacaaggtgcctagcactctgccagaatcatgtgaatttcagaggaaaatactcgttcacacatctcaaggaacgcacaggctcgtgagggagcattcttgccaatgcacatggtaaatgcccaatcgatgttcgcggaatgtcagaaactgacaactagttcaggcctcaacgcagtaggaaaaggatgaaaaagaaactcattttaaatcaactaaacaagtgcaaaagccatacatataaaggagaggagatacgaatggcatcacaacataattcctttgccatcgaaaacttccatgcctttgaggttttaaatgaagacttccaaaactgatttacttaagactctacgtaaaacgcctgatctttaaacgcaagaaaagcaagatgaatgtattactttcctggaaaaaaaaagcattaaaggagaaaaaagagtaaagtgtactgatggggctcttggtgggttctcacatcacagggcactgcagctgagacttgcttgaacggcccccgttttctacccgcaaattctcaattgctagataaacaacaataacaacactttattgggcgctcatcgtgtcaaaccctgtgttgagggctccattcctcaaggtccattttaccggcgaggaagccccggctccgggaggggaggagcgcgcccaaggtcaccagccagttgagtgagtggcgggcggatcccaaccccgagcgacgcccacggcctgtctcggccaccagcgtgttccagcgagcgcccagccacctcgctcgcagcctccccagcgcagcagcccggctgtgggcctgcggcagccgggtcttcctggtccccacctcctggggccgacgggcggcaggaaggggctcggcgggacgcgccatcagggacctgaggaggaacaacggaacgcgttcggaacggcctggactcccgagactcacccgactcgtggccacaccgggagaactgaagcggcagtagccggcggagacgcccgacccgaaggccggctgctagggagcagacagctgaaccgcttgccagacgccgaaacccagtgacgccctccaccgctccaccgtgctcccggctcctcgcccccgccgcccgcgggccccaaggcgcatgcgccgcctgtcctggaggggcccatttccgtccgtcgtggggggaggcacagtgagtccactggggcacggcagcgtctaagccacaagccgagcacataagccaggtcctaacggagcctatgtgtaagtccactactggtgcaaggttgcacacttctaagaagagcggcgtggggggctcggcgaccttcgcttcagtcgctcccccgtgcagtcccctgtgcccaagacacagcctgatgcttgtgctccggtgggcggagcttggaggcggcgggaactgcaattggtggctttgaaggcgcggcgagcgggaacagctcttgaggagtgagactgcaggagatgtgggccggtaagagagccccgggcggcactggatcgggccccggagggtgtggggccttgaggaagccagatcccaggcctcgggggtggctttttcgcaattgtcgcacgttgtgaggcgcaggattggcgct

SEQ ID NO: 16603 - DNA, 2300 bp, Homo sapien
agctcaagtgatcctcccgcctcggcctcccaaagtactgggattacaggcgtgagcctctgcaccaggccatccactgctaattgtctttacagaactatctgaaattatctttttaacttttcttgtttctaaaattgagctccagggcaggacgatgtttttattcacagctatactcctagaccagaactgcctcactatagtcagtaagtctaatcaggccaagaacagtctaatgtgtctttgataaatacttgtggaatgaatgcctgaggagacaacctgggtggtttggggttcaacagtcagtgaaacatcaaatcaacacctctcccattaagaacacgggcgaggggccgggagcgcgccgggcgtggtgtatcacttgaggtcagtcgttcaagaccacccaggccaacatggtgaaactccgtctctactagaaatacaaaaattagccgggtgtcgtgacgcacacctctagtcccagctactcgggaggctgaggcaagagaacagcctgaatccgggaggaggaggttgcagtgagccgagaacgtgccactgccctccaacatgggcgacaaagcaagactccgtctcaaaaaaacaaaaaacaaacaaaaaaacccacagacgaggctacccgttaaaatgaagattcctgggccctatcaaattaaactgtgaggagggcgcacggagggcttgagatttagcatcttttaaaaagtacgtcagatgatttattccgggtaaagtttgcagaacgccagtctaaagaaatttggtagagcgccctcagtctcaccaattaagacggaaatccctttagtaaacgtttaccccgtgaccatttttaaactttcctttttttgttgtttcggagacacagtctcgctttgtcgcccagggtgcagtgcagtggcgcgatctcgggtcactgcaacctccgcctcccgggttcatgcgcttctcctgcctcagcctcccaaatagctgggattacaggcacccgataccacgtccggttaatttttgtatttttagtagagacggggtttcaccatgttggccaggctggtctcgaactcctgacctaaggtgatccgcccacgtcggtctcccaaagtgttgggattacaggcgtaaactaccgcgcctggccccattttaaaactttctttatacttcctagcgttttagtgtctgacatacagtagatgctcaagatctgtggaacgcatgatcaaaaagatccattttaagtaacgttcccgtagccacacacctctgctgcgctccaacaggcaatgcgaggagcaacgcaagagggtacagggacaaaaaacgacggaagccgaggtgacagaaaagcaaaaccccaactctgggaaaggaagcaaccccaggatcgtagagcggagcccctggtcacatgaccacacggccctcccctgacgcagtcgcgagcctacgaaaggctccacccgccccaccgcgggcgaggtgacgtcacagccggcacagcgccaccgccccctcacctcggcccgaaccgtagttcctcgccccgagcccgagacccagcgccaatcctgcgcctcacaacgtgcgacaattgcgaaaaagccacccccgaggcctgggatctggcttcctcaaggccccacaccctccggggcccgatccagtgccgcccggggctctcttaccggcccacatctcctgcagtctcactcctcaagagctgttcccgctcgccgcgccttcaaagccaccaattgcagttcccgccgcctccaagctccgcccaccggagcacaagcatcaggctgtgtcttgggcacaggggactgcacgggggagcgactgaagcgaaggtcgccgagccccccacgccgctcttcttagaagtgtgcaaccttgcaccagtagtggacttacacataggctccgttaggacctggcttatgtgctcggcttgtggcttagacgctgccgtgccccagtggactcactgtgcctccccccacgacggacggaaatgggcccctccaggacaggcggcgcatgcgccttggggcccgcgggcggcgggggcgaggagccgggagcacggtggagcggtggagggcgtcactgggtttcggcgtctggcaagcggttcagctgtctgctccctagcagccggccttcgggtcgggcgtctccgccggctactgccgcttcagttctcccggtgtggccacgagtcgggtgagtctcgggagtccaggccgttccgaacgcgttcc

SEQ ID NO: 16604 - DNA, 2300 bp, Homo sapien
cactgcagcctccgcctcctgggttcaagcaattctcatgccttggcctcctgggtagctggaattacaggtgcccaccaccatacccagctaattattgtatttttagttaagacggggtttcaccatgttggccaggctggtctcaaactcctaacctcaagtgatccactcgccttggcttcccaaagtgctgagattacaggcatgagccactttgcccgacctgccctctatgtttgcagttagcagattaaatggtccccacccctgttaattcctgtatttcttaatggcaagaattaatgaaacgtatcattatgatttcattatattttaccattcgtatttatacaatatgtttaatagtcatttataaatgtttgttgacagcttgaaacgaaattcaaaagtggtttaaatgggagcatcttggctgagagggaagaacccctccgatgcctaataaagttctctagcccacatcttctggaagcattgaaatccttagcaccagcgggtgagtggtcagcttactctataagctagaaaaattaacaacatgcctccattccatccttataatctgctaattacttctgagctcacccatcaccctagtctgctagcccatcctgctctctcttgcatcttctgcttctgtacttaatagggaggaggggcatctatgatccaccctctaatctcagccatttttaaactgactcaaatccatcctcctgtgatgacttttaattttctttttcccttttttttttttttaatttcaggtattgcagatgctccactttctccactgctcacttgcatacccaacaagagaatgaattattttaaaattagagataaataagacgtgcgtggtttcttaagcacagctcctccttcttgatattgcacatgcacttcagttcatggctagctgtatagcttccgtctgtaaacttgtattttcaagaatccttggtattgaatttttagaaatgctcacataattgttgggactgattcattcctccacgatatgcctcctctctctgatatcctgctaactgtagccgttgtggcatttgagatgacaggacatatatatatatggccccacacttgaccttgagtgcctgaatgctctgaaatcaagcatatggcacagcgctcaagacttttgggtttgtgtccttttttctatggctgtctcttctcaattctggagaggtctggttccagtggctggtttccagggattgattcttaagctctggatcacagagagaagcaacaaggaactatactcaactcaaaactttttaggagaatcatgaaattggtctattcaaaggatggagttgagtccattctgttattgttgcaagaggttgcatatttggtgagtcagttatataaaatagtgttcttattgtaaatatgatacttctcataatctattttatcatgtgtataacattcaaactgacaaatatattgacttatgaataaaggtgtcaaaaaactggcacatcagttaattttgatcaaagtacttcagtgatcatcactaaataccctatctttttaaaaattttttcctttctaattttttatttctttatttatttattgagacagggtctcactgtgtcacccaagctggagtgcagtggcatgatcatggctcactgcagcctggacctcccaggctcaagtgatccttccacctcagcctcccgaatagctgggattacagacgcgctccatcctgcccagctaattttttttttgtttgttttttgttttttgagacaagtctccttctatcgcccaggctggagtgcaatggcacaatcttggctccctgcaacctctgcctcctgggttgaagagattctcctgcctcagcctctgagtagctgggactacaggcctgcaccaccatgcccagctaatttttgtatttttagtagagacagggtttctccatgttgcccaggctgatctcaaactcctgggctcaagcaatctgcccattttagcctcctaaaatgctgggattataggagtgtattagtctattctcatgctgctaataaagatacctaagactgggtaattcacaaaggaaagaggcttaactgacgcacatttccacgtggccagggaggcctcacaatcatggtggaaggcaaatgagaagcaaagtcatgtcttacatggcggcaggcaagagagcttgtgcagggaaactcccatttataaaaccaccagagctcatgaaacttatt

SEQ ID NO: 16605 - DNA, 2300 bp, Homo sapien
acccggctaatttttgtatttttagtagagacagagtttcaccatgttggccaggatggtctcgatctcttgacctcgtgatccgccctgcctcggccacccaaagtgctgggattacaggcgtgagccaccatgcctggccctttcacctcttcttggttgacataagcaatcagttctacagcagataccagctgggtatgctccagttcaattccaacactaactacctggcgatatcatcagaccccataggttaagggctcagtcccacaaaactgccacccacttctgaggccagttgccagccccaggttgtttcacctgcgcttctgactaaccagctataaattgcatttcccacaaccctctcttcatgttcaattaatttgctagggcagctcacagaactcaggaagacacatagactgacttcttacaagggatgttacaaaggattcagatgaaaagatgcatagggcaagagcttccacgcatgccctctttgagtgcgcctccctccaggaaactccatgcattcagctatctggaagttctccaaacccatttcttttgggattttatggaggcttcattacctaggaatgattgatcagcttaagcttcagcccctgtctcctccccagaggttgagggggagggctgaaagtctcaagcctctaatcctaccttggtctttccagtgaccagtcccatcctaaagctacctagggactgtgagtcatcagtcaactaattagcatacaaaaaaacaccaatttgctgattccaaggattttaggaattgcatgccaggacaaagaccaaatatatacttcacattatcacagttatcttgcaaggcaaagggacttggcagttggagaaattatcctggatgatttgaatgggcccaatgtcatcacagggggcctcaagaatagaagaatcagagggatcactactgaagaaatcagagtgatgtgatgtgacgaagactcaactcaccgttactgattctggagatggaggaagggtccgcaagccaaggaatgtaggcaacctctagaagctgggaaaggcaagtgaacagattctcccctggagccttgggaaggaatacagccctgctgacaccttgatcttagcccagcagtctcatttcttttgacctccagagctggaagataataaatttgtgttaaggcagtaagtttgtggtaatttattaatagcaagagaaaacgaatatagctgctagtatgtaaaaggtggaaattttcacataaaactctagccataccaaagatgagtagcagctgcccccttttaataaaggatgtgtttccaatttcactgcagtcctcacccctcccttttgtctaccccagcctcctatgtccatttacatgaactacccagtctaagtattaagttttgtaatcgtatactgaactgcagtgtctcccaaacagtaatcctaatttcagcagctaaaatagaagcaagcaaatccagccttcttaaaatgattaatcctatcaataataacaatcttttcatttgtatagtgtggtctaggtcaagttacttaatttatataagcctaaatgtccttctctgcacaaggtggggcaagttacagtacatacccgctacagtcgttttgaagacaaaatgagacacagcatgaaaagtgcatccaccagacccacctggtacccagtaaggcctaggtaataaacaacggcggaaatcagtgtacttctgcctcacctgccactagacatttgggttgtttctaatctttgggaagtaaacgcattgctcaacgtattgctttttcttttatgtgactactgcctgaagtcactttcctaggaagaatggatcgattagagaggcggggcaataccttttacctgctggcaggtgaaatttcgcctcctggcggcgtcacctaaagtcctctccctccaaggcgcgccctccgcggccggcagggggcgccgcggccgcctgggcccgccggatgctaacaagcctggcggcctcgccccctgccggaagtggctgcggcgggggcggggcctacgaactgggccgggcggccgtgcgggagccatggcggcctcggaggcggcggcggcggcggggtccgcggctctggcggcgggtgcccgggccgtcccggcggccacgacaggagccgccgccgccgcctcgggcccgtgggtgcccccgggaccccgactgaggggcagccggccgcggcccgcgggggcgacgcagcagcccgc

SEQ ID NO: 16606 - DNA, 2300 bp, Homo sapien
taccccagcctcctatgtccatttacatgaactacccagtctaagtattaagttttgtaatcgtatactgaactgcagtgtctcccaaacagtaatcctaatttcagcagctaaaatagaagcaagcaaatccagccttcttaaaatgattaatcctatcaataataacaatcttttcatttgtatagtgtggtctaggtcaagttacttaatttatataagcctaaatgtccttctctgcacaaggtggggcaagttacagtacatacccgctacagtcgttttgaagacaaaatgagacacagcatgaaaagtgcatccaccagacccacctggtacccagtaaggcctaggtaataaacaacggcggaaatcagtgtacttctgcctcacctgccactagacatttgggttgtttctaatctttgggaagtaaacgcattgctcaacgtattgctttttcttttatgtgactactgcctgaagtcactttcctaggaagaatggatcgattagagaggcggggcaataccttttacctgctggcaggtgaaatttcgcctcctggcggcgtcacctaaagtcctctccctccaaggcgcgccctccgcggccggcagggggcgccgcggccgcctgggcccgccggatgctaacaagcctggcggcctcgccccctgccggaagtggctgcggcgggggcggggcctacgaactgggccgggcggccgtgcgggagccatggcggcctcggaggcggcggcggcggcggggtccgcggctctggcggcgggtgcccgggccgtcccggcggccacgacaggagccgccgccgccgcctcgggcccgtgggtgcccccgggaccccgactgaggggcagccggccgcggcccgcgggggcgacgcagcagcccgctgtccccgcgccgccggcgggggagctgatccagccgtcggtgagcgagctgtcccgggccgtgcggaccaacatcctgtgcaccgtgcgcggctgcggcaagatcctgcccaacagccccgcgctcaacatgcacctagtcaagagccaccgcctgcaggtgagcccgacgcggccggcggcccggggggccgggcctggctccaacaaagcgcccggcgccggcgcgcgaagccggcctcggggggacgagcgccctgcgcgctgccgctgccgctgccccaccggcctctgccctccccggccggaggcggctctcgaaccctcgcggcaggcgccgcaggtgcggcctctgggggggaggaggagctgggagccccgggtccgccgtacgcgccagttccctggttccctggctccctggccccgagtgtcgtgccggacgccggcccaggctttttacacttttttgcctgtgagttcttaacggcgttttggcgagggacgcatcgtctccattatattaatgagaaacagattatgcaacctagatgatgcggggctttaaaccggggcctctggttctaaagccctgtgcttgccacgacacccacaatgccgcccttgggtcctgcccagtggactgtatgtgccacaataactagaagagagggttttaaatgttctcaccaccaagagacaatacgtttgaggtcgaggacatgttaaacactctgacttgatcactatgcaatgtatatgtccatccatgctgcacaccgcaccccatcagtaggaataattactgtgtgtcgattatgaataaaaaaatgttttaaaggagcggtaggtttgcctctaaacaccatcagtcagtttcacggtgttggtaagatcagctcaggactgagacctaagggaaattgcccctgtggctcttctttaagagggggacacagtaaatacaccatgacaatagtctcaacaaccctccacgttatgcaaaacagggcagtcattttcaaccttgggacacatctgtgacaagcttattaaaaatccagatgtccagccccaccccggacctgttaagtcacaatctctcagtcattacaatggcaagtttccttccaccactctaggccagcagtgacataattcaaaagcgcaagtcattgaaagcagttctgcgaatatgtagcttttgatgatcaggagtaaatttagagtacccagaatattgcatgttctgtctgcccatagtcaggcttctgataagaatttcacagcagaaaactctgaggttgtagtctctagtaggacagatgtgtcgccaatgaagagtgatctgctcttaccaccatctaaaccgggatgcaacaa

SEQ ID NO: 16607 - DNA, 2300 bp, Homo sapien
caggataaatccagtgttcactgcaataagtaaaaataagaaccatcttcctttttcctaagagctgagaaccatcaggatgtatattttttagtaccccagctttgccactgagcatttctgcctttgcctataaaatgagcgagtaatgtctgaaatttccctagttctgtcattttaatgcatttaacttgcctgcaaacattattattatagagacgcaaaatagtgaacagttatttctgtttcaggttttgttttgttttgttttgttttgttttgtttgagatggagtttcgctcttcttgtccaagctggagtgcaatggcacaatcttggctcactgcaacctccgcctcccgggttcaagtgattcttctgcctcagccccctgagtagctggggttacaggtgtgtgccactgtgcccagctaatttttgcatttttagtagagagggggtttcaccgtggtagccaggatggtctcgatctcctgacctcatgatccgcccgccttggcctcccaaagtgctgcgcttagaggcgtgagccaccacacccggcctgtttcaggttttgatcagtcttgctctggatcctggcctttctaatgtgaaaaacaacaacaacaacaacaacctaaatgaacttcagtttatacgtttcaaaagatgatgatggtaaaaaccctaaagaaattttagtttttttttttaacctaagactgtgggcacttaaccttctctaccaacacatacttttttttttttttttttgagacagagtcttcctctgtgggccaggctggcatgatctcaactcactacaaactctgcctcccgggttcaagcaattctcctgcctcagactcacgagtaggtgggattacaggtgtgcacaaccatgcccagctaatttttgtatttttagtagagacagggtttcaccatgtaggccaggctagtctcaaactcctgacctcaaatgatgcgcccgccttggcctcccaaagtgctgggattacaagcgtgagccaccatgccctgccccaatacgttctaaacaatatacataacttcttagaggattgaatggcccaggtgggtgctgtatttacagcaatgctcaaagccaccccatcacctggcctatctttaggacagggcttttcaacctgggcactatttggggctggatcattctttgtgatgggcctgtatgtgcattgtgggatgtgtagcagcatccctggccttgacatattagatgccaataccatccccagtcatgacaacgaaaaatgtatccagactttcccaaatgcccctttagggcaaaatcaccctagctgagaaccgctggtttagggaattagtaatctggagcccaccgcctttgctgcagcttctctgacagctttacttatagatcaagcaggtgccttggtgcaggtgtgaagggagctgggggaacgcccagcttgccacatcccagaaggcatatgtgctctccattttgcgctggtcctctagggtctcatggtggcacctgcctaggtcctttctagaaagaagcaaagaagcagccataagtctgcttttttttttttttttttttttgagacggagtcttgttctgttacccaggctggagtgctgtggcgcgatcttggctcactgcaacctccctctcccggattcaagtgattctcctgcctcagcctcccgagtagctgggattacaggtgcctgccaccatgcccagccaatttttgtatttttagtaaagatggggtttcaccaggttggctaggctggtcttgaactcctgacctcaagtgatccacccatctcagcctcccaaagtgctaggattacaggtgtgagccaccgcaccctgcgaagtctgcttttctctgagaagagtctctcagagtaacaggagggcccattcagtcagtgacaggaagagttgtgggcattctctcttcccatcttcaggagaatgtgcattactggtttggcaaggttttcgagataagtcgaagatgttaaattagtgtatttacatttactgccattattcagaattctctgatgtttaatactcacttttccacactcactgcttgggctgaacaggcgtaaatatgaaaaggcagccaatactttgtgggatacaccttagcaagcactggcaatctgtgcttcatatgtatatatcaaagtggcttttctctcccgtttagcttaaactacaaatcttcctccccatgtatcttttaaaatgaaacagttgg

SEQ ID NO: 16608 - DNA, 2300 bp, Homo sapien
taccaagagttatagaagttgatgtctctctctctctctcttttttttttaacacctattgcctagatcagggataaagaatacattctggccaagcacggtagctcacaccaataatcccagcactttgggaggccgaggccggtggatcacttgatgtcaggagttcaagaccaggctggccaatatgatgaaaccccatctttaccgaaaatacaaaaattagccaggcatggtggctcacgcctgtagtcccagccacttggaaggcagaggcaggagaatcgcttgaacccgagaggcagaggttgcagtaagccgagattgcaccactacactccaacctgggtaacagggtgagactgtctcaaaacaaaacaaagaaaattctgaattgtcaactccaaactagtggctacctagagtgttgtattgagaaggatcttatgacctgactatagcaggaaaaatttctggggttgattaattatgtctgccagaaaatagagtgtgccacatgtttgccagtctgtctatatagtcagattacaaatatcttaccgtagcttcctatacctggttgacagattcctaatccattaagggcaggggaatgttgaaggaccaggagaaaccaaggcccagggtattaagtcaaacgcaagctgtttatgtcaaaagcagatagatggtaatctctcaaaactccttatcaccttgcctcaacttctcattggctctccactgtgccacacaccctcatcttcctacaagctataggtttaaaggaatcttaaattccaaccagggaaagatgagtttctggcagcctcatttggaatttgaatgaacgttcctgtgggtcggctccttaacaacctatgctgaatgaaggaataatcattagaaatattgttagccatggcagaagttaagtttcttaatacaggaccaatcttcacttacatgaaccagttaaataggtcctgaagactgacctgggcatcctgatcatttgtgacacagtttctacaggaaaatgagttgggagtcgcatttagaaacacactggaaggagctgaacctttgtctgaaagttaagcacccgcgccacccaacttgcacaatttgttcatatttccaagagtataaattttatcctccttgttaattatatgtgccttctgcttattatatgcctacaggtcacaggaacctcaagtatttcacagaatgatgccaaggagcgcagtttctacaccatccctcccgatcagaccacatctattccaatctcagtctcaaactcttcccctttttcaactcacattaatgaattcactaagtacctagcactgagaataaaaagctaaagcagcatccgtcttctctactctcacacagcttacagtccacagcaaagcgcaagtcatcaaacacacgcgctccacctgccacccctaaagcccaggcgcatcacgctcggctccacctcttcatctagccccgccccttcctgcaggccacacccctttctctatcaggctcctccctttatgccataagccttttttcctcatctagctcttccccttcctccgccagttcctaccgtgccacaaagacgcctgcccttctttcaaactatcccattcagaaaagcgttctggattgcccgttcgaattcctccccgtcctccgtctacccacccttaaagggttccgctcccaacggatcctcctcaggccccgcccctccccagaccccgcccgctctggggaagccccggcacatagtgcctctgcctttcgctccctctcgcttcctttcgaacgaggcagggactctcgctctgtcgcctttggagtggtcccgggccttgccccaggggtggagaaatggccgctcacacctacctgtggggccaagcggatggaaggccccgagacagctagtcccggcctactggcaagagctactcaggtcgctgccggatgggccgttgccttgggttacgaccacgctgggggcgggaccgcggcggaagtgacgtagcccaacaaagcctagcactggcgaggcggttcgtggcatctcctatccgctccgggcgctgccgccggaagggccagcgacggagggtctcagatggcggggcttgaggcccacccgggctctcgggtcggcgagtcccgttggggagcccttgtgcctgctaggatatttagcagatgccaggcggccagaaacgtcctcacttttctccctcggccctctggggaaccgccgtgagcgtttc

SEQ ID NO: 16609 - DNA, 2300 bp, Homo sapien
gtgcctttctttacaccaggattaaattcctctttcttccctgcaacaggcctttcctgccgcccaggctggagtgcaatggtgcgatcttggctcactgcaacctccacctcacgggttcaggtgattctcccacctcagcctcctgagtagctgggattacaggcgtccatcaccacacccggctaatttttgtattagggttttgaaatggggtttcgccatgttggctgggctggtcttgaacttctgacctcaagtgattgacccgcctcagcctcccaaagtgctgggattacaggtgtgagccaccgcacccacccatctccctttaattttaaaaaatagatatggggtcttgtgacacttcccaagctggtctcaagtgattctcctgccttagcctctcctgtgagtaactggtattacagacgcaagccaccactcctggctttttttctttaaaatacattttatgtgttagaggaagtttacagtcacagcaaaattgaggagaaggtacagttctgtacgcttccattctccgtttttgcaaagtgggatcttactataagtagagtttctggtatcttgactcaattcctatgttgactttttataaacataactagccaaacccttgtcccttcatgtttccactcaatcatgctatcgggcttttacctgctaaatgcaggaatagttagtgtgaaggaagtcaggttctagatcctccaacttccccatgtacttgccgttaggttatttaattaatattcatttagcaaatcttagttaagacttttggtatacttcccagaaacttttttctaatatgcaaggtcttgcactgtttcccaggctggagtgcagtgacacaatcatagcttactgcaaccttcaactcctgggctcaagggagcctcctgcctcagctgggattccaggtgtgagccacggtgcccagctgttttcaatagatctgaaggaagaccaaaacaaattgtcaactgataaaacatttaaatgtttttggttaatacttactagcttgagatacaataaaaccccttttatttgcatcttcctatttatgtgaacaaggtacctaagcttacacgtatgaaaaaagttggaatagaattatagctgaatccgtctcattggagcaatcacagtgctagagaacttagataccaaaattttttttgagacttgagttttgctctccaggctggagtgcagtggtgccatcacagctcactgcaacctccgccacccgggttcgagccagtctcctgcctcagtttcccaaatagctgagattacaggcgcccgccaccacacccggcgaatttttgtatttttagtagagacacggtttcgccatgttgaccaggctagtttcgaactcctgatctcaggtgatacacccacctcggcctcccaagtgctgggattacaggcgtgagccaccgcgcctggcctagataccggttttctacagcagaaatagtcacactttctaaagcagaagggctttggagtcagacccgagctggagtgggggatgctttgcgatctctcttcagcaagctgttgttttagggacgtggggccaccttcctttatttgtataaaagatgccactgcccacttaagagctgtgctgctccgggccagcagttcagcgagtgcccgtcggcctggtgctgtcggtcacgtaagtgggctctttgaggctcacaacgcgtcctccctggacgttctgggcctgttaagtttgtgtccgtgggaaacgctcacggcggttccccagagggccgagggagaaaagtgaggacgtttctggccgcctggcatctgctaaatatcctagcaggcacaagggctccccaacgggactcgccgacccgagagcccgggtgggcctcaagccccgccatctgagaccctccgtcgctggcccttccggcggcagcgcccggagcggataggagatgccacgaaccgcctcgccagtgctaggctttgttgggctacgtcacttccgccgcggtcccgcccccagcgtggtcgtaacccaaggcaacggcccatccggcagcgacctgagtagctcttgccagtaggccgggactagctgtctcggggccttccatccgcttggccccacaggtaggtgtgagcggccatttctccacccctggggcaaggcccgggaccactccaaaggcgacagagcgagagtccctgcctcgttcgaaaggaagcgagagggagcgaaaggcagaggcact

SEQ ID NO: 16610 - DNA, 2300 bp, Homo sapien
ggtgtgcaccctatggtactgtttccggtgtttgaacaagaacaactccattttgaatatgggctgggtaaaatgaggctgagacttggtgggctgcattcccaggaggttaggcattctttttatttgtatttttttctgaagcagagtctcgctctgtcacccaggctggagtgcagtggcgtgatctcgactcactgcaacctctgcctcccaggctcaagtgattctcgtgcctcagcctcctgagtagctgggattacaggcacctgccaccatgcctggctaaactttggatttgtagtagagacgggggtttctccatgttggccaggttggtctcgaactcctgacctcaagtgattcacctgcctcacttagtcacaggatgagctagggttggcacaagatacaggtcacaaagtccctgctgataaaataggatgcggtaaaggagctggccaaaactcaccaaaaccaagatggcgacctctggtaggtctcactgctcattatacgctaattataatgcattagcatgttaaaaaaaaaacaactcccaccagcgtcatgacagttcacaaatgcaatggcaacgtccagagaagttaccctatagtccaaaaagcggaggaaccgttagttctaggaaatccctgccccttttctggagaactcttgaatgatccaccccttgtttagcatacaatcaagaaataactataagtacacttagtcgagaagccatactgctgctctgtctacgaagaagccattcttttttttctttacttctctattaaacgtgctttcactttatagactctccccaaattctttcttgcatgaggtccaaaaaccctctcttggggtctggattgggagccctttctgtaacagtactaaaggtgtgtgtgtagcttaaggtgtttttcagaacagtatttctttgctgactcatggccactccataaaatctgtgttaaaggtgaggtttttcccagaacctaatttttttctgacttcttggattgggatgatgacttcggcttttctcggaaggccttggtcacaccgctggccgatgaaacaaggaattgtgcacactgggtctcagctctctgcgttttgaatatttctgcattagtgactggcttgggtccagtctccaccaagaagccacttatgacccttggacaagtctttattcctttttaagtaagcttctggattctgccggtcctgtttggggtccctggggctctttgagacaggaacgttacagagcagttgaaggagaatagaaacttccaggctgcagttctgtctaacaaaaggaaactgttgaaatagctgcacaagctatgggctaagaccctgaaaaaccagggtgtgggtcaacctggctaaaaccaactggacccaacgtggtgtggctttgacctaggcttcacctaggactcattaacatactaagtcacacacccaccggcaccacaacaattccgggaacacccatatttggtgtaaaaatgggtggcaccacagttctgacaagtctccaccttattccagaaacctttgtgtatattccatttctcaaagaaacccataaagatggaaaccccaagccccattgtgtggccctcttttgagtccgccctttcttcagtgtgtactttgcagtaaacctctgtactttcacgactttccgacttgttcttgaattccttcgtgaggtggtgaaaccacctttgaaaacttatgacagaggcagtaaaagagatacacatgtggaaaggaacccagtctggggctaggccccgcccccctcctgcgggcagcccaatcatacccaggcccgccgcgctagtctccgcctctcggtgctgcctcttccgggcctcaggttcttccccatgcccacgcccctctttcgcgtcgccgtatccgaggtcgcgccaggccctggagtccccagtctccgcgtgctggccaatcagaccctgcctcgccccctcgcctgggagtctccgccctccacgctctgcccagtcaggctctgtcccgcccccgcggcaccgcctccgcgcctccatccagccggctccctccggccgcgaactgcccctccccgccccgcctcccggcgcgggtggccgaggcgtagcgctgcgacccccgcacccctgcgaacatggcgctgcgagtggtgcggagcgtgcgggccctgctctgcaccctgcgcgcggtcccgtcacccgccgcgccctgcccgccgaggccctggcagctggggg

SEQ ID NO: 16611 - DNA, 2300 bp, Homo sapien
atcgcagctaatcccagctactcaggaggctgacgcaggagaatcacttgaacccgggaggcagaggttgcagtgagccgagattgcgccattgcactccagcctgggcaataagagcaaaactccatctcaaaaaaaaaaaaaaagagaaaaagattacaaaattagtcgagcgtggtggtgggtgcccataatcccagctactagggaggctaaggcaggagaatcacttaaacccagaaggcggaggttgcagtgagcctagatcatgccattgcattccagctggggcaatagagcaagactccatctcaaaaaaaacaaagctcatctttacacctatgggactttgccaaatcccctctcgtcccccattcttccctgaacagcctttaccataagactcaaaaagcatccgacacctcccttcaacactaggctcgcaggatactaagaacagggctgcgtcttgagcctttctgttccccaagtgaaccacaggatcctcctgtgtttgtgtggagcaggcgcagagatcacgtggctgaggccttgcagctgagaccctgcacctgagcgcattacttaatactggaggaaagggaaggagcagggtggggcaggatccctgtgctgaaagccctgggggagagcaattctccttgcggagagatcagagacccctcagacaggtgagcggtagtaggtgggaaggctcaggggagttctaggactggccagtcccccatctggtctgcgagccaaggccttgcggtccagcttcatgaccacctcccatctctgcagaagggagctgcattcccccaaaacacagggccctccccaacatacaaacgtggccccaagccccacgtgctcgcagatgaggggttgagagttaccagagtgggttcgaggacctccctgggtatttttcaggtgctgggattcgctgctttctttgcactggtcttgaagagagtggacgatgaggaggatactgtggccccgctgccaggacatctgttgggcccaggtaatgtgcctcggtggctggaggcagggtctggccagctgcggccctgatgaggctcagtgagccctgcagagtgcagcctgttgggggtcctgggccttgggccagctccccagacctttgttcctcatcagcttttcacccccagtttgtgagccatccccaaaagagccaggaaaaaagtgactccattgtctcctgagtatctgtgtttgttcgttccctggcatttctccatgacacccaagtatgacctgccagctagaagagttgcctcagggacgaagctgtccacatgggcggtccttctctgtgtaattccaagcaagcagctttcttctccgagactcagggccctgggctttagaacagaaactaaaacaagaatcggtttacaggaggctgcaaaaagtggccgcaaattagaattttaggacaaagctctgcaaactacagctggggggccacatgtctcctgctgcctgtttttgtaaatagaggtttgttgaaatacggccacactcacccctgctctaggaggccactggccagtccccatcctcccagcctgacttctcacttcccaaccaaaattcccaagggtggtgacagtaatgacaaaacaaacatgcaaataaaactgaatcaacgtggaatcattgaggcaatggtcttgcctttcagggaaaataaaatagaaacaaacaaaccaaatgccatgcacgtgcctcacagtgcaatgtggctacctcttcagggcctgtattcttccattccaggacagcgttttagatttgcagatctgagaggtccattaaaatcttctcaattctccacagagatgctaggctccagaccattaaatattcattcagtcacccctttggcaagtcctcagggagcactggctgcgggccaggccttgtgatggcttgggaatataatttacataaaattcacccattgtaagtgcacaatttgttgatttcagtaaatgtatagggttatgtaaccatcactgcaattcacatttagaagagcttcgtcagcccaaaaggttctttgttgcccatgtaaagtcaatccccacttccaaccccagtccctgccaacacagcacaggttgctgcctttggaatgaacagcccatttggggagatggcatcaaccaggtaaatgcacaagtagacatataagtgtgaattatggtaagaaatagggttggggaagatcaagagagggcaggcctctctgctgcggtggt

SEQ ID NO: 16612 - DNA, 2300 bp, Homo sapien
gagactctgtctcaaaaaaaaaaaaaaagtgacttttttatctgggcatggtggcatgtgcctgtagccccagctacttgggaagctgaggtgggaagatcacttgagcccgggaggcagaagttgcagtgagccaagatcacgccactgcactccagcctgtgggacagagttagaccctgtctcaaaaagagatagaggtcggtgggtggagagagaaagagaagtaactttttattccaaagctagcttaggggaagaagtacaggcttcctgacttaaggatatcactacacctctgaggcagaaagcagggattttaaaaggagacttggcatgaatggcggggaggagaggaagcaagccagtgggggtcggcgtaacgcacttcagtgaattagaattatctaccaggaggtccagcttgcaccttcctgggcagggctagcctgtacaagtggctgaaactctcaacatgagagacagtttcgtcggaggcgttctttgggttgcagatggactgctgtctctcaaggcaacctccaggtgggatagtgctctgccttggagatgctaagcacagttagaaaagcttgtcctgtaggtgaagggaagatacaagattataactgcatttcttcttttttttttttttttttgagacggagtctcgctgcgtcattttgatcattttgacgctgtgtcgctgtgtggcttcatctcatcatttgctctaattttatatgtttgagatgtttcataatttttaaaaaagctaaaaacacaagattaaggattacactgtattggccgggcgtgctggctcatgcctgtgatcccagcactttgggagactgaggctggccgatcccctgaggtcaggagttcaagaccagcctggccaacatggtaaaaatccgtctctactaaaaatacaaaaaaaaaaaattagctgggcatggtggcgggtgcctgtaatcccggttactcaggaggctgaggcaggagaatcactggaacctgggaggcggaggttgcagtgagctgagattgcgccactgcactccagcctgggcgacaagagcaaaactccgtctcaacaacaacaacaaaaaaaacaaaaaaacaaagggacaggattacactatatttggcactagacaaaaaagggttcaaattcaagtcttaccatattaaagtatttgctttaaaatactctgggcccagggggtgggggagtcggggggtgagggcgggcactgtggctcacgcctgtaatcccagcactttgggaggccggggcgggcggatcacctgaggtcaggagtttagaaccaacctggccaacatggtgaaaccccatctctctactaaaaatacaaaaactagctgggcgtggtggcgtgcgcctgtagtcccagctactcaggaggctgaggcaagagaactgcttctagaacccaggaagtggaggttgcagtgagctgagataacaccactgcactccagctggggagacagagtgagacttcactgcaaaaaaaaaaaaaaaaaaagctccaggagaagaaaagagatgagacaagactggccaaatgttggtcattgttgtagctggagtgatgagtatgggattctcctctgttctcttgatgtgtagggaaatttgaagaatgactctgataaaaatctaaaagagaaacatcgaatcctaactggctgtgtgaccctaaaaccttactccgtctctttgaacctcagatttctcagggcttggcacatagcaagcatttcatactcagaagctggtactattactgttgtgttttgtggggggaggtttgtttgttttgtttggagacaggatctggctttgttgccctggctggagtgaagtggcgccatcatagctcactgcagcctcgccctcctgggctccagcgatcctcctgcctcagtctcccgagtagctgggaccacctgcgcatgccgccccacctggctgttgtttgtattgcagctggtttgctctgtgactcagcacaagctgatcgctttcttctttgtcctccagagaaatcacagtgtcccaagcccaaggcggcacggagtggcccctggaaggacagcgcctacaggcagtgtctgtaccttcagctggaacacgtggagcaagagctgcggctggtggggccccgaggcttctcccagccccacagccatgcctaggccctcaggcagctgcagaccctgaagggcggcctgggggtacagccgggcacctgggcccctgcacatgc

SEQ ID NO: 16613 - DNA, 2300 bp, Homo sapien
tgagcattggacaagctagagacaatggaagtaatgtgtgcatggcaggcgtgctgttgaaccacagcattagtttactattatctgaactaaaaagaatcacagaaattatctaggctatcccctcattttgcaggtgaggaaactgaggcttagagagtttaagtgattcggctgggcatggtggctcatacctgtaatcccagcactttgggaggccgaggcgggcggatcacctgaggtcaggagtttaagaccagcctggccaacacagtgaaaccctgtctctactaaaaaaatacaaacgttagccgggcatggtggtgagcgcctataatcccagctactcgggaggctgaggcaggagaatctcttgaaccaggaggtggaggttgtagtgagccgagatcgtgccactgcactctagcctgggcgatagagtgagactcagtctcaaaaaaaaaaaaaaaaaaaaaaaaagtttaagtgatgcacacaaggtgacccttcataagtgacaaggacaggattagaacccaggtcctgtctcagcctcattcaccttccgtatcattacgctgtcagtgaatgacatgggaattcagtcaggccatgactcagtccatcttcacaaccaaggctacgtcccagtgttggttggggcaggggcggcttttattccatctttaatttgaaaaagggccatttcctaccctctcaaaggacttgagaaggactggacaaaagaccaggccagtggtcacaatgcctgtctgagtccgttttgcattttttttttttttttttttttttttgagacggagtcttgctctttcacccaggccggagtgcagtggcgctatctcggctcactgcaagctccgcctcccgggttcacgccattctcctgcctcagcctcccgagtagctgggactacaggcgcctgccaccacgcctggctaattttttgtatttttagtagagacggggtttcaccgtgttagccaggatggtctcgatctcctgacctcgtgatccaccagcctcggcctcccaaagtgctgggattacaggtgtgagccaccgcgcccggcccattttgcattgttataaaggaatatctgaggctaggtaatttatacagaaaaatggttggctgggcgcagtggctcatgcctgtaatcccagcactttgggaggttgaggcgggtggatcacttgaagccaagagttcaagaccagccaggccaacacagcaaaacgctgtctctactgaaaatacaaattagttgggtatggtggtgcctgtctgtaatctcagctattcaggaggctgaggcaggagaattgcttgaatctgggaggcagaggttgcagtgagccaagatcgcgccactgcactgcagcctgggcgacagagcgagactctgtctcaaaaaaaaaaaaaaaaagaaaagaaaaagaaaagaaagaagaaaagagatttatttggctcatgattcttatggttggaaaatccaagactggacatctgtatctgataagggcctcaggctgcttccacttacagtgaaagatgaaggggacctggtgtgtgcagagaagggtgggaggtgccaggctctttttttttttttttttttttggagatggagtgttactctgtcacccaggttggagtgcagtggtgtgatcttggctcactgcaacctccatctccctggttcaaatgattctcctgcctcagactcccgagtagctgggactacaggcacccaccaccacatcccactaatttttgtatttttagtagagacagggtttcaccatgttggccaggctggtctcaaactcctaacctcacatgatctgcccgcctgggcctctcaaagtgctgggattacagacgtgagccactgctcccggccatctttttagcaaccagctccggtggtgactaatagagcaagaactcgctcccgagggaggcattcatccagtcatgaggaatccaaccccatgacccaaacacctcccatgaagccccgcctccaacattggggatcatatttcaacatgaggtttcaggggacaaacatccagatgatagcaatgcctcggggagcttcctcactctgtcctctgtctgcctttcagctgtgagaggaactgcaggccagttaatgccagcaaagacattctgctcagggtcaccatgggggaggactctccagtggctatgttcagctggtatttggacaacaccccaacagagcaggtgagcacagtgacaaccact

SEQ ID NO: 16614 - DNA, 2300 bp, Homo sapien
gcaacctccgcctcctggattcaagcgattctcctgcctcagcctcccaagtagctgggattacaggcgcccaccaccacacccagctaatttttgtatttttagtagagacagggtttcaccatattggccaggctggtcttgaactcctgacctcatgatccacccgcctcggactcccaaagtgctgggattacaggcatgagccaccgcgcccagcctgtgttttctaatcggtcacagagactgctctgattggttgtcatgtctattttgatgggtcagggtgtccattctgattggtcacagcatctattctgattggtcatggcatctatttgttggtcgcagtgtctattctgatttatcagagcatccattctaattggttggcgcccatgctgtgctggttgttaaatattttaaattatcatcctttctctcaatagagactctcctggctaagactcatcctcacccagggcagcgtttttcctgaagcccaggaccagtttgagattagaatagaggcctgttgatgtaaacagggcagcagagagctagtgcaatgagcaggtggctcggtttgacctcacatcccacctggagccctctcatagcaatagctgtggaagtcataatggggctttaacacagccctcaggaaaccccttctgttcttgcatgtttgttggatgaagagggctcatatgttcccctgaggaaacaaaataatccttcatttatttactcatcctactaatataattgagtgcctactactctgccgggtgtgggcgaggcagcagtaaatatgaaagtcagggttcccattctcatggggcttatatcgtagttatcatcatcatcacccagatgagaactacgctagcttggtttttattggaaggaatcctaatttgttgatttaagtcagattttaagagtcaaccgcaatatttatcatccagtaagaacaaccatctgcaacctgcaagggagcccccatcttcccgtgaacgggctgagttctcatgttggtttgcagggttctgggcggtcaccagtgtaggatgaaggaatggctttacttgctcctgcttaaaacaagacccaaagctaattctcatgcataaaaatcagcccccacccttaagaaatgctcccttttagtcctcctcctcctcccccgaccaggacatccctggcaactaaatgtggtaattttttaattacaaatatttaggttctcgggtaagacatgtatagtataaataagttagaatatgcaaatgaacagagcggacccccagatgacaaaatcacggccgggagcggtggcttacgcctgtcaccccagcactttgggaggctgaggcgggcaaatccaaggtcaggagttcaagaccatcctggctaacacggtgaaaccctgtctctactaaaaatacaaaaaattagctgggtgtggtagcaggcgcctgtaatcccagctactccagaggccgaggcaggagaatcacttgaaccggggaggcagaggttgcagtgagctgagatcgcaccactgcactccagcctgggcgacagcgccagaccctgtctcaaaagaaagacgaaatcagtcattaacctaatactcagggataaccaccattaatatttgagaagggggcatatccttacatatttctttatgtctgcatctgtatccaagtttgtatccagaatcaggcttcagagactgactctgagctgccatagtattatcaaccgcatggttgttaccaacattctttaatttttcttaccccacttaggaacaggagtgacttacactgtgcttttgggtgacataaccctggccgagtccaccacccaaaagggctcgctaccgtacaatctgatcctggacagagaaacccagaaactgatgggccctgggaggcaccgcctggagatccaagccaccggcaacaccaccacctctacaatctccagaaacattacagtccacttggtggagctgctgtcagggctgcaggcctcctgggcttctgaccatttggagcttggacaggacctattgatcaccatctcattggctcagggcaccccggaagagctgacctttgaggtggctggactcaatgcaaccttctcccacgagcaagtgagctttggagagccatttgggatttgccgcctggctgttccggttgaaggtacatggggttagtggctccccttctgatgcccctcctcttccctttgtgacttggtgcccagggtcctgccgg

SEQ ID NO: 16615 - DNA, 2300 bp, Homo sapien
acctccgcctcccaggttcaagtgattctcctgcctcagcctcctgagtagctgggatcacaggcacatgcaaccacgcctggttaattttttgtatttttagtagagatggggttttgccacgttggccaagctggtctccaactcctgacctcagggtgatccgcccgcctcggcctcccaacgttttgggattataggtgtgagtcatctcgtccagctcttgtatgtgttttgttgttgttgttttgtttttgtttttgtttttgtttttttgagactgagtttcactcttgttgcccaggctggagtgcaatggcgtgatctcagctcactgcaacctctgcctcccaggctcaaacaattctcctgcctcagcttcccaagtagctggcattacaggcatgcacaaccatgcctggctaatttttttctgttttgagtagagaccaggtttcaccatgttggccaagctggttttgaattcctgagctcaagcgatccacccacctcggcctcccaaagtgctgggatcacaggcgtgagccaacgcgcccggcctcttgtatgtttcttatgagctatattatacacatacaaataaatatttagatatgtttttatgcaaatgggactgaattatatacaatatctcatacttagcttttaatattaacaaaaatctcaccaggtacattggctcacatctgtaatcctagcactttgggaggctgaggtgggtggattgccttagttcaggagttcgaggccatcctgggcaacttggtgaaagcccatctctactaaaatacaaaaaattagcagggcgtggtggtgcctgcctgtagtcccagctacccgggaggctgagacgcgagaattgcttgaacccaggaggtggaggctgcagtgagctgagattgcgccactgtactccagcctgggcgacagagcgagactctgtgtctcaaaacaaacaaataaaaaacaaaaaccttagggatccttccaaatttgcagaggaagaatttgttcattttaaaagtggttatatatgatagaccatgttttgtgaacccgtttcctatcaatggacatttaggttgtttccaatttttccttcttaacaaattctgccaagaataatcttattcatatggcatttcacacatgtatgaatttacctgttggtgtaattcctagatgtgtaattgctacattatagagtttgtgcttttaaaatttttatggatattatcacattgcccacaatagaggttgtaccaatttaccaccagcaagcagagagacagcttgtttctccacatttgggaggatgtgtttggaaatactctcggaggccagaccatacaaagccttgtatacaaagctaggaaatttgaacttgatccatggaccatggaaacccacgggaaggtgtaagtagtggataaggatggtcagttctgagcttatgacatccaataaattttttaggggatttttattctccagcaggtatgggtgatgaataatgtggtgaatcagagaggggaccaaatatctattaggatttcagccacgctggggagagaatgggtatcatttgggcacagctgccgctcggcacaatgggcttggatataaaagcaacttggtttctttaccgtcttcctgccttcctgccattctccaaccttcctcccatttttcttttatcacacacttcccacatgctgatggctttgcacgaaacatacagccctcagggtaatgacataaaaccaatagcaaggactttttatccaccgctaacagttgactgaaagataagcagacaggtgatatagcaactttatctttcccgagaagaccatctgacaaattaataggctttggagcaggcgtggaacaaagagctgggtgacgcaaaaacgcagacactgtcaagctgagccttttgtttcttcaacaaaaggtagctgccattatgtgatgcaaagacagaagggaagatggatgacgggtggatgtgagggcacccgcatatgaaagtcccaagagcgagctccatccagaggccccagcagtggttcaagcatgagtgcagtgggcttggtactcctggtgcttgctctgaggcttagggccaccactgttaagccagaggaaggcagcttttgctctaacagccaggtggccttcagagatgcttgctatgaatttgtgccactcggacgcaccttccgtgatgcccagagctggtgcgaggggcaaggaggccatttggtcttcattca

SEQ ID NO: 16616 - DNA, 2300 bp, Homo sapien
gtttcaccatgttggccaggtaggtcttgaactcctgacctcaggtgatctgcctgccttggcctcccaaagtgatgggattataagcatgagccaccatgcctagccaatcagctataatttaaatttagtttcaactcaggcatgtagcatctttcctctgggtcaggtcttctcaactcctgctgcacacatgtaggtactttttattatttttttaattattattattattttgagacggagtcttgctctgtcgcccaggctagagtgcagtggcgcgatctcggctcactgcaagctctgcctcctgggttcacgccattctcctgcctcaggctcccgagtagctgggactacaggcacctgccaccacgcccggctaattttttgtatttttagtagagacggggtttcacggtgttagccaggatggtcttgatctcctgacctcgtgatccgcccgcctctgcctccgtatgttttatttttgagataagggcttgctttgttgcccaggctggagtccagtgctgctatcacagttcactgcagcctcaacctcccagactcaagtgatcctcccacctcagcctcccaagtagttgggactacaggcacgcaccaccatgcccagctaattttttttggtagagacggagcctcaatatgttgcctaggctggtcttaattcctgggctcaagtgatcctcccgccttggcctccgaaagtgctaggattacaggtgtgagccactacacccggccaacataaaaaaaaaaaactgatggctgagatccaccttcagagattctgcgtcagtgggtctggagtgaggcccagcactgatacatttagtactgccaatcaggtgattccaatgtgtgccagggcggaagcacagccagaccacacagctgtcaggaatgaacggcccaaggtgctggcatgtgctctcagcccagaccggaccatcattattctcagctgggttgcataaaggccagtgccactgccttttcttactctacccacagagcaaatgactggttctttctttaagcaaaatacgttaagatgagttcattaacttcaatcagtgcatatagcaagttgaatacgaatttcaggcaatggcaacacacgaagatacacgaataatagggaagctcagatcaaattcaggcattgttttgccctcttgataggccaggaagttgaagtttctttttaactattctgtttacttatttattttttgagacagagtctcactctgtggccgaggctggagtgcagtggtgccatctcagcttactgcaatgtctgcctcacaggttcaagcgattttcctgcctcagcctccttagcatctgggattgcaggcgtcttccaccacgcctggataatttttgtatttttagtagagacaggatttcgccgtgttggccaggctggtctcgaactcctgacctcaagtgacccgccaaccatggcctcccaaagttctgggattacaggcatgagccaccactcctggcccgtcttttttactattctttatagtttctgagaaaagcctttggttcccgttcgttattttttaaataggtacatgaaacattttatgtctccttcttccaaaaagaaaataatgaattaagtggctctttatgtatgattattagaggggagcatcggggcctttactaaaaacaaaacaaaatgtaaaacctttcccgtctctgctgaaggggttccctgctgtgcagcagacattcagtgatcacagagcttagctcaagtttctcctaattcccagcacctctgattcccagcatctcttcttgttctgatcataaacaactccagctcttggattacgtcgggcaacataacagcaggcacggaattctctctgcttatttagaacctagtctgaagcaagcttttttttttttttggttaagtcaaaagtgaaactggagagggaaagctgagggaacaataagaggattaaagattagctatgacacatggcttggaaattaacctttaaccaaacatcttataagtaacgccagcgcagcttcccttgtgaatgtaaagagatccagggctcttggagagggacaagtgagagccagccaaaaaggaaaaagcaaaggcagaaacggcatcaggagagacagagatgtgaaggagggaaggagcaggagagcaggaaggaaacgcaggaggagggagcagcatctcctgtgaacacagaggagcacctgtttgctgttaaaatcgatct

SEQ ID NO: 16617 - DNA, 2300 bp, Homo sapien
gtatagcaggtgacatggataaataaacccattataaaaagtttcttgctcgagcaatgttcaaaatacagcaactgcttggagaaaggaatgtcagctgctcacagggatactgggtaggtatcatggagaagataagtccaagctgcttgtcttgtgtgtttcttacctttttaaatatatttttcggccgggtgtggtggcttatgcctgtaattccagtactttgggaagccaaggtgggcggatcacaaggtcaggagttcgataccagcctggccaacatggtaaaaccccatctctactaaagatgcaaaagttagccaggcatggtggcacatgcctgtagtcccagctacttgggaggctgaggcaggagaaccacttgaacccgggaggcggaggttgcagtgaacagagattgcacaactgcactccagcctgggcaatagagggagactccatctcaaaaaaaaaaaagaaagaagaaaatatttttcaacatccacaaaaatatagaaacagtacaatgaatctccacatccccattaaacatccacaacaatatagagacagtacaacgaatctccacatccccattacgtggctttaacaattagtaacttgcggccacttttgactcatctacactcccatctgcttccccatccctttgttttgttttgaagcaaatcctagacatctttatcattgcatccgggaacactgagctgcatttacagaagaaagtggaaatgcatgtgtcttccacagccgtaccctccccatctattctgccctgaaaacagttagatactcggattcctgccagtgactccaaagccttggctggttcagggtaaatacccaagactttattggagcctttcagttggttgaaggacagtgaaaattccatcctgtcttgcctggaatgctagccacattcttctggtccggagtcctcatacaattgctaattttttagaggcttatggagtccctaacgtttgcacaaaatggttgctacattccacactcccatgtgccctgagcaacctccagggaaacttcagataccgtggggcttggcctgccagctgagctgacccagcgatcctttctatcacagctttgatcttcactgggttgggagcctgtctgaatctaaacatctgcctctctactgcccaccccttcagcatttcctagctctccctgaaaggtgcaaacatgcatgcagttactcaaacagaatatttatccttaactccctctccctcacaatttcttttaaaacaatccactattgtctacccccgcccccgcatcaccctttcatccaggtgcccattcccttctctctagtcctgcaatacctaagcatcgatctgcctttagcacatccatccccgccttattctccacgcaggagctgagtgacctgcacaaaatcccctgctaaatacggtacttccatggttcttcaccactgcagaaaccaaactccttcccacaccaaggaggccctgcaaaatttaaggcctccttcggacttctccagcttcatctgctacatctccttcctagcccgcaaccaaaaccatcttttccgggtctgttttctcgggtttttgtcctctcacctgggcagctccttttctctcataaataaagaaagctacagcgacttcgcccttgcttccatgcatcatctcatgagtccacaacaacactaagaattcgctttcattttgcagacggagaaactgaggatgggcaccttacccatggccacagagctagtaagtggaacagctgcaaccaggattcaaactcgcggctccagaggccacaggcttaaccacggaatcctagcccgcccgcacatccctccatcgcgggagcgacctatctcatccgtagacaccttccgctgcacccagccgcagctggtcaggcgggcggaggaaggaggcttctgattggccatctccagcagcggaggcgagaaggcggggagcgacggtgcgggggcgtcgcggagaaatgacttcatgacgcggcttcttaaaggcgccggcccagcgcgccgcggatagcacaggcacgtcccgggggctccagcttctgctcagagcgcggagagccgggccgggcgggcgcgcgcgcaggactcgggccgctcgaggggtccggccggacggtgtcgggagccggacccgtcggcagaggagcgggcgccgcgatggctgagggcagtgccgtgtctgaccctcagcacgccgcgcgtctgctgc

SEQ ID NO: 16618 - DNA, 2300 bp, Homo sapien
aagagaatgatgtgtgcgtacaaaattcttagcacataggaagcctctggccactgtggttattatagtcattaccattaataccctagtgcctggcctgtgaccagcatacagcaggagctcaatgaaaatatttgaacaaaggatctaatcccacccgcttaatggactggggggtttcttggccccaaccaccccccaacacccacatatctagggcttgccccttcatgcttggtggttttctcaaggctgttcaagctcaaaactggaaggaaatggcagcaaattgtggggagctaaggaatttctaactttctaatctaattgtgcctccccaaggaggcatctcctgggcaggctggatgtgagtcttctttccttggtgagggatgcagcctgggacctgcctttcatcccctgcctgaaaccctggccaggctcggggagagggtcctctggggagcaccttcatgctgcctgttcttgggagagggggggtgaataatttccaccaacggcacagatgctgtggatattccgcagtgttcacgacgcagttcaacacacgctgcacacattcatgtgttcactacagaggcgccttcacttaaaaaggcaaaaatctagggttttaacgttattagctgcaggagcacgtggagataagaaaacctggctgaggagctgagcatttgctaggtggccttaggtgccggctgcttgtgatggcagaaagggagctttttgcatccaggctgcagttcctgataccctgggtcacaagagaatcgaatatggttctctcgtgggctggtgctgggcctgtgaactcagataaaatgaccaggtggggtcccagggaaggtgaagtagggggagctgctggggtgcgcacaagaggggtggctgtgtaggttggggggtgctttaagtgggttcctagaagaggctctgtctccctgggcagaagaaagaagggggatgggcggaccgtcccctctctccagaaggtttgaggacccccaaggccaaagccagcagacgtcaaaggccaggagttcgaggccggctgggtcccgcagtgggagacagggcagggtgggctcatcctccggatcaccgcggggacactttcagtcgggaaggcgtccccgtcccacggccccatctggccagcccgctggacagcctggacagcggagggggcgtcaggggtcgagggttccagtccccgtccttccacccagcccccggccctcgggtatccttctttacccgtccgagtccggcccgggggcggcgggggtgggtgaggcgcgggcccccaggctccggcagcctggctgggctcccgcccgggcacccgcgggggcgcggctggcgtgacgtcacgcgccccgcccccgcgccccgccccctccccacattccaggcggggcgggccgggaccccgcggggctcgcccgccccagccccctccccaggggctgcccctcccgtcgggccgcgcctccccgtcgtgggccgcgaccccgcccggaccgcggactccgcccgcgagaggccgaagccgccgcggccgccgccgttgccgccattgacgtcagaggggcgggcacatgaccctgcggggaccaatcgcgcgggcgccccgggctccgggagcccggcgcgcggcccgccccgcccgcggccactctcgcccggacggccgcgcggacacacgctctgtacacacgcgcgcggcggcgcggggccccgagacacgcccgcccccaccccgccgcccccaccccggcgcccgccctccgcgcctggccccggcccgccctcggcctcccccgcccctccccgtcgcccgccgagcccggtcagccgccgcgagcatgcacccgacgagctaggaggaagcccggagccccgcaggaagcgccgaggccggcccagcccgccgcacgcgccgccccccgcgggcagcgccccctcccctgcgggcgcccccagccccacacccccccaccttcccggggggtgggggggtgcgggccgccggatccgggggccccgccgccccagcagcccaggacagccccctctccccgcccccagccccctcccccggcgcggccatggatgtgaccagcagctcgggcggcggcggcgacccccggcagatcgaggagaccaagccgctgctggggggcgacgtgtcggcccccgaaggcacgaagatgggcgccgtgccctgccgccgggctcttctgctttgcaacgggatgaggtacaaactgctgcag

SEQ ID NO: 16619 - DNA, 2300 bp, Homo sapien
tgcagtctgagggcagcagtgggagctggactggggccatctgtgcaaggggttattgtgcccaggtgcacaggccggagctctggggtcactcaccctccgcgttacctgtcgttacctgtcgttacctgtcgttacctgttgtctggaccataaaatgcagatgggaatgtcgcccacttcctcaagtctttgtgaggattaaacgaagtacgaaatataaagcacttggagtggggcacatagtgtgtaccgtgtgactcaaggggctgtcctctttatggtgacgatgacaagggcatcaggacagcagccagcatggcgcaagccacccgggcccagccttgttgaatcttccggcagtgtggcgagttaggtctgctcgttcccactctccgcatgggaaaactgagcttcacagttaatataaacaccaacagtaataacaatggcagcaacaaactgccgaatatgagggcctaacatacacgaagcaacacgcacgtcgcagaacccacagctgaggagaccagagctcaaaggggcgagtcacctgctggctcacacagcagccgggaccgggattgcaggtgacccacgtggcttcagggcccaggcctgccctgtgactcacgcggcctgtcacccgccgtttcatgtttcaggcctcgcctgtacactggtgcttctcaggaagtcttagggaagatgacttatttattagccgtttttttaaaatctcttaattaaaaaaacaaccagtgtgagtatgtggaaatgtgattcaccatgtgatcggggaggtcagagccagagtccctggctcaaaggtaacacccctgtccacctggatgaagaatgttccagaagcttccctccaggcacggtccttgcctgctgagcagtcaccgggggaatcgggggcagttaccggggcctcagactgtgggagctgcctcttcctgggtctccagccgtgatttcagactcgtctttcatccttcccctctcggttgccagcccagtgctggagggacgcagggcagagcccagccagctgcaggtgtttccaggcatgtgctgggaatggagcagatgcggggctgaagctttccccagaactggcctttattgacgcagagggtgggaaagaaggcacgtggctgtgctgggagagggtgggtctccctatagcctggacctgggaagggccttctctagagctctccagggacggccagacagctccccttccaccttggggtgtaagcggaacaggacacactcccctcaggaagcacggtatcaaagagggtcaggaggagccccagccggctcccgttctgaggaggcacctgtgggcatgggggacccccggggccgccccccgatgcctccgctgatgcttaaggtcacacagcaggacatggtagctgggttcaaactcaggtcaggccaactgcaaagcctgtgctctttcgactcctggatggacactgcccaggtgcccctgggtaactgatacccttgtccccaaacaactctgaatctcttttcatcatgaatattattaataacaataaatactaataactgccatttatcaagagcccctacttgccaggtgctttctcattcagcctgccaaggaagcccgtgagttgggcaccagtatcgcactttacagatgaagtcattgaggtacagagcagctatgtaactagccatggatcatagagctagtgtcggagatggcacccacacacaattctgatgacaaaaccttacacttggggactgtaaggctttgggcacattaggtgacctctctgagcttcagttttgtcttctgtaaaatggacctcatatgctgtccgtggcataggtttgcatatgtgaattaatgactgtggagtacctggcactcagtgttagctctcaccatcatcatcatcattactgtagcatagggtttctcagtgaaacagacactgatggtcagagtggacctctcagcctgggggaagcagaggatgaaccctctggggcggggccctgggcaggctggttcagtgataagcaggagccaggcgacccacaggcttcttggatgggctgggcgtgcatggcataaccgtttgagaacaacaaaccaagccggccgggctgccgctctgtttcctgcgaggagggaagttacagatctccgccctggcgtccggggaaggatgggacaggctgctgaggtacagtcccatgtggggaacgactctgtccagcttgatgtctgtgcctaaaac

SEQ ID NO: 16620 - DNA, 2300 bp, Homo sapien
ccaggcctcactgtggtcacaaaaggacacatagtgtatgattccatttatatgcaatgttcagaataggggaatccaggaacagaaagtggattggtagttgcccaggggctgggggagagtacaataggaagtaacagcttaaaagggtttccttggaagtgatggagaagtgttggaaatagtggtggtggttacacaacactgtgctaaacgccgctgaagtgttcactgtaaatgggtacatggtggccgggcgcagtggctcacacctgtaatcctagcactttaggaggccaaggcgggcagatcatctgaggtcaggagttcgagaccagcctggccaacatggtgtgaaaccccatctctactaaaaatacaaaaattagccgggtgtggtggtgggcgcctataatcccagctgctgggaaggctgaggcaggagaatcacttgaacccagaaggcaaaggttgcagtgagccgaggtcatgccactgcctgggtgacagagcgagactctgtctcaataagtaagtaaataaataaataaataaggttaatggttaattttatggtgtgtggattttacctcaatgaagtaaatctatatgtatgtgtatatagtgatggcagccccctggtgcctcagacagcctagtttctcaggccagagtgatgggctgtgactggtaaagcccctgtgtgattcccggaggcactagggttgtccctaccaagcctggggcaagaaaggaatcccagtcagagagaaaaaaaatagtgttcagtctaatcccagaagcaccgttgaccctatagccctgacctgtaatgaaaacgaacgaaacatgcatttacaatatttctttaaaaatgagattttgggggtctcactttctagttaagttgagtgtcttctcgttattttatactccacaattagatcacagatgccctccagtcatggtggtgctggtgcccatgtatttcactggaaatgtgcacagataatcgggacagtgttgcctccttccctggaaaattgtagccaaagcaccgaggctgattttgtgacatggattgtgtgggctagcaggcatggggaataaggccagggggctgtgtttgacccagggtgtctctgtggggagtgcaccagcagggagctgagaggttatgagcgggttttaggttgatgttgaagacttggcggccaaaagggcagtttgggggtaacacccatgggacagttatgaggcctgcattatatatgaaggtaatgtgacagtctctgatgctcaccggattgaagggaagctattctggaggactcaagaaggccaaaaatgctgcctcccaagtgtccagtcctcccggaagccatggcttgctggagatagcaaattatttcctacacacttagcatctgcagccatagtgagtcttgaatcagggaagccagggaagataaccagccagccattgtccccgggtgtgcaaggcacaagtggggacattgcaccttggtagaccttttaagaaaattccaaggcagggtcccagtgagatgggggcttggagaggggggtctcccatgggaggaggtaggcaagggccctttcctcgggccgaacgcagtgccacacacatactagacctcagcatcgatgggtagaggcaaacatgcatgctcctgggcccgtggggacgtgatgacagggacaccaagactttcggatagcactgcccgacggagcattctgcgatgatgaaaatgttctctgtctgcaccactatagtcaccactagacacagctggctaccgagtaactgtaatgttacgatgtgatcaagatgctggatttgtagttgtatttcattttaatgaagttcagtgtgcgtagccacctggggctggtagcttctggactaggcagctccgctgtaggacctgcactggaaaaagttttcaaagccgggctgggtcctccctggctcatatttccctgtggggtcctcctccactctgcagtgccatgggcgcgcccgtgcagcgtcctctcttcacgacaggtggtggggagcatgcgtgcttgggtgtgtacgcgcgcgagccccagaggctgcggcagcagcagagcagcagagcagcagcccctgcctggcgcgacgtgcttccagtgcattctgagtcactcctctcctggcaaggggcacattcctgctgacgacttgtctcccgtggaggagcaacaggctctgctttccctggcctgagaaccctggcatatgtgcttgc

SEQ ID NO: 16621 - DNA, 2300 bp, Homo sapien
aaactctgggcccattaaacacaagttccccatttccgcctcctcctgcagcccctggcagccaccgtcctgctttctgcctctatgaatccgactactctaggagtctcctgtttgcagaaactacagtatttgtccttctgtgtctggtttacttcacttagcacaatatctctgaggtttatccatattgtaccgtgtgtcaattttttttgttttgttttttgtttgtttgtttctttgagatggagtcttgctctgttgcccacgggagtgcagtggcgcaatctcggctcactacaacctccgcctcccaggttcaagtgattctcctgcctcagcctcctgagtagctggaattacaggtgtgcaccacgacgcccagctaatttttgtatttttactagagacggggtttcaccatgttggccaggttggtctccaactcctgacttcaggtgatccgcctgcgttggcctcccaaagtgctgggattacaggcatgagccaccgcgcctggccatgtgtcagagttttatttcttttacagttgactaatattctgttgtctgtctagaccacatttctttatccatgcacctgtggatagactttaaaaatccacagcggtgggtttttaaagtgtcctggtggtgctgctgtgcaatcagtgatgaaaaccaaagcctggatggcacggtggctcatgcctgtaatcccagcactttgggaggccaaagcgggtggatcactttgaggtcaggagttggagaccagcttggccaacatggcgaaaccccgtctctactaaaaatacaaaaaattagccaggtgtagtggtgggcacctgtaatcccagctactcaggaggctgaggcacaagaattgcttgaacccaggaggcagaggttgcggtgagccgagatcgcgtcactgcactccagtctgggcgacagagtgagactctgttacataaaaaagaaaagaaagaaaaaaccaaggcataagtccagcatttcgcaaatcctctctgcacaatagaatcacctgagagctgttttaaacaatgcggatggctggcgcctgtcctagagcagctgcatcagattctgggctgggggagaggtggggctagccaggaattgagttccttgcagcgcgggggagggcaaggtgtgcagaattatttcccagtctctgctgcctcctggtggcacaattgacaacagtcgggtagtgacgcctgtcagcatggttcctcttcctctccagggctggcttacccagccccaaaggaccccactcccgggggtctggggaccctgaaggctcttgtctgacccctctccccacctgtatttcctggctggccttgcgtgcctctgtgtttagaagaaccgacgagtttattagagaaggaaagactgcactgtgtgaccttgaataagacagttcgcccgtgcctcagtttccctgactttcacgcaaggatcaccacggtttcctctgtcaagttcctgagatggcaggcaagcatgcgtgttagggctggggaggccaccgcggggaggtttcgtaccctcagcataattgccattaggggccagatcacttggtggggaccgtccgtgcactgtagggtgctgaacagcttccctggccttgacctcctagatgccagtagcatccctgagctgggataatcaaaaactgtctccagataggggcaatgtcccctgagtgcaggattgccaaataaaatagttaaatttgaatttaactttgaaaatttgaatttcagataagcacataatgtttttgtataattatgtccaaagactgcatttttatttcctaaatctggaaacccttcctgagggacaaaatcactccagctggcactagccagtgcccttgtgagtttttgacacctgtttcaagaactcacaccaggctgggggctaaggcggcagatggggaagttgtggcaggggcggaacttgccccagcctggcagggggaggggtgccgtcttgcgggagtgggacaggcaggcccaggagtgataagcgtgaactagagagtgctgtgcaggaggaagctggggccgccgtcgggccttctccctccaggggcccaagagccactggtactcagtgtctgggtgggggcaggggggatttttgttctcccagcacctgcggctgttgagaccagagaagctggtggtcgaccacagcctggggtattagttcacccctagcttctccccagcgagaccccagggcccttgggcacag

SEQ ID NO: 16622 - DNA, 2300 bp, Homo sapien
ctgtcaagataggcttttaggagccacggctccctagagtggtctccacacattctgattatatgcaatctcattttgccatcaagagacttaacccactcccctatccatgtagactttgtaataataaattatacatatatatgactgaactaatatattatgtactttatataacacatactaaaacaaaagtgtgaaaaagattggttgaaataaatacaagctgaagttctaaaaaaaaaaaaaaaaaaaaagtgaggcaaaggaattgcccctagatgtagtcatttttcctggggaattggcccaatgacttcaagtggttgatgtcataatgagtccttccaagatctctttaaaaaattgatgtgttaagtgatctgtggtgatgagcacagctatacacgccagttgggagtgctgaaagaaatgaatccacagatcttgtgaagtcacaaacgagtcctatggcttgggatacaacattgacagtgagagtgatattcctcaattaaaaaacgctataacaggccgggtgcagtggctcatgcctgtaatcccagcactttgggaggccaaggtgggtggatcacttgaggtcaggagtttgagaccaatctggccaacatagtgaaaccgcgtctctagtaaaaatacaaaaaattagccaagcatgatggcatacacctataatcccagctactcaggaggctgaggcaggagaatcgcttaaacctgggaggtggaggttgcagtgagccgagatcgtgccactgcactccagcctgggcaagagagcaagactttgtctcaaaaaaaaaaaaaaacaaaaaaaaaacaaaaaaaaaaacaaaaaaaaccaaaaacacacacacacaaaaaaaacgctataacagaccagtggcacatgcctgtgatcccagtgctttgggaggtagaggcaggaggattgcttgaggtcaggagttcaagaacagcctgggacacatagtgagacctcatgtcgaaaaaagagaaaattagccaagtgtggtgtgcctctatagtcccagctcttcaggaggcagaagcaggaggatcgcttgagtcccggagttcgaggatgtggtgagctatgatggcaccactgcactccagcctgggtgacagagtgagaccctgcctcttagaaaacagaagctataactcaagcaacttggaagtgaaattcaagtgcctgacagctgtctaggtgcccctgaaactgcctctagtcacaacaaagatacctccatcaaagagcataggaagggtttgaatcagatagcttcatgcaacacacgaacggaaaaataaatttcttaaagaacatattagcttcttcccatgagatcaggaaaacgggacatcaattgtctggggttctttgctcctgactccctttggggctggcactatgttgatcacgttttacagatggggaaactgaggctgtcggtttttaagtggtctgcctaaggtagcagtaagggttggtctgactccagcgcagcctcaacgagggcttcaaattagggccatgaattggcaattcctggcgggtaattgtgaagagtatatttatttttaatttttatttatttatttttgagacggagtgtctctcggccacacccatcctagctcattgctgtctcgaactctcgagctcagacgatcctcccgtctaggcttcccaaagagctgggatgacaggcgtgagcccgggcgcccggccgggagtgtgttaagtatacggcaaacacctggactgcggccggctctccaggaatgccatgatattggggaattccctttgcacctggccaagtggcctcgggcaggtagcctcccctcgggttgcctcagtttcttctttggcacgcagaggcggggctccaggcctgggccgctccatggcggggagggcgcggggacgctgcactcggggtgcgctccgagaggcggacccggctgggcgcgcctggggcggggcgaggcggggcgaggctgggcggtgcggggggcggcccccgaggatcacgtggcgcggcgccgcggccgaagcagaagtagcgagcgccggcggcggagggcgtgagcggcgctgagtgacccgagtcgggacgcgggctgcgcgcgcgggaccccggagcccaaacccggggcaggcgggcagctgtgcccgggcggcacggccaggtgagctgcccggccgggagcgaggcaggcagggcgcccagggacctgcgccccgcggggaccggctcccagggcgc

SEQ ID NO: 16623 - DNA, 2300 bp, Homo sapien
tccttttgccacagctgacaatggtagaggtgatttctgatccaagctgggccaaaagaaggtgtcgtttgcaagcctgggattttgaacagggacaaccagaaatgtgacatatattcatttgctgattcattcaccagtaaaaaaaaaaaaaaaaaaaaaaaaaaaattctgtctctatgccagacactatagtaggtagtggagatacaccaatcaatcaagcaggtctctgcactcacggagctttcattatagcaacatgcaagataatttcagatgagctaagtgctgtgaagagattgaagaatttcaaggggatgcaggagactttaagtgaaagtgttggggaaagccaagctcttacttcctcttctgtagtgaccttggcagccaagagttgaacatgatggcataacaaatgggggaagcctgggtccctgagtgattatgtggagcacagcactcttccccttccctgcagactgaattggactgtgatcggagtgagaaataaaatactgcacacctgtgagtaattgtgacagcaaactgatctttctgagatgcatccactgcctggacatattattgggggaagacaatactaaacaaacactgatatacaaactcacattgaagttaatttctttctccagtcatttctgtcttagatctcttggtcagacctttataaaatcaactcactaaattatgatggaagctaaggaagcaattatagagtttgtaattttcctttaaaacacgcctgattatattttaaaagagtcctcggtggcacaagaatactaacatttaaattcaccatttctcatgtttatccacacactctaaatctgggtatccctcagaggatcctgtaattccccaaaggaagtctgtcttctttactgcatcctcagtgggtcttttcttccttagctgctggcctcaagagcatatagctggtctctcagccccctgaatacccttcctcttctcttctaatttttatgtatcctaagcagccactgcaaagctgttctttaagactgcttagcacaagaagtctcctgtgacttatgcctgcctaataggtgaggacaagacaggcaggaaagccagagcatcctatgagagaggccagtgccagggactggcacttcttgatttcttcacctgggcttcattaatttttatatcctaggacttgagctttgtccttgtgactgtgtgtgcttagtgaaaactgagcagtaaatcaggcaattgatatgaacctctctgagtctgcctttggtaccagatctatcggcaagagcaccacatgaagtcaaaacttccatcctccaagacactaaaatgaaatcctccccagccaggggtccattccaggatgcatgtccatacacgtgtacagtctgcaaccatccacagaaccacactcatgatgaggagacaaaagatgggcctcaaaaggagacctctgagtgaggatgccaactttcctttctgcattccttggttccttcagcaacaaagattagtcttggcatcactgcctgcttggcgaccagaacaaagagaaataaggaaaattagggacacaggaaaacctatgggcacacatagatatggaaactcagagataatagaaacttaaagagatacatggagagtgaatattctgcctccctatagagccttttccatcatccatccacccaagcaatgctgacctgagtgcctatttatcaggcactggtcttggccttggggataaacaaagatggaggtgaaagtctaaaagcagacactggaggtgggaagagcagttgacgtggccctaacagggttcccaccacggcggaacgcacagacaggggacgtgggggaagacgtgaccctaaaagggttcccgccacggcggaacgcacagccagagaacgtgggggaattcatgaagcgaacctcctgctacctcaacgccggtgaaggtgaaggagacacctgcgcgtcatagagactccgagacctccaggcttcctagagaggcccggaagtggctccaggaggcaggtccgacggcttcggcgccccagctgtggtgatgggtagctaggaggcctgggcctctctgcctgctgtagccgtctgccgcgcccttgttcctgcagctgtgagtgggcctgggctggggttggggggccgccgcccttccgcggggaccctggaccgcctcggcctggaacgcgacaggtggcggtcccgggggtgggggacggtggtgaatgactgag

SEQ ID NO: 16624 - DNA, 2300 bp, Homo sapien
acctctctcaagtgggcgtgcacttggcaggaagcctgcgcaggtgtttggctcagcccaaatgtgggagccactgaccaaatgccaagactctcagcgaagagccatagctagtcctgtctccccacctggaagctgtttttcgaacggagctaactgccaggatgctctgggctggtgaggccacaaggattgtgagaggtgccctgtggctcagatggcacccaggaaggaattggggtctgttgagggagggagagttcagggctagccaaaggcaattccagatccctgcccctaagcttcctggcctggagctggtaacgtctccctgactcaaatgtccatgtggctgggagggcagacaacagttgccatcactccacgcagaccctcataactgccttgttgtccaaccccacagtcccacagcacagtaatggttcacaagacactgcttcccaccccttctcccttgggtcttgagttggctttgagcccaggtgggctctgcctcacctccctttacaggggatacgctgctgggtcccttccttcccgagtcctgcctccccaacatcatccacaaaaggcatcctctcccttcctcctcctgcccctcatttaactccagcacgtgttttgagacaagtctatactccactggacactttgttttacacgacttcctcttattcttcattctcctcctgtttaaaaaacatgaatcactagcatttatgaggttccttctactgttccaggcaggatatgatattattttatagccaaagggatgaagatctagggaggtgaagtgaccctcccaagactatgtaattaataagtagtggagttaagattagatttgaatagagggaaactgacctcaaatagagaatgtttctctctagctatgccaaagtccagcctttatcacaaccttgcctccctccagccaggcatgtggcccacatggggcacgccctgagcccaggtgcggtgacccctctctggcttagcacggttaggtggtgctgtagttgcagagtgctggcttttaagccgcttgtgagtaagggatttattttttcccagcctcagtttttctctctgtaaactgaccataataataacacccacctcaaacagttttataaggttgaaatggggtgaaagtaggaaagatctagcacataatgcactaatttttttttttttttttgcctaaagcaggcagtggaatagaatgcttaggggcatacagctctgagatcaggctgcaagactccactgctgtgtgatcttgactaagtctcttaccctctctgtgtcctggtttcctcacctgtaaaattactataatactagaatcaacttcataaggatattgtattcaaggaggatgagaggagtcccagtgaatggaggctggcatagaataggcttacaataaagagaaagaacaaataagcagctatacacagcctctgccacaaaaaactaccaatagatattagccgctattagttaattgtcattattatctctccctggcatgtttccactcaggcaagaccaaagcactttcctctaccaaggaatatcttcctctactttcatatccctctccatccaacccttcagcctgcctcagttgggatttgtaggagtcctgaagctatggaccagatcagaggtgccttcccttccagaatctattttccaaacttcatcgattgcctatatttatatgcatgcatgcacacacacgcacacacacacacacactctcactcactcccgagtcagaaaaaggactcagcacccagacatactgcaggctcttgaagaagacagtattttcctgtgagctagaggatcttcctgttattctccatgcagttcaaattctgtcaattattatccagttagtcatcgctccagaggtggactgtcattaaaaaaaaatagaaggtgtgtgtttgtgggtgagtatgtgcatgtgttgtgtatgcagggggtggggaggggcgagagcggtcaaataggaagtgccttggtatttatgttgaagtgcacactggtttaaattacccactgggaatatgattatgcttaatctatgctcagttgaaaggggctggggctgctttctcccctcccttcttgactctctgttcacagaactcaggctgcctccagccagcctttgcccgctagactcactggccctgagcacttgaaggtgcagcaagtcactgagaatgagcactttcttctcggacacagcatggatc

SEQ ID NO: 16625 - DNA, 2300 bp, Homo sapien
agaaacaatatttttctccttccctctgaagaatatgacccacctcccctccaccccaagaggagaaggcccttctctccactcccctccctgcatatctgaactctgggaagaggcagcctaccccaaggctcagtcttcagttctgggccatcaaacatttaaccgatgattcaagtgaagatgtaaaaagtatgtctaataaaagaccacagactgggaggtattgctaaatgcacgaaagaacaaaccctaaaggtttgaatgttatcccaaatgcaaaagataaaatctatacagaaatattgaaattttggcttgaaacacttgatagctgagaacctcctaaggttgcagagggggtgcaagactcagagaaagggacagagacccagagaaagggatatgggtcaacacgatgacaggcaggaccagggcgatagaaatgcagagaagatgaagtcttgagatgggtttccaacttggggactccctgggttgggaggagaattgaggagaggagatggagaagagacatgggtcagaggtgaagccaaatgtgctggttggactgagagactgggatacaaagagagggaagctgcttgagagctggtacaagagggaaatggtgaatttgattttgaatctggcaggaggattgagtgtttggtgacacagcccaaagagaattccaacacacagatgtaaaattccatttagacgagagagcaatcctgcagttaggttatgattttggagattcagtataattgctatgcataatagttctggagagctgttctcacccacttaccatacattctttactgatgttgatcttaatttttaaaatcgagaaatatataaacagaaaaaagcattatacgcacagggttcaacaaattattataaatcctcttgtacttaacacccagatcaaaaaataaaacattaccaacacccagaagcccctatatgatcctctaccatcacagccctctccaacctcccaataggtaatcacctcttactttttgtaatgatcatttatttgcttttctttgtagagtcacatccagcccacttaatagcatttgactttaactgcttttgcactttcaatggaatcaatatgtatgtatccttttgtgtctggcttctttcactcaatattctgattagacaatttatctgcactgtgtgtagctgtagtccactcatttcattgctgtgcagtattctgtgaatatgccatgattttctactgttgatgggatgtttgagtcccttctagtttgaacaagtatgaacaatgcagctatgaactttctggtacatgtactttggtttttgtgtgcttgaattttcccatgacacatgctgcagagtgaaattgttaccaaaaagggctcctgatccagattccaagagagggtttttggatcttgtgtgagaaagaatttggggtgaatctgtagagtaaagtgaaagcaagtttattaagaaagtaaaggaataaaagaatgcctacttcttaggcagagcagcagcatggactgcttgactgagtatacttatagttacttcttgattatattctagacaaggagtggattattcatgagttttctgggaaagtgggagggatggcctggaactgtgggttcctcccccttttagaccatacagagcaacttctggacattgccatggcatttataaactgtcctggtgctggtggaagtgtcttttagcatgctaatgcattataagtagcatataatgagcagtgaggatgaccagaggtcactgttgttgccatcttgattttggtgggttttggctggctgctttaccacatcctgttttatcagcagagttactatgacttgtatcttgtgataccaatcctgccaacctcttatctaatcctgtgattaagaatgcttaacctccagggaatgcagcccagcaggtctcattctcattttacccagcccctattcaagatggagttactcttgttcaaatgcctctgaaagaatgactagatcatagagttttcctgtcttcagctttactgaatcataccaacctgttttctaaaatattgctccaatttatacctctaccctttctatgtatactccaatcaccacaactctgaggagcaggtttcattgacattattctccaggtgatggtgctgagttggggtggataacatgcccttgggtggggatctggtatcccacgtacaccgtgatggtggaaaatttgagatcagatcctgagat

SEQ ID NO: 16626 - DNA, 2300 bp, Homo sapien
ttctcacagtgctggaggctagaggtctaagatcaaggtgttggcaggtttggtttctcctgagagattttttaaattttttttatttttttggctttcagatagtctttcctttatgcaaacacaaccttggtgtctgtgtccaaatttcctcttcttatgacgacatcagtcagactggattagggctcaccctaagggtcttgttttaatcacctctttaaaaaggactgtctccaaatacattcacattctgaggcactgggagttggaacttcaacatatgaattttgggggatgcaatgtggcttatgattaacctctactgtttccacttgtaaaacttttaacacggactttgtcttgttcatatctgaggacctttacagttgatgctgtcttctgagcacactctacctccaactcttcataaaacacgtttttctcaactttcaagccttagcaccatcatctgacaagggccgttccaaaccacctggtctaaagtaaccctaagcgttactctgtcacatcactgttttctctctttcatagcagtcgccacttacttacgtccagaatatcagcttcaggaaaggtggggatatgtgtttttacacgctattatacccccggcatctcacacacagtcacaagtgaatgagattctgtagccacttggtacattacaatgattttatttacccctgggaaaacctaaagggcttttaacatccaaatcggtgtttgaatttcagctctaacatggattagctgtgtgaacaccaagtgcgttacccactctgtgtctcagaatccttaacaacacgatgacaataccttctttccggttcttatggggattaagtgaactaattagccctaaggtgaccaggtcaacaatctgacgtagaactcatggtatcagccgagatgctattagcttgagggtgttccaaagcgtcggacctgggaatggttttcgaaaacgtgtttaggtggtacccagagcattaaacaccagggtaggaacgctaccctattttcagtggttttttaaattcttttttgttttgttgttttgtttttgagacaaagcctcactctgtagcccagactggagtccagtggcgggatgtcagctcactgcagcctcgacgtcccgggttccagtgattctccagcctcagcctcccaagtagtggagaccacagatccgtgccaccacacccagctatttttgttgtatcttttgtacattttttgtatattttgtatatattttttgtatgtatattttgtatattttttgtgtatatatatatatatatatatatatattttttttttttttttttttttttttttttttgtagaggtggggtctccctatgttgcccctcgctatggtcttttcaattctttggatcaaaaccaggctttgttctcattcatgtgtctttggcacccatccctgcctccatcccttgccatttcttgagattcttctgtttagcagagatcactcggccagacacgcatcggcagcagcctgggaatgaagccagcctgcctggggcggcccccgccgcgctcccccgggactccgggctgctgtgaggaaagcagcaactcgtggggtcctggtgaagagaaaacgacctggaccctgcaaagcgacccagaacaaagggagcccgccacccacgttatgaagacaaaacacgtgggtaacacggcccaggcgggtggcaggcgtggcggaaacctctctgaggctggcgaggactactgagtgtggagggggtccctgaggaagggagtccccgagggaggatgggcctccgagggggccaggccgacgtcccgggaaggcgacccgcggctcggggaagccaagttctgggtcgtcctctgacttcggcttttttgcggtctgccgcgctcatccccgcgcccgccaccccgcgagcttacccgagcctctcagtcagcagagcgcccgctgagtggccgcgcccgcgcgcaagacacaggggaggggcggggcggggcggcgcgcactacgcgagggacgcagctgcgcacgcggctccgcgcatgtgcggtgaggctcgcggccggagtgcggcgctgggcggaagctaccatggcggccgagcgaaagacaaggttgtccaagaatctactgcgcatgaaggtgcggggacgctgagagcgccactccgggcggtaggggcacccggtccttccaacctggccggggccgaggcggcgggcggacaagggacaccagagag

SEQ ID NO: 16627 - DNA, 2300 bp, Homo sapien
ctgtaaaactgacagcaccgaactgtccttagaacacagccttgaaaactccctcttctgagggactgcttcccttaactgagctgctgcagatggaaacctagctagatcctcatcttctgcagtctagtccctcactgtggtttatcacctcccaagctgtcctctgctctctttccctatctttgtgttgctaagccatggactcagtttagctggccctgaattacaagatggcaccttccctggagtggagaaaagtccggatatttcaggatgccttgatttgaagcctgtttgactccaaagttctctggtttactcccacctgtgggaaacgtgaggctagatctccacacacatggattccaaagtgtcatgatctgtgacgtcatctgtcggaccgtattgatcagaggctcagggacagatgaccctatttaggcaaggaaatgagtgggtgaagcagcaagattcacctttcccagtttcatctgggggttgttttgccaacattgccatctgttgggccagtgctggctacagcagccaagcttcagacatcactgcatctttatcaatgaccttgggaccacaggaggtgaccttctgaccaaacagcagccaatgaaggaatcttaaaaggcacatcactttatatttattcagtggttatgtcatcacttaatcctcaccacaaccttgtgagttcagtagaatttgtgttttcattttatctgtgaacaaatggaggcagagagtttgagtaatttacaagtaagtggcagatccgggggctgtgcctagacaatgtggctccagactccttgcccctccctgccttctgctgcatcttgattgagtctagccatctatttctttaacacacactaattgctgtctccatgttccaggccctgtgccagatgctagaaatacatccccatccactggatcttggcatggtccattgctcagtgtcctgctatgttacgtgttacataatgcatttattccggtatttagcccatggaaaataatgctgaaagacattgtatgcatgtttctacaacaaaactatgtaacttatgtttcttttattgctttggctatcaggaagctcttatccaaatcagagcaaatacattagaatttgggcttgtcatttcagtttgctgaacttttccttctggcccagattttctattttggttcataaattctattgcacaaatgtcctttattgtaaaacaccttaaattctttctaagggaaggctgcatggaaatgatacagtaaggtcttccctgcattttcttagattcctattagggaaggcagacctagatgtccctcttaccctcagtcccaaagccccccatttataaaatcccttaagcagtgactactgctgttctgagtacctggaggtagttcagagcttctgaaaggtaacatccatatacaaaaagaagttccttccgatccagatcccagctttggtgccagatgcacatttgaggagtaggtggctagtcagactctcacctgagcagttaataaaatctattgccccttaatggaattttttctgcaagctcgaattgatctgtcatctttgtgatttgtgagatggcagggaagcaccaaacaccatcatgacttgggccacagtggggggaaaaaaggaaaaaagaaaaaaaaaatccactgccaagccttgccaggcgtagaaagggctggaactgctggggccattttatctgatttattggaaatagagtggatcttattaacattttaataaagagaatctttttgcactaggctggaagtggccgccagtcccccgtgcaattccattctctggaaaagtggaatcagctggcattgcccagcgtgatttgtgaggctgagccccaacagtccaaagaagcaaatgggatgccacctccgcggggctcgctcctcgcgaggtgctcaccccgtatctgccatgcaaaacgagggagcgttaggaaggaatccgtcttgtaaagccattggtcctggtcatcagcctctacccaatgctttcgtgatgctgctgctgatctatttgggaagttggctggctggcgaggcagagcctctcctcaaagcctggctcccacggaaaatatgctcagtgcagccgcgtgcatgaatgaaaacgccgccgggcgcttctagtcggacaaaatgcagccgagaactccgctcgttctgtgcgttctcctgtcccaggtagggaagaggggctgccgggcgcgctctgcgcc

SEQ ID NO: 16628 - DNA, 2300 bp, Homo sapien
atcaaggtgctttccagttttttacaatgataaataatactttgacttatcaattaattaaaatgtgttatatgtcaattatatacagagcactgggctaaactggttatctgtgtacataaactttccaagtttgggattgtctgcttagaaaggatatattaaattggtaccattggacccaatatgactggtgtttgtaagggtctaggtagaggctgcttgatagcatttgtaaagggcaattaatctattctgccgtcagcattacagctcgcttcaccacacctgtgcactcaacgactcttcctccccgaaagtggagacagtgaggcaaaggacatggagaaacggaggctcggagagtttcagtaactttccccagtccaccagcttgtatcggaattgggatttgagctcaggtctgtccagctttagaatgcaaactcttaagtgctgccttaagtttgcttccccagaagaaggtcctgggatgagaatttgtgttaaagtgatgtatcggaaaggttgctaggaaaaacgtatagggaagtgggaactgagtttggcaagagggagactgagcaagggtgtcatctcaagcgaagttccattgagataactttggcctcatcttccagggagactgggaatgatgtgatttgcacttcagtgctggcccctttggggcaaggcaacttgagtatttataactcttgacccacaagtccttggttaaaggctgctgggatagtgggcaggcaggggcacaagttgtcagatgcttctgtacttcatgtgttacagacaaagcagatccactagatgcagccttttggaaaaagacacagatgcccttgatgtgctggtgtcggttagcaatggcttggaagagctggatgttaaattgttaggaattttgcaatctggttgaccccactgacagcttgaaatcagccatggtgagagtatctacaccatggaaattggccaacattacaaattagggctcccttccctccacccagaagtgttcagtaaatatttactggcatactaccggagctgctggcctttgggaatggaagcatactgggggtccgtgtgcactaaaatggcaaagaaaatctaggggatgtggatggtgcagggacagcatctactgcagcactcatgtataccagctgcaatatggtaggaaacctgcccctgcccacacaggctaggcagaggtgtgtgagaaaaagggaactggtgagagggaggggaacatgctggatttcagagcaaggtctctcaacctgaggtggcctgggtatgagacatgctacgcagaaaaaaacctagaaataactgagattaaaatagctaactaagctactgaatacttgcactgccaggcactgagctagatgctttactttggctaatcttcataggagccctaggaggtagatttcatcatcatcatcctcactctaactattattatcatctttgtcatccttcttctacagatgataaaattgagatttagagaagtaaagtaatatgtctaacatcatagtgggatggctgagctctgaacccattcaatctgactccaaatgcaaagattgaataactttgacagaataggtcccacttcctatggactgagtacacatggttgtgggggcataggttgcttcagtggccatcaggatgacctgggagtaacctaattttacgtgattataggcttaaccatctggttatcaggaaaaaaaaccatgtagagagcgcacgagagcccagaatcagtagctgggcctcctggtgtggaaaggatagaactcaaatctcatcgagggatggaagtctggatacactcctttcatctctcagaatcagctccaggctggcccaaaacaaatgatacagaggctgagaaaggcagagcaaacctgggacatggggctgagccagcagaatcattagcagtcaggctgtgtgaatttttttgtggtaagagagataaatgtccctcttgttctttgtggtttcctttgccataagagccactgctttgtgaaagttcttctttcctttctctggcttgcccatccctggattgatgtagtagccagcagcaaggacatatgaagggtctggaagtggaaggctgccacccctgccctgctcccacttctgggcccccagggatcccctgacataaacagtcctgcaggaggaaataataggtggacttgtccctgtgacacagtggaggtaggtctggaagtttcctttgaacatta

SEQ ID NO: 16629 - DNA, 2300 bp, Homo sapien
acacatatttaactctgattgtatatatcaaaatctccatttaatggagtcttgaaaattgacttttaaaaacatttacaaacatccttggtgattctgatgcccacgaaaatttgagagctgctgatttcaggccaagctcttcatttcacaaataaggatactgaaacagataaggccatgctttcccagctagctcacaacagaggctggactaggacatacttcaacatagtgctggtctcattctgaagtttaccacttcctattaaagtatgaggaagtcatgtccttaatgaggttaatcagtgccgtttcacttctacgaaatactcttcttcttcctcaatgctcctttcagtggaaacatacttttattatataatttgctagaaattatttcctcatccctttctgaaatttttgacatgattgatcctccatctcattcactaccttctttttgattaatggaaaaagttctggtaaatttctttatatcactctcatcctagataatgatgtgaagcggttttgttaaattggcagaattaaagttttaaatttctccttccctcttcctcaactatgttcaaggctaagatcagctgtgctcaaacttctataattctctcagtttatagacacaatcgtttttattgccaaaatcaggagtcctttgagtttcactgtgccacacgcaatgttcacatcagcggttgcttgagattaccatgctttcagatcatgacttgccctttgatcacttatttgacccacccacatgtcaagggtaagttttatatattatgtcctggaggttgccgtgagatgagggattgcagtagtctggttgttttataagagctaaattggacttgggcaggaaagagatgaaaagccagactgaacaagggccttgcagttcatggcaactgaagtgaaggagttgaaatctgtgttaaagataaatcaacataaggctggccaatttatatcaaaattctacatctccccccttactagatgaatgttaagaggaaggcatattaagatatatacttttaaagtatttgatttttaccttaaatttgcctttcagcagtaaaaaccaaaattattgcaaatgtgacccatgtaatacctaagagcgtgtgatcaatttttcagttgaatgtgtcattaataatgcactcttggtagacatgttgctattagtttgaaatagttttccaggccatctaagttgtcactgttgcttgggagaaggccattgtgcaagatggtgtgatcagatgtgcttctggactttatcaaatcaaggatggcaggtgcatggcagggatgctactactgcttcctcatgccctatctctggtaggcaccactactgccctcttttccaatgagacgagtatggtttcaaaattgttctcaaaccagagccattgattagtgccagcacatgaaactaaagccctttaattcttgagtcaacatatgtatgagccttggtgctgaaatctgataagaaagtcttcattttaaaaagatatactgtggggcacagtggctcacacctgtaatcccagtactttggaggccaagatggatcacttcagaccaggagttcaaaatcagcctaggcaacatagcaagaccccacctctacaataaataaataaatagctggtcctggtggcatgcacctgtaattctagctactcaggaggctgaggtgggagaatcacttgagcccaggagttcaaggcggcagtgagccgtgattgtgccactgcactccagcctggatgataaagtgagactctgtctctaaaaaaaaaaaaaaaacccaaaccaaaaaacccacacaaacgacaaggaagagatggaagcttttggcttccttggctagactgccatccaagttatttgaaatcctgaacgtaagtccaggaggggcccaggtcccagcccatcacaagatgggctgtacctagaaagatgggagagattggtaggccaagatgagtgggaaccacagtaatgtattcctgtttcctcactcctgagtcattccaagagaaacaaaaagatgatgccatcctccttgaaatgcagtttgcatgttttttctaggatccttgcttttctgcagaacaagaggctatccatttcaaagatgaactttgaaaatgctgaattctagaatgattggcagttggctctctgacttctagacgcaacagattggggttggaacacagataaaggtaagttgtttcaaggggaagggagag

SEQ ID NO: 16630 - DNA, 2300 bp, Homo sapien
agctactcaggaggctgaggcaggagaatcgcttgaaccggggaggcggaggttgcagtgagtcgacatggtgccactgcactccagcctaggcaacacagcaagactccatctcaaaaaaaaaaaaaaaaaaaaaaaagtcttttaagaaaactgagatactggcatctagtaggtagaagtcagagatgctgcccaacgtcctacaatatacagggtgccccctccaccaccaacaataaagaacgacttgactcaaatgccagtattgcagctcttgagaaactctgctctaagctcaaaaaactcagagaattctagaatggtgagaaaaaaggagaagatgcagagtcaggaagtcctgcgtctcttacttccttaatttgatgaccttgttccagtttcttaacgcctctgcatctgttttctcaaaaatgtaaaattatgataattatatcacagggtcttctgaggattaacttaaaacactgagatatttttatttcaagtagtcgggtaaagcactagccaaataccagttgacaacagccaattacaaaaaagttgtgtatacttacacagaaaggaagatctctctataggaaaggatgaggtgtgaagggtgaggggcaaaggtgtgagtgagggggaaggggtggtaaagggagttgaagtctcatgcctcaaggccaactggattccgggtttgttagagacactggtgggtctggcagaggcgtttgaacaagagcaactccatctcgaataggagctgggtaaactgaggctgagaactactgggctgcattcccagacagttaaaggattctaagtcacaggatgggataggaggtcagcacaaggtacaggtcataaagaccttgctgataaaacagcttgcggtaaagaagccggccaaaacccaccaaaaccaagatggcaataagagtgaaccctgcttgtcttcattgctacactcccattaccgctatgacagtttacaaatgccatggcaacgtcaagaagttacgctatatagtctaaaaaggggaggcatgaatcacccacccctggtttagcatataatcaagaaataactataaaaatgagcaaccagcagccctcagggctctgtctatggagtaaccattcttttattccttcattttcttaaacttgctttcactttacagactcgccctgaattctttcttgcatgagatccaagaaccccctctcttggggtctggatcaggaccctttcccgtaacagctctaacaccttacagcctctccctagctaaagtcaaactggagctgacccctcacatagcacagtccttaaatgagatgtgtgaaagtttccagaacatgccaggcccgcagtcaaggactctcctatccccttgccatgagacccaatcctaaagaccacctgtggggttggaacttgaggttccaaatcagcagtgcccacctccttcaacacccaaacccacagtctaaccctgatgccggaagccttccccactcaacagcaggcattgcgtggagtgaaagaagccaggcatgatggacagcttcctgtctgaatcccctcatatgaacctgacgggcacaatgaacctactgggctaaactccagacgctggccaccttcatagggtggagatgacagaacaggacaggagccatggggctcccggggcgggtaggggtgggtcatgttccttggcttgggggcagttacaagggtacagtggggcttgttgaagggcaaaagttctgtaagttcgtcccgacaggccaaagaaaccccagagccgtctttcgactgactacagcctggaagagaggccaagaccactccctgcctctattgctccatttctgagttggtctcactttccaccccactgacggcgcgctgcgtgaggggcggggcatagagggaggggaggggctatgcgaaagaaggcggggagagtggggtggggccgctccttggaacggaagcgcgcggcctcgaggcccttccggtgcgggagaaactactactcccataatgccccgcggtcccgcgagctgccagtctcgtcgcgagaagcagcggcccggggcgactgagcggacaaacggaagtgtaggttacggtctgagacatcaccgccaagctgggcatcggggagatggccgagactgaccccaagaccgtgcaggacctcacctcggtggtaagggacggctgtgagggccggaggccgcggccttcccgggcggcgccgggccaagccctgctg

SEQ ID NO: 16631 - DNA, 2300 bp, Homo sapien
gtttaatcggattatggttccacaagctgtacagaagacgtagtggcttctgcttctggagaggcctcaggaggcttccattcatggcggaaggcaaagggggagtgaggagcttcacatagccagagcaggagagagggggtggtgatgcacacttctaaacaaccggatctcctgagaactcactgtagggtaccaagcggggatggtgctaacccatttatgagaactctgcccctatgatccaatcatttcttaccaggcgccacctccaacactgaggattacaactagacatgagatttggttggacacagatccaaaccatatgagctatattaacaatattacatcttccaatccatgaaccatgcatggaccattccatttgtttaggtcttctttaatttccttcaatactgttctgtggttttccatctaccagtctcacacttccttggttaaacatgtttcttttatcccttcagatgttgttgtaaatagaattgtttctttaatttcatttttggattggggcagtcttttgaaataaggacatgagtgggaaaaagcagaggatggctgttgacgcctagagaaaaaagtataaacacagagaaaaaaaaaacagaagccagaaattacataaaaaggaaggcaccgggaaagatgagaaagaacagggttgtgggagtactacacttagcaaatgcttaagcaaagtcaagctttcaagacaagattcctaaagcaaggcaggagtatcctaggacagacaaaagctcactcgacaaggcaaagagacaaacaccagagtttggaccccaccaactcccttagccagctggcaatatggtttcaccacttcttagaaaagaggaatggagaggtgtcctcaaaagccaccactaggctttcagaatgttttgtgtgtctgtgtcttggcagaatgagccaaacgtactttcttcgtgccccataagatgagacacacccagcaaaggctgtcctcatacagaactacctccaggtgtcttttatactgcaagacctgcaccaaagggttctacctatagaaatcctagcacctagacatagtcaaccaagtacatggctccctcaccctccaaccaaagatgccatatttccatcagagtggaacaaaatcccactgtgttcctaatgcctcctgcaattttgcatgtgggagacatggctggtatgtgacattctcttctacagattgtaatggattggggaaggagggggaactagagttcaggcctatctttctagaggacaaaataaatatgccttgataactgcaattatctgaaaactatttcaaagaaaactctttgtctcattctggcatttgctcaagggtatggctttccatcagtctctctgtctccatgtctcttttacatacatatgtatgtgtatatgcgtgcgtatgtgtacatacatccatacatatagacatattctctctctctccacacacactcacacacccctccaacctctgtggctctgagcgtcatgtgtgtaagacactgacgcgaatggtgagtgcctaggcaggggtcaaacaaaggctacctaccatgccagaggattgccacaaacacctcttaagcaagcatattccttggctcctcccagacacactgaatctgaatctctaggattctgatttcggagcccaggaatcctccggtgcaggagttcccaggtgactctgatgcaccgggaggctggaggcgctcggatctagagaggaggcggcacttgtgcagtgcagtcgggaaagagaggaggggctgggccggtgcctttaggcggtcaggtgttaggaccggagtacaagccgccagccgcgcgggagcaggccccgaggcagcccagccgcggggcagtaacctttagccacacttggcctccggccgccgccagagccgctccgcccccgccgcctcgcccccaccgccccgccctcctattggccgcgtccccagccgggctcgcggcctcggccaatggggccggcgcgcgccggaagccggaagcgcggcagcggcggcggcgctccccctcggcagctgttgtggggcaccatgcgaggcttcgggccaggcttgacggccaggcgtctcctcccgctgcggttgcccccgcggccgcccgggccccggctggcgagcgggcaggcggccggcgccctggagcgggccatggacgagctgctgcgccgcgcggtgccgccgacgccggcctacgagctgcgcgagaagaca

SEQ ID NO: 16632 - DNA, 2300 bp, Homo sapien
accaaacaaatattagttgtttcatgagctggaatggcctgacctcttcatgccacagctccgggcaggacggactgacagccccagctctgccattgaccatgacttgggccacaccttacactcagggcgtccgtttcctcacctgtagtgtggggaagataatagcaccgtgccctcctcgctggactggtgtgcaggtctaaagcacgggcccaagaaatccacctacagtgtgggtggccgtggacatgggcgggcccttcaggacctgcgggctggggcgtggtgaacacggccgtgtttctggacctgtgcctttgcacctgaggcaagaaggaggcttccttccttgctttgctgtatgtctttgcctggaggtgcccaactctgcagctgggttcgagcctcagctctgtcactcacactgtgtggcctcaggcttgagatccgcctctctgagcgtcagctgtgcctaaagagccctctgttcacagtgcccaatgcctgcaggtgcccagcaatggcagagctgtgggagccactggctgaggaagagggaggcaagagacagaggcgggaagggatgaggaggagtcaagagaggccccttcgaatagctctgggatttcttaggcagagagtgatggtggttttccaacaggggcccagggatccgttttgataccaagaacaccagggatgcaacctgaggccacccctacccgcttttccctggcttctcagctcccagacagcctgcaggggggccgagggaggccgagggaggcctggggagggggcctgccatccagcaccaggggctgctgtgtgggagctcctccccagtgccaggccccttccttcagcctgcatggatcagctgccaccaccccaacactccacgttggcaggagcagtacacagatggggaaaccgaggctcagaaggaaagcacctctactgaccgcactgcctgcctgggcgcttgcagcactgcagggtgaccaactgtcttggcttacccaggcctgggggttcctgggacagagtgaggctttcagtgagaaaccctggaatgtcccagctcctgttagcaacagtgccgaagtccacaccagcagtgtccaacaaagacccgacgagagccacgtgtgtgtcctccaatgtcccagtagcaaagttaaaatgaaaagagatgggtgaaattaattttaataatatattctttttttttttttaagatggagtctcgctctgtcgcccaggctgaagtgcagtgactcagtcttagctcactgcaacctccgcttcccgggttcaagcaattctcctccctcagactcctgagtagctgggattacaggtgaccgccaccatgccctgccaatttttatatttttagtagagacggagtttcaccatattggccaggccggtctcaaactcctgacctcaggtgatctgcccgcctcagccttccacggtgctgggattacaggcgtgagctaccatacccggcctaattttaataatatgttctatctatcccagtatgtcagatattttccttattttcattgcaacatgtaatccatattaaaattatgaatgagatattttacctttttggtactaattctttgaattctggcatgtattttacatttacaactgcagttgacaaaatacaggctgccagggaaatttgaatttcagataaacaagaaataaacttttagtgtaagtatgtcctgtgcaatattgaagatacactaaaagtttgtttcttatttatctgaaattcaaatttccctggaacctctgttgtcttttgctgcctctagaaaccctcttgtgagcacgcctgaatttggaggatcacgtcacaagctctcaatagccacttgaactcatggccttaaagagcacaaggcaggtccaggggaaccagggcacccactggcacccaagacagccagccccctcaagtcagcctgcaaagacccatttggctcctcccctctctgcagcccctctaaccatcgcccttttgcctgcccttaacagtatcggcctttgtcttagtcaagctttcgaggagcaactcagcaattctgttaccgataatcacctaacaggtaaacaagatggcagggaggaaagtccacgtctcgccccacagttccccatatcagcaaatcttcaaattctagaacaaggtcagggtcagcaggggcagggcaggtttggaggaaggccaggccaagcccaggagaagagacagggtccagggaagc

SEQ ID NO: 16633 - DNA, 2300 bp, Homo sapien
tcacctcatcagagttgttttctaccaggaaccagccccagccccagccccagcccctgctggcagatgctccggtaccctgggctgtggcttccaggatgtgcctgactccagggcagggctgtggccaccagggccaggacgagggtgaggagggggaggcatcacctcaggcacaaaattttaggggcagcaaagcactcccatcaccagaatacatactgtgtccatgcagtgttcttacacatcaaaattcatgaaaaaaaatccagaatggaaaaaatatcaaacttttattataaacacagacggcatcggaagtcctggttctcctcttcccatcagccccaaggcactgctctggaacctgtctgggtttatcctggcttttttgcattcatttagattttttttaattgcctcaaaatattattttgtttactggttttggttccctcttaaagtttgcactcaaaggtgcacccccatcccccgcccctcgagggtggcagacaggaggacgagggcgggcgacaacaacatcaacactgaaaacaacagcgaatggacactgaggtcatgtgtgcaccgcggcagctccctccctccctccctgccttccaccctccttccctccctccctccttcccttcctgccttcctccctccttccatccctccttccctccctccctgccttcctccctctttcccttcctccctctttccctccctcttcccttcctccttcctccttctctccctgctttcctccctccttccctccctacttccctccctccctgccttcctccctccttccccccctgcttccctccctacctccttccttccctccctccttccctccctgctttcctccctccttccctccctacttccctccctccctgccttcctccctccttccccccctgcttccctccctccctgcctcccttctgtttaaccgatgttgagtgcctatgtgtcctaagcgctgttctagacactgtgtagagcagtcacgaatatacttccctgcccacacagagctcacattctggtttgggaagagagacaataaaataattcagaaataggccaggtgtggcatctcacgcctgtaatcccagcactttggaaggctgaggcgggcggatcatctgaggtcgggagttcgagaccagccttgccaacatggtgaaaccctatctctaccaaaaatacaaaattagccgggcgtggtggcacatgcctgtaatctcagctactcaggaggctgaggcaggggaatcacttgagcccgggaggcgtaggttgcagtgaaccgagatcgcgccattgcaccccagcctgggaaacaagagcgaaactccttctcaaaataataataattaagaaacagcaaggtgtggggtgtgcagtgctacccacataaaacaggagagaagagcctgggagcaggcttcaagttctaagcatggcagacaagaaggatgtcatgtaaaccctcacggccactctggtagagacaatctgtgacttggccccagttttcagatgaggaaactgaggtgcgggccctaaggcagcttgccagagccctgcagctgggaaatggcaaagctggattcgcagcccaggcaggctggtgccagagggcttttggggattggagggtgcagtgaaatccaggtggaatgcgggaactggacggggtttcgccacttaaaggtactgttattttaactgtgtgcgggacaaagccatctcctcttcgcttatggcaaaggccaggctggctcattcagaggtcactggttcctcctccagagactgagccccagggatgggggtctggctagggggaggtggctgggagggagcgccaccctaggccccctggcaggccgcccagcaggggccctttaaggctggccatgaggcaggcagcgtgacacccgcccagtgtgcaagttcattcatcacgggcccctgctgactcacgcttatgaaagtgattttcctggccccgcccactgcctgcgccgcctcctccctccccgtgaaataccctcacttccctctggcctctcagagcctcttggatccccacagggtaatgggtgtcccgatctcgcgggggactctgtgatccgtgttcccctgaccctcctagtgcacaacttggccgggctcactgggctcctgcaccactgcctgtcaggtgagtgtccggggccaggttccggggcagggaatcaggcacatcccaggcacccgtggcaagcccagct

SEQ ID NO: 16634 - DNA, 2300 bp, Homo sapien
gtctgggggtgggagtggcgggtgtgtgcaggcagtgatgtccaggagggcgctgcagccccgccccctccgcagcctgtcccaggcctccctcctctctgttctgccatgcggcctcctttcagtccctcctgctggccaggtctctgcctgccccaaggcctttgcacagagagtccccagcccaggacagtttcccgcctttctttaactccttttccttgggatgtctcagcataagaatcacttcctctaggaagcctcttctgacacaaacccctccactgccgtcacagcaaatactcctttcatggtctaaggtgctaccttttcatagcagtgcagtttttttttcttttttttgagacagagtctcattttgtcacccaggctggagtgctgtggcgcttggttcactacaacctctgcttctgggttgaaatgattctcctgtctcagcctcccaagtagctgggattacaggtgactgccacctcgcccagctagttattgtatttttaatagagacggggtttcaccatgttggccaggctggtcttgaactcctgacctcaagtgatccgccctctttggctccccaaagtgttggtatcacaggcatgagccaccacacccttccagcagttcagttttaattgttcatttgtttgtggaatcatttcagtgtttggctctgcccacttggatgtaagctccaggagctctgggagaccaagtacaccatctgttttgcccattgctggaactccgtggttgggcacctgcctggcacctagtgggttctccttaattcatcttttaaatggatgggtggatggatggatgggaggatgggtgggtgggtggacagatggatagatgagaggatggttggatggatgggaggatggtgggtgggtggatggatggatggatggatgggagggaggggggtgggtgggtgggtggatggatgggagggaggatggatggatggatgggagggagggaggatagatggatggatggaaggatggtgggtggatggatgggagggtgtgtaggtgggtggatggatggatggatgagagggtaggggggtggatagatggatagatgggagggtgggtgggtggatggacagacagatgggcgggcgggcagatggatggacggatggatggatggatggatggatggatggatggatggatgggagggtggatggatggatggatggagggtggatggatggatgccagggagggaggatgagtgggtgggtgaatggatggatggatgggaggatgctgggtgggtggatggatggatggatgaatggttgggagggtgggtggatggatggacggacagtcggccggccggatggatggatgggaggatgggtggatggatgtatagatggattgatggacgggtaggcaggtggatggatggatggatggatggacggacaggtgggtgggtggatagatggatgggtggatggagtatgaaggaaagatgttctggggtgaagactggttctgggcgttttgtaaccaagggggcggcctgagggggcgtgcacgcccgcgggagttaaggatgggcgcccgcgggcgtgacggggccgcggggcgtgggcgccgctccccggggctggagccggcagagggcgctccgggctcgctggacacccgcgcttcggcctctgctgcgcgccgcgagtgggaggggggactttagaagcggggagagcaggagacttttggggagcaggccccaggggcgccgccccgcccccaggccccacatacccctcccctccgggtagccccctctgtggctgcgcccgcgcccctcgccccggcgggcagtcctcaggccccgcgcccggccggcgggggtgggggcggcggggagcgggcacgtggctcggggtccggccggcccgccccccggcgccggccagtccccgcggtgtccgcggccgcgggggcagcgggagagagggcggggcggcgcgggcagcgcggggagggggtcgcgcgggggcgggccgcagctgggcgggggtcggcgggcttccgggcggcggcggcgggcgcggcgcgatgtgcgagcgggcggcgcgcctgtgcagggccggcgcgcacaggctgctccgggagccgccgcagcagggccgggcgctgggcgggctgctgcgctgggtgggcgccaggatgggcgagccccgggagtcgctggcccccgccgcccccgcggaccccggcccagcctcgccgcgcgggggc

SEQ ID NO: 16635 - DNA, 2300 bp, Homo sapien
gggagagtggtgggtgtgtgtgaatgtgcacacgcgtgtatcgcggatccctgtgagtcgggggattccctcccttcctctctcctcttccctgctcctggaacccttggccggggtctgggctgggagggccggccagagcagggggagctctagagtgccacactcgcaggcacacattcacacactcacgcactcgcttacgcacgcacacacagccagagacacacccatgcagccaaaccatcccctcctcaggacccccgcagagctcccactgaaagtcctgggcagagccctgcagccccaagctgccctgcatggaagccctgcccagtcagggtgggggctctgaggttccatctcctcacctgccaaaaggagtgatgagcggggggtggggcgggaggtgctcatgcagactcctggagctggctgacattaccaggtgtcagccctgccatgtcactcatgtgttcagcattcctgcccagagccggcacctacctggtgcctggcctcaagggggatctgggacacccagatagggaccccagttttgaggagccttgcccagtcaggaacggggctgcggggtgcccaggctggatctttgaggagggcttggggatctgaggttcagccaggaggaggggtgatgtttgagaggccctcccatagctgtgcttcagtctcaccgcccaggtgcctagaaatgaccaagggtgccccctttctcgttgcctggagggatggggggcgagggcatctgtcctttaccccaaggcgaggacagagggtggaagggtcagagtgagtattacctcctcctcctccatggctgacctggccccagcagccctccctggtgtcgggaaatgtgtacatgttgctgcctctccctgggtctcagtaccctccttgttaaaacaagccactgagattggggtgggggccaccgcagaagctgggatccttctcaggctttaaagtgctggtgggcagggcgccgtggctcacgcctgtaatcccagcactttgggaggccgaggcgggtggatcacctgaggtcaggggttcgagaccagcttgaccaacaaggtgaaacctcgtctctactaaaaaatacaaaaattagccagttgtgatggcgggcgtctgtagtcccagctactcggaaggctgatacaggagaattgcttgaacccgggaggcagaagttgcagtgagccaagatcgcgccactgcactccagcctgggtgacagagcgagaccccatctcaaaaaaaaaaaaaatagtgctggtgaatcagtccccgtgggaactggttacagtgaaaggtctgactccactacagtgcagagtaggtgggacatcctgcattgcaaacaagctcctgcaggacccaaacagctcctgtgaatagcaaggtcttagcgcacaggtgtcaacattgggcctgggaggctttaaaaatgctgaaatcagagtgggcctcacagcagctgattcagtcaccctggggtgtggcccgggctgaggaggttttgaaagctctccaggcgatggtgttggaaggggcggaaagctgccttcgagcctcagcctggcaagcagcacctgccagccagaccttgaggaaaggggagcagctctgtcccacggattcagatgtcactggaaaggcagaacgaggaggcacctggtcttgtaggttcaggccagccttggagctgccctccacccatccctgcctaatgcagccggaacttcgtctgcggctgcttttctgaactcttggcgtcctgtttctcctcctgcaccccaaaattaacgcagtcctgcccgtggctggcattgtcaccaggccttgcaaacacctctgtcggactttgcccaacctccctggaaacacaccaggggttttggaaggactgcagtggtaaaggttgtggcgctccctgggacactgattcggagtgtggttgtgtgcagctgagcgtttggcggtgggtgaagccacgtggactgatgactgtggacctacacctgcagggatggccgtgggcctgcgtgtgtgtgtcagcgtggctgggagcaggctggtggtactggcagccgcttccacgtgggtgaggggagggcctctgtctgcaacatccctcatcagttccccctggatcccagcccggggagggggagagggaaggggggctcagcttcccaggaccctaagctgctcctgggagaagagaaggatcccagtatccggtcagaggctgcaggaagcgcttgcct

SEQ ID NO: 16636 - DNA, 2300 bp, Homo sapien
ccttttccatttcaggcagagtatatccctagaagtggaattgctgggatacagtacttctatgggatacggtacttcgccattagcatttggaggaacctgattctgatcttaatgggttaatctgaagccgttcttcctcacgggttgatgctgtgtggcgcaggggttaggcacagaactctgggtttggatctgacttgagccacttacttgctgtgtgacctctggtgagttgcttgccctctctgtctccatctccccacctgccaagagcaggacagcataggggagcatggagggagatgggcctgtcaagtgcttgactgtgccaggctctgaagtgtgaattaagcgggagctcttagagcttttagggttgaaacatgttcttgtcagagcccatccccggccactcaggttctgagggggcccctgaaggctttcagtgcacgtgggctgcaatcagcagagatatcaccccccatggaggcctgggcagatgtgacatgtgggaggggaacaggcccggctaaaggaggttcctcagttgtaccccagaaagccttagcccctgagaatgttgttcttagaatagctgaggtggttggaatgtaccagtcttgtgggtggggcagcaggagcctgtaagtggcattctcgtgcgccaggcagtgaagcccctgatccttcaagggaggggtcttttccccacattacaggtgagaaaacaggccctgagaggctggtatagggacattcagcttggagacatacagatggttcttgaaccccttttcttttcctacaaactcatgtcgtgttttgctggttttgcagcggcaggcatcacaccccgcaaggaggtggcagtacccaaggggcagggacctgccctgggagcagggtttcaaagctcccggcaagcacagggggctggacagtgtgggcagggaccttgctgggtggtgagtgttaataaccacatgtggcactggccagccctccaggctctgtgcctgaggtagaaaggtgcccattctgggtcctgccccttcccctcagggctcccacctgtgccctggcctgtggtcttggctctgccctgttttaggagagggacccaccattctctttgtcctttgaacttttgtgattttttttttgagacagtctcactctgttgcccagggtgcagttgtgtgatctctgctcactgcaatctccacctcctgggttgaagcgattctcctgcctcagcctcccaagtggctgggattacaggcgtgtaccatcatacccagctaatttttatatttttagtagagacgaggtttcaccatgttggccaggatggattcaaactcttgacctcaggtgttccaccagcctcggcctcccaaagtgctgggatgacagcttgagccactgcactgggctgtgagtgacttctttcctgctaacccggactgagaaataggaagaagttacaaagcttccagaataagacttaagacatgatttccagttgataggcggggtctcctgctgtgttgaatggctaatgcacagacgtgccgggaggcattcacccgtccctggagcgtcctgcctggtgacagtgtctgtgttgagccacactgcgtggtctgggccaaccatgtgatttatggtggggtgttgagccatgaggtgtcagcgtgtatgcgtcaccgaaccccagtaagactcaggactgcatccctgattggtgatgctctatcagcattgaagctgggagggttcagtgctatgggcctttactggtagccccgtgcctggccccccactccgggagcctctttctttgctggattttgtctgtctgtctgtcatctacctaccttgaccgtgactttgacagttgtgcccagtcctttgaattactgacctgagggtaggtgtggtgctgagctcctgaataggcatgagcctagttcccaaataccgcatagagtgaccaccaccatttcatggttcagaaaactgaggctgggagcacttgaagggtccctggccccctgctgttgtcaaccaggaaacagacacagagcacacagctcttcccaaccagggtttatttggcgcctgggcacagtggtggctacctggctaggttgggcactacaggggcatgactcctactaggtagaagaatgtcaccgaagagggcagggtgtggtcagtgtgggtcatgcgtggccatgtgaggggtaggggagaggccaggaccaggaggcaggggtgctggctccaggaag

SEQ ID NO: 16637 - DNA, 2300 bp, Homo sapien
tgcaattgtaaatattatgtactgccatggcaagtaaaaatgaaagtggatagatacggaaatacacacaaagtgaattttgctaaaacaaatcaatggcacttaagacatttctattctaaaaggcttattcttaaggcttttctattctaaaaatttgcaatgttttaattgaatattagattttgtaaatgtggtttatttgtcacgtggatgaaatatcaggaaataactcactgctcagtggaaactctcatggctgttgttttttgttgtgttgtttcaggattggaggttttaaagcaggaaacagcagttgttgaaaacgtccccattttgggactttatcagattccagctgagggtggaggccggattgtactgtatggggactccaattgcttggatgacagtcaccgacagaagggtaggaaaaacgcagatggactttgtgacttcggcactcagatcctttcttccctttgtctctggaaaggcgcccgtgagatgctggcagatcagccgacatctgttcacttgagccaggctcagctggagatgttgcagtcactttgattgcttggaatattttgataggtgtctgagtgtgcacacatttaataagcaaaacaaagctacttgttggggccatgatgcctcttctccatcttcaccttcctgaggccagcggaggcgggactcccgcgttgtggtggagagtcccttccctgacttccttggggcctgcccctcccaggcttcctacgccgtgctgcctggactttgtgggcactgccacgagggggcgcccttctctggtctgactcactcttttactggagggctggctcttggctgtccttccagacctggaattcgggcttttcttagcctttatcagtgaagagcgtttgttatctcgaggcgtgaaggggaggcaaataggcatgccagtcctcttccctccgcgtctttatgtcagtctctcgatgcatccgttggatttgggggcttgaggttgggcacagactatttttctcattttgtaaaggggagaaagaatggtaaaagtgctccatgtttttacctggtgagatgataatgacaccaggactgaaaggcaaccttctaatgcgctgtgaccactggggaactcgaggcacagggcgggtggtgagtgacaagaatgaggcactaacagcgtgcgctgagaggtgtgtgtgtgcccctccgtttcaggctgaagttgactacattcctggcatttatgtaaatccctagactgggatgggtctttttaaaaatcaaaaatgggccgggcgcggtggctcacgcctgtgatcccagcactttggtaggccgaggtgagtgggtcacaaggtcaggagttcatgaccagcctggccaacacagtgaaaccgcgtctctactaaaaatacaaaaattagccaggcgtggtggcgtgtgcctgtagtcccagctgcttgggaggctgaggtgggagagttgcttgaacccgggaggcagaggttgcagtgagccgagatcgtgccactgcactccagcctgggtgacagagcaagacactgttttaaaaaataataataaaataaaattaaaattaaaagtgagggttaaagtcacagttaaaggaggttaatgttttatttccacagagattttaagacctgagatctcctggtaagagtctttattaaattgtaaatgcctgagagggtggtcctaggccttacatttaaaatggcagcttttttcatctttcaggggcattaagcacttgaccagaagtgccctttaatgagaggaaagtacttaatggcatttttctcacacggatcttgtctagtccaggttgatgttaatggaacttgaaggggcagacacaggagaaacaagatggaaacagaagctccaggtttcaataccaggttgcgccttccctctcagaaaggatcctttgtgaacgggagctgttgctagcccagtgcctcgactctgaggtgtccctgaaaacaaattgccctttctctgctgtcacacttccagtggtcagggccctgccgactcgaagcccagctcaagtgaacagatgctgcatgggtgttgagccttgcctccaccccctggggtgtcagtacagttccttctccccaggagagcctctgggatgcagcaggagccatggccctccgttctcctctccctgttgcccctgagaccccgctctcaggcccttcttttctcagtgggtgtcacatggtctcactgtctctgaatga

SEQ ID NO: 16638 - DNA, 2300 bp, Homo sapien
acccatttgttaaagctcttgtgattaaaaagtccatctttgccccagtgatttgagatactgtctttattatgtactaagttttcatatgtattatgtctatccctgagctttccattctgttccactggtctgtctgtccatgtactggtaccacactgttttgattataaagactttatagcatgttttaatatctgttagtgctagttccccttgtaattttttttttcgttgttttcttgggtattcttttctttctttcttttcttttctctctctcttttttttttttttttcttttttaatgcagcagggtcttgctctgtggctcaggctggagtgtagttgcatgatctcagctcactgtaacctctgccatctgggctcaggtgactgtcccgtctcagcctcccaagtaggtggactgcaggtacatacccccatgccccgctaatttttctatttttagtagagacagggttttgccatgttgcccaggctggtcttcaactcctgggctcaagccgtcctcccgcctcggcctcccaaagtgctgggatgacacgcgtgagtcacttcacccggcccttcttggctattcttgcatgtttgttttcttcatatgaattttcatatcatcttacttaattctatgaaagaagcttgttggaatttttgttgcaattgcatcaaattttaaatgaacttagaagtaatatttttataatgctgttattttgtctaagagcaaaggatatgtttccatttgctcttgtgtgtcttccaggaggttttacagttgtcttcatataggttttacacatttcttggtaagtttaagtatttaatctttttgttgctgctgtagatggggctttctcttcttgtatattctctaactggttgattttatttctatatgttaattttatatgctgctacctatctgaattattgtttgagttagttttattattgcttctctagggttttccaggtgtactaacctaccatatggaaataaagatagttttacatcttccttgccaattcttaaggcttcattgattattttctgtctagttgcatgggctggtatatctagcacagtgttgaacagcaggggagagagtggctatccttacgttgttcctaatcttaatggaaatgcctcttgtatttctccgttaagtaagatgctggatttatccctaaggtgtgtatatctatatatatatgtatatattttttattgtgttagattatctgtctagtgctgtttttctgagcgttttcatgaggactgtggattgaattttgtatgttttttcagcatctagaaaggtaatcatatgaatactttagacctattaatatatatggtttatgatattaatgagtttcccaatattgaaccaatctgtaataaatgccactggtcttgctattttgttttcttaatatgatgttgaattctgtttgctaataatggtttcctagttaaatcatgttgaattagtagtcgaattaaactgattacagagcacaattaccagcaaagtttacaaacacatttcaagtagaacagatacctttgctgatgcatacaattgtagtcacatggccgatccattcaggatttttaaaactaggtagtacctatttccttttctttttctttttttggtgaacttcagacttgtgaaggtggtatctgttgagataacttaactgtgatatgtgttgattataactgcctgtgaaagtcacagtatccctaaagatattccatttggtttcttaaatagcaattcagttggcccagatacatctttgttattacaaactaataaaaagtactccttataccgtagttgctgtttgagaaaggctggcatctcctgtaatgaggtgaagcagttgcgcagagccgcccgcccactgcacgtgggtgcagcttgagaagcaggatccacgtatgcctggtgctctcagggaggccatcgtgggtcacgtcttgtctgaaacatttgtctgttcctgtcttttcacctgttcgggcgtagctgacaccgctgctgcactaggagtgatgtgaacccaacacaaactcagttcagataaggggaaaccatgaaaccaacataattgccagagcacttgtgtcagcacttctgacacaaattatgtcagggtccccagcacctctcccaggctcggtgctttagggctcacgggactcagcctgtggtcatactcccagctaagattcattatagtggcacagcaaggatgca

SEQ ID NO: 16639 - DNA, 2300 bp, Homo sapien
gtcccctcagtgtataggcattctctgaaactggtggtggtggcattctctccccttctttggggcctcgctgtcacatgatggatgcctgcaatcactgttctaccccagtttccagctgtagggccatgtattcaatggcatagtgactaaagggctgttcagagaaccctgaccaagattaatttacctaaagttggaacagaaggacatagtcaagtttaaaatcaaatgctttgtgtggtggcagaagggagtgcctttgacggtttgcaaatgcagagaggcaaggattctccaaaagttcagaaaatcgtatgagatctgagtcaggaaaggattcaagaatccaccaccacatattgaatcatataggagccgagcactttatgagtatgctttttgtttgtttttgagacaaggtcttgctgtgttgcccaggctggagtgcagtggcacaatcatggctcactgcagcctcgacctcctgggctcaggcagtcctcccacctcagcctccctagtagctgggactgcaggtgcacaccaccacacctggtaaaaacaaaaccaaacacaactatagagacatgtctctgttgcccagactagtctcaaactcctgggctcaagtgatcctcccgccacagactcccaaagtgttgagattacaggcataagccactgcgctagggcttatgtgtgtacttaatttaaccctcatcctttaaggtagatattagtacccctattttttaaaaaaattatttatttatttttaaggcagagtctcgctctgtcgcccaagctggagtgcagtggtacgatctcagctcactgcaacctccgcctcccaggttcaagcgattctctgcctcagcctcctgagttgctgggattacagtcatgcgctaccacactcagctaagtttttatatttttggtagagccggcgtttcacccatgttgaccaggctggtctgaaacttctgacctcaagtgatccggctgcctcggcctccccaagtgctgggattacaggcgcgagccaccccgcctggctagtacccctatttttgtaatgaagaagctgaggtacaaagaggttaaacaacctgctcaaaattacgaagtagaagcctgaggtggggtatggtaatttgtgattctacatttatccaccatattaagtcaactgtgttaaatcatgttgaaggaagatgatgcgctgtgatctgtaatattggtgcagttcagcattaccgtggtgcagtgtcaagttccaaaagacacaaaactgtctgatcggcctgtagcgcatcaccgcccaccagcagtacctgaagacgctttcagtcccctgctagtgccgtacggagtccgggctggtccatttacattgaaaacaaactgatcctagcatctaagtcacccagacatcttttaggcggcaagcttttcagacagtttaacacatttattcttgttttttcaaaaagagcaaacacgtggcgttacaaaggtcctccgtttcgcacgcaccggtgtcccggcagcgcgctgcgcgtcgggaggcccagtctgtcgtcccgtggggccgggggtcaggaggtcgggcaggcgggatttggggtttcgcgtgttccggaccggacacttcgccatcttaacgagctaccgcccgggttaaggggcacccagggcaggtgcccggccgggggtggggtgtccgagccgccggtgcctggacgtggacccctgcaggaagggtccgcgcgggaagcgagctctccacgagtccatgacagcaggcccgcgggggcagggagcctgcgccaggcagtctttctagatcctggcccagcctggccgctttcgcgcccgtgctccttttcggggatcctagagcgacgcgcagagcggaccaagggttcccccagcgcgttctcgccgcctggcagctcgctggccacgcccctccgcttccaccctgccaccggcccccgccgccgcaaatgtcgcgagaccttcgtccatcctcccggcgtggtcccgctgcccacggcgtccagagcgcgcacgcaagccccgggagcgcgggacagacagggcacgctgggtcggcggagctgaggctcccagctgtgggcctcgctggcccggtcgcccagtctcgcgagagttgggagtaaacagccccgaatggagtgcccaggcgtgttcgccgcggaggcgccgttatcccgggcccgccggccctgagctcccggcggcgcaggtacgtcagccgcccgcgcgcg

SEQ ID NO: 16640 - DNA, 2300 bp, Homo sapien
gaggtggcgggcgcctgtagtcccagctactccggaggctgaggcaggagaatggcgtgaaccccagggggcggagcctgcagtgagccgagattgcgccactgcactccagcctgggcgacagcgagactccgtctcaaaaaaaaaaaaaaaaattagccgggcgtggtggcatgtgcctgtagtcccagctacttgggaggctgaggcaggagaatcgcttgaacccgggaggtggaggttgcagtgagccaaaatcgcaccactgcactccagcctgggcgacagggtgagactctgtctgatagatagatagatagatagatagatagatagatagatagatagatagactgaaactgtgagccacgtacatttgaaaagttagtgttatttgaacgtacaattgacaagatctgatgccctcagctggatgtcttcactcagactgtgtatgttcctttaatttattaatcaaagaggctctctctctttccctctccctgcaggttgccatggctgctgttgacagtttctacctcttgtacagggaaatcgccaggtcttgcaattgctatatggaagctctagctttggttggagcctggtatacggccagaaaaagcatcactgtcatctgtgacttttacagcctgatcaggctgcattttatcccccgcctggggagcagagcagacttgatcaagcagtatggaagatgggccgttgtcagcggtaacctactttataatcaaaataatcttttctgtgaagtcggatgcattattcaaggagctattgaatttaatgtggtgtttttatgggaacatgctgataaaaaaataaaacttatggctcctgccgtgattatgttcacatttcattttcttactgctctcatcttaggaagaactggcctcatgattggtatccttcctattctgctctctcctgttcccagtcctcctccagacccacttcctactatgtgcttttcctttttgttctctgttttaaaattgtcttgaaagtgttgccactttcagaaatgcttcacctattttgaatttcattttaatttatgaagatttcccagaaaagcacctcctgccactcattcaagccagatagtagtttgaaaacaaattcctactgtgtctcctaaccaatatggtgaatgtaaaataactccctgtccgtgtgtcaggatgtctgggagagtgtatagcatgcgcccttcacattcctcattcagcaacagtgtccttgacttgtagatactagaaccgacttgatttctagtgtgaatttttctctgactaaacctgacagggggtactttgggtccattttaagggtcacaccgtgaaatacacatgctcacttttcctgacttgcatcctaggtgcaacagatgggattggaaaagcctacgctgaagagttagcaagccgaggtctcaatataatcctgattagtcggaacgaggagaagttgcaggttgttgctaaagacatagccgacacgtacaaagtggaaactgatattatagttgcggacttcagcagcggtcgtgagatctaccttccaattcgagaagccctgaaggacaaagacgttggcatcttggtaaataacgtgggtgtgttttatccctacccgcagtatttcactcagctgtccgaggacaagctctgggacatcataaatgtgaacattgccgccgctagtttgatggtccatgttgtgttaccgggaatggtggagagaaagaaaggtgccatcgtcacgatctcttctggctcctgctgcaaacccactcctcagctggctgcattttctgcttctaaggtcagatgttacttactggaagatgaaatcctaatgccacagaacatttattaacagttgtttggtctgatttgttgaactctttgtcagcaactcacatatgcttatcctgtattttttcctgaattgataataagcaagtctttttttctcctgaattttcaagttcacccagaattaaaagtcttttcctcccctctgtctcaacaggcttatttagaccacttcagcagagccttgcaatatgaatatgcctctaaaggaatctttgtacagagtctaatccctttctatgtagccaccagcatgacagcacccagcaactttctgcacaggtgctcgtggttggtgccttcgccaaaagtctatgcacatcatgctgtttctactcttgggatttccaaaaggaccacaggatattggtcccattctattcaggtaggagtgtg

SEQ ID NO: 16641 - DNA, 2300 bp, Homo sapien
agaaacaaacaaaatgtccatcaacaaatgaatgaataagcaaaatgtggtgttatccacacaaaggagtattattcagccataaaaaagcatgaagtactgatacatactacaacatggataaactttgaaaacattatgctaaaggacagaaaccaaatacaaaaggccgtatgttgtatgtttccacttgtatgaaatgtccagcataagcaaatccatagagacagaagataacttagggctgctgagggacagggggagaaaagaggtatgactgttaatggggttggggtttcttttgtaggtgattaaatgttctggaattagttactggtgatggttgcatagcattgtgactatagcaagaactactgagttatacactgtaaaatggctaaaatgataaattttatgtcatgcgtaagtcatttcgatttttgaaaacctactttaaaaaaaagtagcaccaatatgttcaactctgttgccctagaatattccagcagtgattaaaaccacaaacttggccgggtacagtggctcatgtctgtaaccccagaactttgggaggccaaggcgggcagatcacttgaggccaggagttcaaggctaccctgaccaacacagcgaaaccccgtctctactaaaaaaaaaaaaaaaaaaattagctgggtgtggtagaacgtgcctgtaatcccagctactcggaaggctgaggcaggagaatcacttgggcccggggtgcgggatggcgggcagaggtagcaggagctgagatcgcaggcaccattgcactacagcccgggcgacagagcgagattgtctgaatcaatcaatcaatcaacaccctccccctccccctccctctccctctccctccctccctctctctctctctctctctcctgtggcggtcagagtaaaattgagagctcactttatgcaaaagactctgctaagtgctttattcctattgtctcactttattctctcattaatcttataaagcgcagtcagactctcccgtttatagatggggaaattgagtcttatagatgtaaagtcgcacacccaagaccccacaactcagaaaggggctacctgcaattcagatggaggtatagcaaggcgcagagtcctgtccagggagcccactgtgagaccccccgactgcctcgcagtcacctgtacacatcatgttgggatcgccgaggggcgctgcagcgatccggtttctggggctgcgtctgggtggcacgttcagaacggggacctgcctggttcttcttcccagcccttcccctccagcacccggcaaggcccagtcaacacgagcaaactcggaaatcctggctgaacccacgaccgctgcatatttccattttagaaaaacacggcaacaacaactcaaaccaaatcgttcagaaatgagaataaagaagcaccgacaaaggaggcgattgctggggccgctcgggggaggagccgggtgagaggctgcagggagggcagggcatgcgccggcgacaacggggttcgcggtttggggggcaaggcccgggggaagagagagaacaggggtgcagcgccgcggcggggggcgtgaggatggagccgggggaaggggggctctgagatgtgaaggggcggggctggggctttttggtctgaaggaaggagtctcacgggacggagggacgaagatttcctggggtcaggggcgccaaggggcttcggggccggatgcagcggagggggcccggggcctggggggcgtggtgagagctcagaggggtctcgccaagcagccggctggcgctgaggggaccgaggaggggtctggggcgaaaggaccgcgagagggcgcccagggcgcggggggcgcggtacctgcaggccggcaaagtcttccaaaccggtcccgccagacccgcgcggccgccgcccccgtctcggccgccggagctgctgccgcgccgcgccctcacgtgacccgcgtacgcgccgggggcggagccgtctcagacccgcccccaccccccggcgtccccagcgcgccggtccgtcccgagtgcgcgtgcgcagcggttgcctgggcgaccggggaagcgttgggctgtaaagactagggcgccagcggctggcgaagaaggaaagagggtactctctggctgggctggggccgtagcgacgtccgccgcgaacctgggccccccaaagctgcggggcgttcggtgtcgccgaagtaaacatgcaccctgagccctcggagcctgcgacaggtggtgcagcagagc

SEQ ID NO: 16642 - DNA, 2300 bp, Homo sapien
tgcatagaatgcccagccacaggaagcaacagataaatgtttgtggaaaaaataaagaataagcgctcaatatataaatattaatatgtaattaataacaagagctaccatttaataatggcccactatatgctgggacatttaattataattctctccttatactcctgtataattattccagcttacagatgaggagactaaggctccgagaggttaagctctgggccaacagccataaagctggccagctgctgagcctcaacttgaacccagtgtcaatggctccaagaccagtgtctttccactgagtaatgccagttccctatggctcctcatacaaggttcatctggacagttgatgcttaagatatatttgttgcctggaacacaaatcagctggtttatttgttgcctgcgttcagaaactggaacacaaatcaagtggttttttaatgtaatcactaaaaggtttcctttagggcaccaagtctagtgggagcagaagctgaagccaggcttccttctttccttttttttttttgagacggagtcttgctccattgcccaggctggggtgcagtggtgtgatcttggctcactgcagcctcagcctcccccttggctcactgcaacctctgcctccggggttcagggaattctcctgccttagcctcccaagtaagtggaattacaggagcacgtcaccacgccctgctaatttttgtgtttttagcaaagacagggtttcaatatgttggccagactggtctcgaactcctgacttcaggtgacccacctgcctctgcctcccaaattgctgggattacaggcgtgagccaccgtgcctggccatgaaggttatctttcaagtccattctggcaaactttggtgaggggatcacacactgaccccagaaccaagtcttcattcggactctctaccctaggtcaggcactggactagactccaaattcaatcaagatgtcttgccctgacacaacatgcagtctggagggagagaaagcctttgatcttacatagtgatagcaataaagggacacatttaaagcatcaaagttgggaccagggagaatagcgtggtgggttagggctggggctctggagacccagactgtctgggcctgagtctggtgggttttgtttgcttgtttgtttgtttgtttgtttgagacggagtctcccactgtcgtccgggctggaatgcaatggcgagatcttggctcactgcaacctccgcctcccgggttcaagcgattctcctgcctcagcctcccaagtagctgagactacaggcgcccgccaccacgcccagctcattttttgtatttttagtagagacagggtttcactatgttggccaggctggtctcgaactcctgactgacctgatgatccgcccgcctcggcctcccaaagtgctggaattacaggcgttgagccaccgcacccggccaagtctcttctgtcactgactagccgagggttatctgtttggtgcaagttttgtaacctcttaagtatgtttcctcctcagtacgaaatggcgagagaagcccctactgcagagcgttgcttgctaccattattattattgttattatttggctgtgaagatcgggtatgtggtgtgggaagggggctggagcgcctagccgtgtctgcccctcgcccaccgccctccctggggggcagtcggcaccttccttgcagccccctcggcctgcgctcccgtggtcacccgcagactcctccacgccgggctcctgcgcgcaatccagctctgctgcaccacctgtcgcaggctccgagggctcagggtgcatgtttacttcggcgacaccgaacgccccgcagctttggggggcccaggttcgcggcggacgtcgctacggccccagcccagccagagagtaccctctttccttcttcgccagccgctggcgccctagtctttacagcccaacgcttccccggtcgcccaggcaaccgctgcgcacgcgcactcgggacggaccggcgcgctggggacgccggggggtgggggcgggtctgagacggctccgcccccggcgcgtacgcgggtcacgtgagggcgcggcgcggcagcagctccggcggccgagacgggggcggcggccgcgcgggtctggcgggaccggtttggaagactttgccggcctgcaggtaccgcgccccccgcgccctgggcgccctctcgcggtcctttcgccccagacccctcctcggtcccctcagcgccagccggctgcttggc

SEQ ID NO: 16643 - DNA, 2300 bp, Homo sapien
ctcacacctgtaatcccagcactttgggaggccaaggcaggtggatcacctgaggtaaggagttcgagaccaacctggccaacatggtaaaaccccatctctactaaaaatacaaaaattagccaggtgtggtgatggcgggtacctgtaatctcagctactcaggaggctgagacaggagaatcacttgaactcaggaggtgtaggttacagtgagccgagattgtgcaattgcactccagcctgggcaacagagccagactccatctgaaaaaaaaaaaaaagtgacttaagagacatccactaattacaaggtttggaccttatttgtatgttgattcagacagtaaacagtttggaaacaaagacaacaaagaaatgtgaccagttactggctgtttgatgatgacgttgaggaactgttgtttagacgtcacagtggtgttgtggctatcttaaagaaaaaaaaaatcctatcttttatagatactgacttcagcatgaagaccttggagcaatatggcaaatacttccactataaaaatttttgtggagagggtttgcaaggagggagagcatcaggaggaacagctaatgatgctaggcttaatacctaggtgatgggatgacctatgcagcaaaccacatggcacacatttacctatgccacaaaccagcacatccagcacaggaacccatcaacttaaaataaaacttgaagaaataaaataaccaaaatttttgtggaaaaaatataggattttaaaaagtctatctatacaatgcctgtgtttaagtgtattctataactatgttaaatattacttgtgcttatagcaagcttggaaggcgagagagaaaaatgaaaacggattatctgttggcaggaacatgggtgcatttctttttattttgctcaccattgatattagaattttttaataaaaactttttcaggcaacaaaataaagaactttaaaaagtgttggtaatagtaggtcaaggcatgaattacacattgatgacgagttactaaaggaaactaaaagatttgttttcctaaccgtaaatttggctcataaaactgaaaaagagaacaaaacaaggcccacagtttgcactagggtcaggcctggtgggaacattttcaaggcagggttacccccactgcacccccacctccacccactccccaccatgaaggcagcagtaggctccaccctcccaggtgggtaattccagcagaaagactaccagtcttttcagcaagaccccctaggattcatcaaagttcgccttgcttggctaagtgtggccacccccgaatgagtcaccgtgactctgataggctgccagagagccgttgggtgatattaggaaaaggatggttcctccaagaaaagttgctactggaggaaggaggtgtggatgccaggtaggcaggtgtcttagtccgttttgagctgctgtaacaagaaaccgtagcctgggtggcttgtagacaacaaaaatgtatttctcacagttctggaggctaggaagtccaaggtcaagctactggcagatttggtgactggtgagagcttgcttttttattcgcagatggcactttcttgctgtatcctcatggggtgaagatggcaaagaagctctctggggcctcatttatgagaccactaatcccattcctgagggttcttctctcatgaccttatcacctcccaaaagtcccacctcctaataccatcacattaggggttaggatttcaatgtatgaattttgaagggacacagacattcagttcctaatagtaggcaaaaacaagggtgaccgtgacccctctgccctgggagtaggagcttaattcccacgtgcttcctttttgttaggttttgatcgcattgagaacctggaagagtacacagggctgcgctgtctctggctgcagagcaatggaatacagaaaatcgaaaacctggaggcccaaactgagttgcgttgcctcttcttgcaaatgaacttgctccgtaaaattgagaacctggaacctctgcagaaactggatgctcttaacctcagcaacaattacatcaagaccattgaaaacctctgtaagggtacccagcaagcagtgtgtctgtttgccatatgtccatcaccttcccctgagggatgttctaagcttttatattatgggcaagaagtggtgtttttttttgtcttttttttgtttttttttgagacagagtcttgctctgtcgcccaggctggagtgcagtggcgcgatctcagctcactg

SEQ ID NO: 16644 - DNA, 2300 bp, Homo sapien
agaggcagcagaaaccctgcaggtctatcctcccctctcccaaccctactatgctgtttcagcatccttctgctttcattccaagctctgatcacattttgtaaacaccttatccattggataaagttcacttgtttattctcgctcaactcagctctccgttccaggaagggaggggtcaaccgactgattcaggcagcattctcacggtctcataagggacccggcatagtgggggcatccgtctagggatggcagggtagcccatgtaccccagaggaggtggcagagcctgtgtctcagcagactcgtgtgaatgccaccactctgtggccttgtcaactgatgtgaatgtgagacgggggacccagggaagggatgtccctggagctgccagggccccctgcctgcatcctcacctctgagttctggggctgggcctctggcagagtcagtgcgtctcgccagctgcacatgaaagagaggtcagggacgtcgctcagaccaagggggccggtcagaaacaatgcagggcggagggagctggggaagtccatcctggaaacaaggaccaagcaccacactggccacctcgagagactggaagctggtaaggggcgccagagttcctgaggagtgaaaagtgcactacgggaagcatatgttctttgaggaagcagataacaaaaaacaaatatgtagcccaaggccaagcagtagtgagaactgtattaaagccaaccacccgtccaggagaaggggatctggtagtgggctgagggcgtggtttcagcaaagccagccaggaaaagcctcgttgagaaggtggcgtttgagcacagcctgaacctagtgaaggagagaaccatgtacgcaactgggaagagggttccaggccgaacggtcaacaactgtgaaaatcctagagcagtgaagtgtgtgagaaaatgaggcagccagagtgagcgaggtggagagcggtggagatggagtcagaaagacggcaaggggcagcctctctcccggctcgtaagtaccgtcatcatacatttacagactacacccccaagacgctcaagttactccacagccagggactgcatctgagcatcgtcttcctactgtcaagcacagtgcctcccagaaaatgcactaggggttgaaaaaaataaatttctatcacaaggggccgggcgcggtggctcacgccggtaatcctagtactttgggaggccgaggcaggcggatcacctgaggtcgggagttcgagactggcctgaccaatgtggagaaacccggtctctactaaaaatacaaaattagccgggcgtggtgacgcatgcctgtaatcccagctactcgggaggctgaggcaggagaattccttgaagccgggaggcggaggttgcggtgagctgagatcgcgccattgcactgtagcctgggcaacaagagcgaaactccatctcaagaaaaaaaaaaattacatcacaaggctttggtaaatacagtcctctagaagtatgagcagccatagcatccctcctttttaattaacaaaaataacaggggcaaaaataacagcagcgctcgctgaccaagcgccagcatctatctgccaggcacatgctaaatgctgcactcttctatcgccgtccctgttaacagagttcaggaaacgaaggctcagcaagaactttagtccaacagctcttagctgccacagccaagacttgattcccatccgattcagaggcagagctccgaaccagtgctctcgcatgcaccgaaatgcaaacgctagcattagagtctcgctatacaaaaatcttttccctttggccgggtgcggtggctcccgcctgcaatcccagcactttgggaggccaaggcgggcggatcacctgaggccagaagtttgagaccagtccggccaatacagtgaaaccctgtcaatactaaaaatacaaaaattagccgggcgtggtggtgtacacctgtaatcgcaactaccgaggaggctgggcacgaaaatcgcttgaatctgggaggcagaggttgcagtgagccaagatcatgccacagcactccagcctgggtgacagagcaaggttctatctcaaaaataaaatagaaacaaaaatattttctcttggaaccgcatagcctgaaacgatcctagacaggcggagggcgctggtggagagcacgaccccacaaaagccctcagacaaggcagcctcgacttccccggccggcttcccgccctcgctgcgggctctccaggaccctttagacct

SEQ ID NO: 16645 - DNA, 2300 bp, Homo sapien
tggttcccccaaagatgtctacagcctaatccccagaacctatgagtatattatttggcaagggggcattaaggttgcaggtggaagtaaggttgctaatcagctgcctttaaaatagggctctcacctgtaaccccagcactttgggaggcccaggtgggaaggtagcttgagcccaggagttagagaccaacttgggcaacatgatgaaatcccatctctacaaaaactacaaaaattaggccgggcgtggtggctcatgcctgtaatcccagcactttgggaggccaaggcgggtggatcacatggtcaggagttcaagaccagcctggccaatatggtgaaaccccgtccctactacaaatacaaaaattagctgggtgtggtggcaggcacctgtagtctcagctactcgggaggctgaggcaggaaaatcgtttgaacctggaaggtggaggttgtagtgagccaagatcacgccactgcactccagcctgggtgacagagtgaaactctgtctcaaaataaaaaaaaaaaaagaaaattagccaggcatggtggtgcttgcatgtaatcccagctactcgagagactgaggtgggagaatcatctcagcctgggaagttgaggctgcaatgagccatgatggtaccactgcaccctagcctgggcgacagagtgagaccctgtctcaaaaaaataaataaaacaaataaaatagggagattatcctggattacctgggcgggcctactataatcacatgggtccttacatgggaaagagggagacagaagagtaaaaaccagagagatggcctcatgagaagaatccgactggcattgctggctttgaagatggaaaggggtcatgagccaaggaatgcaggcagcttccagaagccagaaaagacaagatagtggactcttccttagagcctctcaaaaggaacacagccctgctggcacttttagtccaggtaaaaacttccagataaaaacaatataggccaggcgtggtggctcatcctgtaatcccagcaatttgggaggcctaggcaggcggatcacttgaggtcaggagttcaagactcagcctgaccaacatggtgaaaccccgtctctactaaaaatacaaaaattagccgggcatggtggcgcaggcctgtaatcccagctactcgggaggctgaggcagaagaattgcttgaacccaagaggcggaggttgcagtgtgccaagatcgtgccactgcactctagcctccatctcaaaaaaataaataaagacatagatgacagctgagaatttggaaattgattctttaaagcaacggttctcaaagtatggcccctggaccagcatcatctgggaacttgctagaaatgcagactcttgggccacatcccagatctactgaatcagcaactcggggggcagaggtagggtggagcctagcaaacttgtaacaagccccccaggtggttctaaggctcactgaagtttgagaagtactatgttaggataacggtaaggttcatgactggacagtggttcttaaagcatggcccccagataagcagtttcagcatcacctgggaacttaggcaaatcatcaggtcccaccccagactcaccgaattggagactgtgttttaactagccccccaggtgctactgctgacgcacgctagctagagtttgaagaccactgcctaaagctctccctgcctgaccacccctggaaaagcttcactcttagtaggtatttgtacccttatttgtaaagcccgcttcttgggatttaaggacaatcagtaggatacctactgaccaatacaggtctggcttatagtaggtgttctgtgggagttcgttaaatgattaatttaatacaactctgaggaaattggtgaagtagatgtgggattcgaacctaagtccacccggcctccactattgggactcaagggagctttatttccgctgcccacgcgccgcctgcacgcccgttccctctcctcccgggagggggcgcgccaggaccctaagaggcctggctgggaggcgggacttcctgcctccgcaggaggcacttccggtccaaaccggaagaccgtgggtagctgcggcggggctgacccgtcccgagtgccaaagctggggttctacttgagatttccctcgtggtgccagggtccggcgagcatcacgccgaggcccattttccagacgaccacgacgaggccggggtcacgtaagtgcacgcatgcgccccctccgcgcggactgcgcgtgttc

SEQ ID NO: 16646 - DNA, 2300 bp, Homo sapien
cctattttaaaggcagctgattagcaaccttacttccacctgcaaccttaatgcccccttgccaaataatatactcataggttctggggattaggctgtagacatctttgggggaaccattattttgcctaccacactaatattctacattacccttgtaaaacgcctatccagctttggcactgcgaggccagttccatttcttcctttcctcctttctctgaataagccattatcaatttgcttttgtaactgacatatactcaacatgcagtaaagcacacgagtcttaaatgtacagctcattgaatttttattcatacatagaaacccacatgaacaccacccagatcaagacagagaacatttctatcactcaagaaagttccagccaggcacagtggctcatgcctataattccagcactttgggaggccgaggtgggagggttgcttgagtccaggagttcaagaccagactggtcaacagagcaaaacccccatctctacaaaatttttttctaaaaagaaaattccctggtgccacttcccagtcaatacttccttcaagaaggaaccactatttggactcttatcaccacagattagttttgccagttcaagaactttacataagtggaatcatggagaggatgtgtctggcttcttccacgccatgtgcctaatagattcacctgtgttgtgtacgcagctgttgtttcctttttaaattagtgagtcgtgttccattgtatgaatataccattgatttgttcacgcaacctcctgttggtgagcgtttggggcgttactgggtttgatgactttgtggaagtctctctgtggatatgtgcagccctcagtccatttctggacatctgctgtgctgtcccttcactctcctgggcctcatcccactctctgggctgcacacacacacaaaatggaattgttcttcctgatgtcaattcttgacatgttggggaggctgactacccagcccaccacacctgcttcttccaagtcaaaggttctgggaggactccaccacctggtcctcatatgccccagcatcctcactgtcacaatcctggagagagctgccaggcccagcttcagcagcagcagcagcaagcactgtgacaaatcttacagacactggtcatgctttcccaagttagtggctactgtaagactccgttaaacttgcagcctccttcaagcaaatacgcgttgcatcacagtaagccttgtgtaaattgtcttcatccctgtctttatcttatttttcctatgtctcttgatctctagctcttcactttaaacaattgttatcttgtcttatttgtatgaattaactcaaaatcccttcttaggggggaaaaaggcagagtatcaaatggctattttcttaaaaaaaattatttatttattttttgaggcagagtctcgctctgttgcccaggctggagtgcagtggcgcaatctcagttcactgcagcctcttcctcccaggttcaagcgattctcctgcctcagcctcctgagtagctgggactacaggtgtgcgccaccacgcccacctacattttgcatcaaatggctaattcttggctggggaacacttatgtttggcttcagaaaggcctgcagtgaaattttatatccaatgatcctgctgacagtgtgaacccctaattcctgtgttgaagtctccaggctcagccagtgaagcagctgagcagcctgtgatgtggaggtgcctaggggcctagggcaggagctagagtgtgaaactggacctgacgcccccagatgctcctcccccgccttgcaggctccgcgaccacccacggttaaagaagcagctgctagagcaacccctcacccacccaccggaacttccctccaggccatgggacgttggtctcagccggaacttccgtccaggcagtgggaccttggcctcagccataagcatccaagccgccgtcgttgggagactggccttcccattggcagggtgcactgtccatcacagatctcagggctctcattggccatcgtatggcaggggtggagctcaccacgcttcgtccgcgtgctccccacgtgaaggcacccgccctgcgcgtgtgaaagggcgagagcagcgcgagatagggcctagcgcctcagatcttcgttggcggccatggcttcggcttctcagggcgctgacgacgacggcagtcgtaggaagccccgcctggctgcatcgttgcagatcagcccccagccccgcccctggcgaccgctacc

SEQ ID NO: 16647 - DNA, 2300 bp, Homo sapien
ctcttccgggaggaccagccaccaggtgaggccgggccggggcatggctgtgccagagggcagagccacggagggctgggtcccaggacgtggggagcagggggtctggggaaggtggaccttggtccctatgctcagagacaccgccggagcaggacctggcctgagcttgggaccttggggtggaccctgctgtgagcagcgatctccaaggatcaccagccacaccagatgctcaactgtgaaagagtcatggcaggtgaacattcttcccacctgacttccagggaggttaaggccccctggtatttctgtatacgtttttagagccacttacatgcaatttaagttgccgtgctagcattggagataccgaaatgggagccactcccctgacttaaaagacattattaagcacagtttggtaagggtaataccgtgtacatgatacagaggtaaaccgttatttcctcttcttcaatacataccccttaaatcccttaactcagagtggttgttttgtgttttggattttttttgagacagggtcttactctgttgcccagactggaatgcggtggaacaagcttgcctcactgcagcgtccgcctcctgggctcaagtgatactcccgcctcagcctcccgaggagctgggactacaggtggactccactacacctggctaatttttgtattttttttgtagagattatgtggttttaccatgttgccaagattgttcttgaagtcctgggctccagctatctgacctcctgggcctccaaagtgctgagattacaggtgtgagccaccacacttggcccagagttttaatttaaaagttaattgcagacattatgctccttacctgtaaatacattcacgtgttttttgtttgtttgtttgtttgtttttcttttttctttctttttgagatggagtttcactcttgtggcccaggctggagttcagtggcactatctcagcccactgcaacctctgcctcccaagttcaagtgattctcctacctcagcctcctgagtagctgggattacaggtgtccacaccaagcccggctaatttatttttgtatttttagtacagatggggtttcaccatgttggccaggctggtctcaaactcctgacctctagtgatccgcccgccttggcctcccaaagtgctgggattataggttagagccaccttgcccagccctctttttttttttcctttgagacagagtctcgctctgtggcccaggctggagtgcagtggtgagatctcaactcactgcaacctttgcctttcgaattcaaacgattcttgcgcctcagcctcccgagtagctggaatgacagacttgtgcccccgtgcccagctaatttttttgtgttttaatagagatggggtttcaccgtgttggccatgctggtcttgagttcctgtcctcagccccacaaagtgctgggattacaggagtgagccactgtgcccggcctcatctatatttcttaaaaacaagggcatctcttatgtaactacaatacaattatcaaatcctggaaatttaacattgatataataccatcttctaatttctattcacattcaaattttgccagttgtcccagtaatgacctcatggccattgtttcccatcccagtatgacattacagttagctgtcatgcctctttaatctcttacctgaaacagttcctgtctttgtctttcacaacattgatgtctttgaagagtaagggccagtagttttgcgaatgtccttcagcttgggtttgtctgtttcctcagaactgagttcaggtgatgtgttattgaagtgatgtcgagtctttggcacgcatctcaccaggaagtgtgcgatcttgctttgtcccctggcgatgcgagctgtggggatttgactagggtggcatctaccaggtgtcttcactttctcctttgtgctgaataagtcatccaggggaggcatttggagatcatgtagatatcctgtccctataacattgtcacttgtggttttagaaaatcatgctttgatggttctccccagattcagtcgctgttaggatggcagccacatgctggctttctaaggccaacatcccttccacgtctgtctgtggttgctggttttgatgcctgtttagagcagacagatctcagcgcagtggggagtgctgaaatgggttcccttccaaaagggaaacccccagaggggcagtccttgggagaaacaatttagcagcaagtactgtgaaattaaccctgcac

SEQ ID NO: 16648 - DNA, 2300 bp, Homo sapien
cagagaacgcgagggaaccttaggaaggatatcacctagtccttgttttataaatgagcaaactggggctcagagaggttcagagtttcatccaaggtcacgtaaggaaatccagctgcagccctgggtggtggctgcaatcgaagggcttggaagcctggcggcctgcacatcaccacagctccagcccacctcaggtgctgggtgttctagaagttacctaactgcaccttgccagtttcctcacctgtacactgaggcaatgatcgcatctatcatggcaagctgtgggaggttaaaacagaacagacacaccatgcttcaggcgtgctggagttgtctagtctgtccactggtgctgtttcctctaccccacctccctcagattctcccatttcatcgtcactgtggggaaaggagacaggatgagcccagcgaaagcagacggaaagcccaggcctgcagatgggcaggctggccaagaacacacccctgggaccagccctctgattatttctctagatgagtcaacctacaagcacggaggttaagtggctgcccgtggccacggccacacacacccagtggcagagacaaaagggggttggagggagaggacccaatcgcacgacttcaacattaggcctggccctgagtgacagctctggagtgagctgtctgcatcggtcagggttctccagagaaacagaaccaacaggatatatagagatgtattgcgaggcattgacccacacgatacggagtcgaagcagtcccaccatttgctgtgtgagtgctgggggcccacgtggtggcgttctagtccaaactcgaaggcctgagaactgggagaaccaatgttatgagtcctggtccaagtctgaaggccagagacccaggagttgtgatgtcccagctcaaggggagagagcgaattcaccttcctctgcttgcttgttgtttgcaggccctcagtggattggatggtgcctgcctgcactggggagcgccatcttcttactcagccccataattagatgctaatccctcccagagacaccccacatgggagagtagcctgtggttctgaaccctgcaactgctagggatgcagggagggagtcacagggtgggggtcacagggctggccacggtcctctactgtccctggccccaggtccctggacttcaaagctgttgtgctcctggctcaacggctatagtgcccatgctggtgaggttccaggtgtgtgtgcgagtgtgcacgcacacatgcttttagtgttaccatcttctctccccatccagagtcaacagagtgcctgagtgccatgtggccttactatgctaccctgggggaaacggagagagaactgccgagcccacacagggcaggagcactgtccctctccatggtggaagacgcaggctctagcggtccaatgcctcgcccaggtccaacagccgggcggcccagggaaagcactgatgctgctcatgccctccccacgcccttcaacatggggctgcccagaccccacagcaccctcgagggccagggcagctaaagctctgaccagggaagggtgttctctgccctcccacacatcctgggggcccagaaaggcaaggatttggagccccaatagcggccagaggacaaaatgctcacacatccaagcagcctgccctcccaccctttacaacacccgcaacccgtggcctccgtggtctcctccagcacacaggctggaaaacaggaggaaccaggggaggtcacctcccctcctaaacctgcctccagccctgtgaacaggggcgggggtgacaattcagtggctcagtgagaggatccaggtgggaacccagtgaacacagggcctcccaaaggaggagtgaggggctctctccgcaaacaaagggcccctggccaccccaacacataaacacacacacacacacacacacagccaactacacacacaggaaccagaaatacttctttattcaagcccaaacgtgcagcagccgcctcccaaccacagcaggctcctccttccctccagccccagtttcaccccgcacaacccatgttctccccacaacgctcctcagatagggcactcccccagcaggggtacagcttggctccgggacctcggtcccgccgaggctggcttcagtttctgaatttgcccaccagtggcttcgagggccaagcccccaggccctgctggtccaggaggagagacagctgcctgcgagcctcctggtagggcccagcctagggcgggagatga

SEQ ID NO: 16649 - DNA, 2300 bp, Homo sapien
gacaaataagaaacagctgagagaggtggggagacagctggggtaggaggaggaatcatgagctggaaagacaattctgaagactcttctaagagcaccattggagcagctgtggggtctgaggaacacgggagtcagtggaaggagggaaggaaacttctccattactggcaggtgctctgggatctctttgagtggctctgtgtggacactggaccatgctgggccacagcctttattggggttacacttacagtcttatggagacagatcagagtgcagctgccatggctgaggtagcaggtccaggggttcatcctccccgttgtcactgccccaggccaggcccctcaatcatttctgcagagccctaaggcttcaagcaataccatttgaaaaccgcaataccagatggacctccattcagtcagttctcttctctgcttggattcgttcccattgccaaggccacagagagcccacctaggtcagcagcacctgtcatccccttgcaggcagctgtggaaggctcaccctctaatctccctcactcctggatcctcccatcaaaactcaagcgtctgttaagtgatggttctttttttttttttttttttttgagacagagtctcactttgtcacccaggctggagtgtagtggcgcgacctcagctcactgcaacctccgcctcccggattcaagcaattctcctgcctcagcctcccgagtagctgggattacaggcacccgccaccatgcccagctaatttttgtatttttagtagagacagggtttcagtacgttggccaggctggtctcaaactcctgaccttgtgatctgcccgcctccgcctccaaagttctgggatgacagctgtgagccaccacacccggcctaagtgatggttctaaccagcaagatgaccttgagcaagcctcttctcagggcctcaactatcaaatgcagtgaagataacacattcagaagccaagagcctgggctgcaaaacctcttaagaaagtgaagaacagtcaacgtgtagtgagcaactacaagatgctggttttacaattgcagccatcgctggtttcactgtcctcatttgactgagaaacccaaggcccagagaggggaagtgactgaccaagaacacacagccaggcagtgcagagtccaagttcacacccaggccctggactgatgcctcttccttttcacccacccaaccatccaaccagcacaggagcttgcacttatggttctgaccttccctgaaccctctctcattcccatgttttagagacaagacaattgaggctcagaagcactaactcacctggccaaggtcacccagcctttcacataggagccaggatccaggcatgtgtgtgaattccaagctcggagctcttcctattgctgttctgtaacacagcccccctgactcccacccagcgctcagagcctgggcttctgtctgaacctgtcccaggcctgggctgcttaaaagcagcaaaaagttcctcctgcagcttcaacttgagcctgtcaccatcatcagcataccccgagagactctggggtgcctgggacaggtagctgcagatgcctccggccccaagttgccctctgctcctcccgagttgtgctcctccatgccagaggagggaggacagctccccttgcctcctaggcggttggcagagtggcagcggctgctgcttcttcctgctgctggctgatggagagattatttctaagcccttcccattccacacccccccacactggctgtccccgtgggacttgaagtgcagagtccgctgctcaaccaggacagctgccctggctccctcccagcaagaacccccagaccctcatctctcataaggaaagggacttctgggtcctttaaaaaaaaaaaaaaatcccacctcaatcccccagggctctcctgcagctgctggagagagagatgcagaatgaatgaacttctggtttctggaggaggcacgggaagaaagattggaaactgactctgctagaaactgctgttttggggatttttttcttccccttcatctccaccagaaacctgtcccttccctgggcaccaagagatgggctccccttgcctggcagagaaacagctggaaactggctccctgagacaagaaggtgagttaaactggaggggaagagttactgcttgctgtagggtgggcgggggccagggggaagttgacgctgttagacatccttggcaaaagtgctggtttgagtgaattcctttcccg

SEQ ID NO: 16650 - DNA, 2300 bp, Homo sapien
gccctgcagggaggggcattgagactgcgtcccataaagctgaaagaagagggagtggagcacgctggaccatgcccccataagggctcagccagtagtttctggatgaagaaatgaaggaatattctagaatctagggcaaggtaatgatcagggctgggcctagcgggaggcaaaggaggcatctagggtctaaaatgtaaaaagactctcacgcttgggctcctgggtttacaggactctgatggtgaacttaaattttgcattgctcactgggcaagtgtcttaacctctctgtgcatgggatcctagacagcacctgcttataaggctaatatgagacctaaaagcattaaaatgcaggaagtgcttcaaacattgccgaacacacagactgtatggcttttaaggttttttttttttgatacagggtcttgctctgtgacccaggctggagtacagtggcgccatcacagctcactgcagcctcaacctcccacgcttaggtgatcctcccatctcagtctcccaattagctgggactacaggtgtgcatcagcacgccgggctactttttttattttgtattttttgtagagatgaggtctcactatgttgcccagactggtcttgaactcctgggctcaaggcatcctctgcctccctaagtgctaggattacaagtgtgagccaccgtacccgacctacacagactatatgtgtttgccactattgtcattcactaaaaggccaagaggggttgatgatacctgcccagggcattctgaaggctgtgctggccaggaggtggggggtgagggtccccagggagggaggaaccaatctttctggagcactcactctgtgcaagtgctgggcacagctggcaccctctcctgtagccccacatcgatctcaagaggcagagactttcacatgcccatttcacagatgagagaactgaggaccatgagcaagaggctttccagcatctcgcagaggctgaactgggatcaggcaggtgcgtcaagcctagtgcttgggtcccttctgcttcgcctaggggggtgccacagggtctgacctacctgggttccagcctcctctctgctgctgttgcatgacctcaggcagccccctctgtttcctcatctgtaaagcgggcatcaaaacagtgtctgttttggggccgggtgtggtggctcacacacctgtaataccagcactttgggaggctgaggcgggcagatcacttaaggtcaggagtttgagaccagcctggccagcatggtgaaacccagtctccactaaaaatacaaaaattagccaggcatggtggcacatgcctgttatcccagctacttggaaggccgagacaggagaatcgcttgaacccgggaggcagaggttgtagtgatctgtgatcacaccactgcactccagcgtgggtgacagagcaagacccgtctcgaaaaacaaaacaaaacaaaaaaccagtatctgtcttggaagtgctgagaacagacaagggaatatgaagtttgtgaaatgttgagcccgctgtgctacattcctgtaaaacacacacgtgcacatgcacacccacgtgcacacacgcatacacataaatgcacatgtgcagatacaccggctgacagtgacagcacacttatgtgtgtgaaatgctttatgtgctcaatttcttttaaatctcacaggaaacacacgctatgaggaactacccacatgcccacatcaggcaggaggaccccggcgggtgcaagggtggaagtcgtctcttcatggctgcacccttggccagtgccagtccagcagcctctttcaaagaagcttttataggcagatagtttgtcagcccagctcgaaatgtgaacaaggtagcagccgagcccccacccatccggctgcactcccctgcatgtccagccccgagccctgtgtcaagcacacctccttgggaggagaccgccccagcctgcaaggaagtgctcattatggagagtggagagtgacaggccactcccggccacgtctccaagcaagccggtgccccctcctcctgctgccaccgcccactgagctgcctgggctgcagacgccctggttggagcgtctggggccagatgttatagggcaagctaaaaataaccgggcaggccagccaccatcgaggaaggggcatgtgctggacgcggacacatgatccgagggaccctgctgggtggaactaagaaagtccagcagactgtgcacgctcctgtccccactcacaggcccac

SEQ ID NO: 16651 - DNA, 2300 bp, Homo sapien
gaggttggctgcgggatgtctcctccttgttcctctacaacactcttttttttttgtttgtttgacatgaagtcttgctctactgcccaggctggagtgcagtggcacaatcttggctccctgcaacctccaccttccgggttcaagcgattctcctgcctcagcctccgaagtagctgggattacaggcgcatgccagcacacctggctaatttttctatttttactagtgacagggtttccccatgttggccaggctggactcgaactcctgacctcaggtgatccgcccaccttggcctctcaaagtgctgggattagaggtgtgagccaccttgcccagcctcctctacaccactctccacccttctttggattctctgcccaggaggctgcatccttggcgctctgttgctttctggcttttgatctaagcagttgccctctgcagaagttatcagtgccccagagctccccctccaggtaactcctctctcgtctggcccttcaggccttgggtgggaccaaagccacttctcactctttgctagtcttcgttaatgacacaagcacttctggtttctctacgtcttccccacagctttgtaaaaagtctgtttctcaaactctcctcaaattactatttcctactgggaccctgactcctacgggtaggtagtgacatccccattttatggatgagtaaactgaggtggagagaggtgaagaaaattgcccaaggtcggaaaggaacattcctgggattcaaatctggactcactcacatcagaggtttgctgttaccattattcctgcacctttgttgaaactggggagtggggccaggctgataccgtagcctttgtttccttgaaagaggaagatgcaggagatacaagaaggggcactggaactgccctgcaggttttcgtggcctggagtcaaccctcgggagcaattgaggtaggtggcaaatatttgctcaaaaggggtggctgaatttcgtggacaaatgcagagggcacctcctgtagcccgtgagtaacttccctgtagagatgaggaagccagcggaaaggcgggtggcacggacttccccagagctccccctctgctaagtggtgggtctagttacggatctagtcctacctgaagccaaagaaagccctggaacttcaaagcacccacttggctgctggcaactgtctacactgcgtatggactcacatactttgggagccatttgagcccagcaccttctgatgatgaagaggaggaggatggtgtcatggggacaccagcacattctctactccaagccctgctcgagaccttcctgtacagcactgtccgctggggcctctccatgtcactgtgaaggaggcgctatcgtggtggccattctgcagagcagtaaaccaaggcgctaaaaatataagaaacctgctcaggtcccacgacgagcaagagcggcgctcatcctgcagacgaggacaggggccctgaccatccgagaccatgcaggcgccaaaggcagcagggctctcagtcgctcctgttcctggactcactcccagggccctggaggtgggggtcttagccttctgctgctccccgctcaatgacaggctaggttgccgaggctcagaaaggccacgtgacccgtccagagtgcacagccgcaggtgtgagtctgactgagctccagccacctcgctcccggcgccttagagccgcccaccctgggttcctcaagaggatcacctggggctcgttaaaaacccagctcccggcggctccaaaccgtgactgggcagggaggggtctgggaatccggattttaaaccagcatttgctcctccacctcccccactccaggtgattcttaggatctgtaagtttgggaaacagcccaagccctgaggcgacgcagcctctccctgggcctttcatggccagccggcgctgtccccagagcccctggggtcccaggcgagctcgcggggcggggccgggtgagccggcacctccctgtgcgcagccccgccccaggggcggggcctcacctgccgcgggcaggtagacagctacctggtaaccgggtccggcccaggaggcttgggcgcgcgcagccatcccgggcctcgccggggacctagggacgcaggcaacgcctgcgcccgctcaccatggtcgagggacgcgtctccgagttcctgaagaaactcggcttctcgggcgggggccgccagtaccaggcgctggagaaggacgaagaggaagccttggtgagtccccgc

SEQ ID NO: 16652 - DNA, 2300 bp, Homo sapien
gattgctctagctagaacttacagtattctgttgaatagtagtggtaaaagtgggtatcctacgggaaaagctttcagtttttcatcattcaatatgacactagccctgggtctgtcatatatggcttttattacattgagacatgttccttctatacctagtttttttagggtttttattatgaagagatgttgaattctgtcacgttttttcagcattaattgaaatgatcatatggtttttgtctttcattctgttgatgtgtcacattaatttgtgtatggtgaaccatccttgcacccttgggataaattccttttggtcatgatgaattttcattttaatgtgttattgcattcaatttgcttgtattttgctgaggatttttgcatcaatagtcatcagtgatattggccagtagttttcttttttaaatgtgtctttgtctggttttggtatcagggtaatactggcctcgtagaatgaaagtattccctactcatctgttttttggaattatttagtaggattggtatcgcttcttcgagtgtttggtagaattcagcagtgaagccactgggtcctgggcttttcctaaccggaagactttttattatggctttgatcttattacttgttattggtctattcagcttttggatttcttcatggttccatcttggtaggttctgtgtgtctaggaatttatccatttcttctatattttccaatttattggcatatagttgctcctggtagccactaatggccctttgactttctgtgatataatttgtgaagtttcctttttcatttctgtttgtatttatttggttcttctctctttttttcttagcctggctaaaggtttgtcagttttgtttacctttaaaaaaaaatactcttgtttcttaagacaggcctatttaaaaaaatgtctgatatgtggtaaatacacaacataaaatttaccatcttaaccttgttattttttccaagacatggtctcattctgttgcccaggctcgagtccagtgctgcaatcaagggccagtgcagcctccacctcctgggcttaagcaatcgtcctgcctcagcctcctgagtagctgagactacaggagtctgccaccacaatgggctaatttttaaaatttttttgtagagccaagatcatgctatattgcccagactagccttgaactcctgggttcaagcaatctccccacctcaacctcctgaagttttgggattacaggtatgagtcactgtgcctggccttaaccattttgaagtgtacattgtagttgcattaagtatagtcacactgttgcacaaccatcgccattctctatctccagaattctttttttttttcttgagatggagtttccttcttgttgcccaggctggagtgcaatggcgcgatctcagctcactgcaacctccgcctcccagcttcaagcgattctcctgcctcagcctcctgagtggctgggattacaggcacatgccaccacgcccggctaattcttgtatttttagtagagacgggcttttgccatgttgacaaggctgctctcgaactcccgacctcaggtgatctgcctgccttggcctcccaaagcgctgggattacaagcctgagccaccaagccctaccagtttattataaaggcaaaggataccgatgaagagacgcatagggcaggtaatgggggaaggggcgcagggcttccatgcccaatgctgctatgaacatggttgttcaaacatctccctggatgccactctccaggaatatccccacgttcaggtacgtgaaaactcactgaatcctatctttgggtttttagggaagcttcatgacatcattccttcccccagattatagggtgggaccctctcatgggagggtcttaagacccacagtcagcaaagcgggttacattagcatctccagtattcttttcatcttgtaaaactgaatctgtctccattaaacactcactccccattccctctccctccagcctctgacacccaccattctactttctgtctctatgaatttgactagtctatgtaattcatatgtggaatcaacagaatttgtctttttgtgactggtttatttcacttaacttcatcctcaaggttcaacttaaaggtgtatccatgttgtagcacgtgtcagcattttctttcgttctcaggctaaatagtatttcattgtgtgtgtacaccatgtttcatgcattcattcatcccttgaaagattggtgggttgtttcctcct

SEQ ID NO: 16653 - DNA, 2300 bp, Homo sapien
caacttaaaggtgtatccatgttgtagcacgtgtcagcattttctttcgttctcaggctaaatagtatttcattgtgtgtgtacaccatgtttcatgcattcattcatcccttgaaagattggtgggttgtttcctcctttttgcttttgtgaacagtgctacgaacatggttgtacaaacatctcttggagccccactagcagttcctttgggtatataccccaaagtggaattgctggatctggtagctccctttttaattttttgaggaatcgccacacagtttccataacagctgcaccattttacattcccaagaccttttttttttttttttttttaagaagaaaagatgtgtttctgcatttctggaagtctatgctgcatttccatttgttgaaatttaagaccagagtcgtcttttctgctgtaattataatggtcactggcttgtgccttttcctcctctctctgccccatctgcacggggtctttgaacaagtcccagcaccttggtggacaagcctgtgtccctggcccatcatggaagccgctgcctttcagagtgggagtctgtaccctgttgcctcattccttgctgcgcccatgagtgagcttgtgcctgacctctccttccaggtggacttacacactgggctgtcggagttctcggtgacgcagcgccggctggcccatggctggaatgagtttgttgctgacaacagcgaacctgtgtggaagaaatacctggatcaggtaggaccagaggtgtcattctttgcattaacatgcataagccagcgagggtggggcagccattccatctttcaatgttgatggaaggcatccttggacagctcccgcccctttcacgctgccccagccagcctgagcatcagtcatgagcaaatcaccaactcccaggcaaccgcgatcaggaaaaacagtgatcactttcgtagacagttgagcaggccccgggccccacgctatatgagtaagtgaataagtaagcatgcgcttactaatcctcctcctaatcccgcctttgcacatgaggaaggagaagtgcagaggttgaaagatttccccagagttgccaggtttagcaaataacaatataggatgccctgttaaatttcaatttcaggctgggcgtggtggctcgtgcctgtaatccaagcactttgggcggctgaagcgggtggatcacttgagcccaggagttcaagaccagcccggccaacatggcgaaaccccgtctcttctaaaaatataaaaattagccggatgtggtagtggatgcctgtaatcccagctactgaggaggctgaggtgggaggattgttggaacccaggaggtggaggctgcagtgaactgagattgtgccactgtgctccagcctggacaacagagtgagaccttgtctccacaacaacaacaaaaccaaagtgaatttcagatagataaacaagaagcaatttctagtataagtgtgtcccaatacagtggacgtgcttatactaaaaacaaaaagttccttgtttttctgaaatttagattttactgggtgtcctactgtaacctgagcccaaagtcacatagctgtgaggagcagtgcagagcagtgcagccagggagctgcacccagagccccttcccttgctagctgctgccatcggtgctggcgcggtgctgaatgaatggcacacaatcaaatgcctggaagccactaagaaggggaaagaaaaaactgcaattgacatggctccaagttccattctagaagtcggcagtccctgccacctttgcaggaccagttcagaaaggctcagtgaacaggcagaattttccaggtgcctgagggcatttagatggccttagatccccttttccagccttttgcatgctcttggccccatccctgacatccccttcttcattctctggcccctgggctgccccaggcttcaaccgccttcctattggctctgtgtttacagcttcctccattggtcgattccggaaccaatcacagtcccctgggcagcatcctctgtctccactctccttgaggtcccctccctgatcaaggctcagttctcagtgttctgggaatgttattcatcgatgcgttttggcagcaaaataggcttctgggtatgtaggtggttctggctagcccagaagcttcctaaaactgcagggctgagaagaggcagtggaggctcccggaagttggggttcagggaaggaggccgagacatgggctgtgagggaggagctcccctctgcggc

SEQ ID NO: 16654 - DNA, 2300 bp, Homo sapien
acatggtgaaacctcatctctactaaaaatataaaaattagctgggcatggtggtgcacacctgtaatcccagctactcgggaggctgaggcaggagaattgcttgaacccaggaggcggaggttacagtgagccgagatcgtaccattgcactccagcctgggtgacagagcaagactccgtctcaaaaaaacaaacagaaatcatgacatcgtattatttttcttccattcacagaagagaattctctctgcaatgtctgtaatagtgaatggagctcatttcccgttttaaaatagtgctgagtctgccccattcaacaactcctcgccgcccagaagggaaggtgccggcctgaccgcctggcaggaatgacacccatgtgtcaccttgcttccgccaccagccgtccctgcagcctagagaggagagaggttccagcacccagaagagatttccttgatgtgttataattttcctttttcctggggcctggcttaagattttggaatacagaacaaacactggctggcatgtaggaagtgctgcctgtgtgacaggcatggggcaagcactttgtggttcttacctgtctcacctgctctaaatggcactgaggccaggccagtggttcccgggcttttcttccattattgctcctggattagggtcttggggttactgaaataaaacaccactggctggtgatttagtgtaaccaaaacacactgaaacacagctctgtggccagaagttgaaatcaaggtgtgagcagggccaggctccgtctcccagtttctgggtgttactggcagccccgggcgttccttgactcgcagacgcatccctgccttggtctctcacaccaagctctgtctctgtcacgaggtgctccccgccacgcctctgcgcagcgttttcctcttttttttttttttttgagacggagtctcgctctgttgcccaggctggagtgcactggcttgatctccgctcactgcaacctccgcctcccaggttcaagcgattctcctgcctcagcctcccaagtagctgggactacaggcgcctgccaccacgcctggctaactttttgtatttttagtagagacagggtttcaccatgttagtcaggatggtcttgatctcctcaccccgtgatccacccgcctcggctgcccaaagtcctgggattacaggcatgagccaccatgcccggccttcctcctcttatatccagtcatgttggcttagggccaaccctaatagcctcaaattgacgatatctgcaaaggcgctattccaaatcaggtcacattcagaggttccgaggttaggacttcaacatatcttttgtggggtacaattcaaccccactaaggagatggtttaggcatttcttccctaatcaccccactccctccccatgaaatttaatatggtagatacactgtattgtacgcatatctgcactttctacgtaaaaggagtagttttttgtgcccctgctgcaccgcattttcaccccctgtgggacagtgggatgcatgggtcatgactggtttacacctggggaaactgagattctgagttgtcacatcactgatccaaaagccaccaaagagcaacaaagggccaggctggcaaggaccccaggctgtggacggggggctggcaaggaccccatgttctggacgcagggctgtctcactgactcagggggttccgtctgagaaattgctacaccttcaagtctgaaacattcctcccggcagaaacactgcaggtttgtttctaagcagatttcagatagaagctgttgcaaagaccgtcttgtctgcccttcagccaagagaagagacttttttttttttttctaggtgggacattccaagagaaatggccttttttctatgtgctaaatgcttggatttcttatctgccagaggtggtttgaacaatgaataatttaaatggactgagctttgtatagagattggcttcggatgactcactaaaaatgtgtcattttattatgctagatggacttaagtgatattaaaaattcatatataagaaaaaaagagattccattcagttcagagcagaagtggatggcggtgaaatgcagtctgaagactgaggtgagacctttcaatcttcaacctcttctctctttctgcccgggcccccacccagagataaagcaaaatgcagacttcaaggataatttgaaagttcctggctgcttctgtgacgttccaaatacatggaaaaacttaatcaccatcatacctttg

SEQ ID NO: 16655 - DNA, 2300 bp, Homo sapien
actaaagagcttctgcacagcaaaagaaactaccatcagagtgaacaggcaacctacaacatgggagaaaattttcacaacctactcatctgacaaagggctaatatccagaatctacaatgaactcaaacaaatttacaagaaaaaaacaaacaaccccatcaaaaagtgggcgaaggacatgaacagacacttctcaaaagaagacatttatgcagccaaaaaacacatgaaaaaatgctcatcatcactggccatcagagaaatgcaaatcaaaaccactatgagatatcatctcacaccagttagaatggcaatcattaaaaagtcaggaaacaacaggtgctggagaggatgtggagaaataggaacacttttacactgttggtgggactgtaaactagttcaaccattgtggaagtcagtgtggcgattcctcagggatctagaactagaaataccatttgacccagccatcccattactgggtatatacccaaaggactataaatcatgctgctataaagacacatgcacacgtatgtttattgcggcactattcacaatagcaaagacttggaaccaacccaaatgtccaacaatgatagactggattaagaaaatgtggcacatatacaccatggaatactatgcagccataaaaaatgatgagttcatgtcctttgtagggacatggatgaaattggaaaccatcattctcagtaaactattgcaagaacaaaaaaccaaacaccacatattctcactcataggtgggaattgaacaatgagatcacatggacacaggaaggggaatatcacactctggggactgtggtggggtcgggggagggggggagggatagcatcgggagatatacctaatgctagatgacacgttagtgggtgcagcgcaccagcatggcacatgtatacatatgtaactaacctgcacaatgtgcacatgtaccctaaaacttagagtataataaaaaaaaaaaaatttaaataaaaaaaaagtcataatatcagctctatagttcttttcaaaatattttagtaaaatctggcggtgggggcacccacggtgcgtaattgtttttctacattagtgaccccaggtcaaggtttaaaagggcttccgcgaagagccttctaaagacagaagcaggcgatgtccttcagcctccccatccctccctccttaccgtcctccggacctcatttttaggccgaactggttttgctgcgtctctctctcctctttggtaaatcgcggagatgcacggcgcacttcgggagtctgggcagggatggggccccctgggctcggccggagagtaattcatggtctgattggaggcatcaggtgtacccttggcacagaagggcgaacatggctcaaggatcagttcccagtggccgaggggcacctgttagaacaccaccgtctcctacaaatgtgtccccaagaatgccagcaaggggaaccagcaggggcccaagtataacatcaatctgggcgagtcaccactgccccttgcagcaaccgatgcactggtccagccctcacgcaggcccgctccgtgagtaaatggctctcttctcttgcaggaatgcagtggaggaaggcaagggtattttttacaacatcaaaaactttgtccgattccagctgagcacgtaagtagaggccagcattccgagtgtcattaagcaccacgcctggcgggcggccgctgactggctgcgtgtgccccgcaggagcatctccgccctgagtctcatcactctgtccaccgtgttcaacctgcccagccccctcaacgccatgcagatcctatggatcaacatcatcatggatgggccaccggcgcagaggtgaggcagggccggctgggagccctgtgtctctttacccacctgcggggcttcctccaggggctgctggctgtgccccaaggctatagggatgaacaaatacagccactttccatcaggagttcccagaaaactgaagtgtgttgcactgcagtgagactgggagtagaaggcagaggagaaagtacctgggccggcagagctgggtgaggatggaactttctgctccctctgcctggatgctctctctgggcaacctgcatggctcattctcatgcttcattccagtcaccagtcactgccttcaggaagtcttccctgattgcactcccactcaatcccctcaccctgctgtatttttccctagagaggaagatacacacagacacacttttccttatggatctgattgtgatctg

SEQ ID NO: 16656 - DNA, 2300 bp, Homo sapien
agagtcaagcaatcctcccacctcagcctcccgagtagctgggactacagatgcacaccaccactcccagctaaatttcgtgttttttgtagaggtggtttcgccatgttgcccaggttggtctcaaacccctgagctcaagcaatccacccaccacagcctcccaaagtgctgggattccaggcatgaaccaccgttccaggcctcttactgacctcttttatccagtagttctccccgcttgagcatgcatcagatttgcctagagagcttcttaaaatgcatattgcaggtctgcattcctgcttctgatgatgtaggtgaggatgggattaactcttgacaaccttatccatttcttttaccattggattgttttaaatctctgctggaagtcttcaaattactttatgtaatattgaccccaaagtattgaaactcttttgtagttatgttttttttccttttcttgtgttttcattttcctagattggattcagttactaattttgcttttatattattcctgcttttcttcagtttttttttttcagttttttgagttattttactaaataaaaaataatggaagtagatgaatacataaagctattacttttttcttgggccctgagttattttgcagtattgtatagataggtgtgtgttgatcataagcttctagattttctgtggccttcattttgattttctcttgtacccaagagtttttaaattttgctgtgctagagaatttcccctagtcctgtcactcgtctttaaattagattgcatagtgattagagatgtcatctgtattattatttttttaagacagagcctcacttcattgcccaggctggagtgccatggtgtgatctcagctcactgctacctctgcctcccaggttcaagcgattctcctgcctcagcctcccgagtagcctgggattacaggcgcccaccaccatgcccagctaatttttgtatttttagtagagatggggtttcgctatgttgcccaggctggtctcaaactccttacctcaagtgatccaaccgcctcggcctcccaaagttctgggattacaggtctgagccaccatgcccgaccaagaagtcatctatattagatctactctttggaatcactgaggttttgtgtcctttcatgtggtaagttaatataatgaattttctgtatcctttgcctgaatttcccatactgtttcctctttaaatttgaatgttgtgttggtacatagtctggcctatggatttttcagtggtgattatatcttgttaaatttccttcttggtctcctttaatgcttttggcctttcttttaatcttgtctgattagactgtgtcaccttggtcttgtgtgttgtttgtctttacctggtgtatttttgccctatgagtatatcttatcttcttacacactttgaaataattttagattcatatagacttccaaaaattgtacaggagtttctgtcactccatgagtgagtggataaagaaattgtggtacatccatgcagtggaatactagtcagccatgaagaagaacacacataaaacaacttgaagggaccttacaggtattatgcttagtgacaaaagccagtcttaaaaggttctataccatgattccatttatgtaacagtattgaaggaacaacattatggtgatgaagaagggattagaggttgctgggattaggagggtgttactataaaaagtaaggaggagtttttcaggggcgatggaagttttgcctcctcattgtagcagtggttacctgaattgatgtgtgtcatacaatttcatagaacttgtgttgtggggggcaggaaaccactctcagacccagtgattggctagaaagactcaggactcagaaactgttgagctcagagggagagggtgaccagtctctgcagttgcagccctggggctgttctaatctgtatcttttcctggtaatagacatggctgtgagcatgacaggtgtcagtgagctctgtgtgcctcatcaacgaatcatccaacctgaaggtggttgtgggaaactcttggacctgcagtcagtatcagaaggcctgggcagacttggccagccacctggagcactgtgcccttaaactcaggtttgcctaacatcagatactatgtaaaaaccagtgaaattgaaataggtctgctgataacaatatcataccaagcttgttagaacaagtttatctgtgtcttaaaaaaaaacaaaaacaaaaaaaccctgggattttgatg

SEQ ID NO: 16657 - DNA, 2300 bp, Homo sapien
gctactcgggaggctgaggcaggagaattgcttgaacctgggaggtggaggctgcagtgagccgagattgcgccattgcactccagcctgggcaacaagagtgaaactccatcaaaaacagaaactttccaaccaggcaggtgggcagattggagtgtaggctgtttctggagggtatggccacgaggtggcgccacttcggtagctctcaaacggcgccgctccgcatttgcttctgtggttttctgggggattttgtttcaccgttttaataacaagatctcactttcctgcccaggctggagtgcagtggtgcaatcacggctcactgcagtctcgccctctgaggctcaagcgatcctcctgcctcggctccctgagtagctgggactacgggtgtgccataccacgcccggccaagcttttcattttttgtagagatggagtctcactatgttgcccaggctgacacatcggctccggtttgctcctgcggaccccccagtacctgcacctgagaggccaccattgctgtccacccttggtgtgcctcagcctacaaaaaactgttgctatgtcaaaaatgccactacctcggatggcactgaaaaagacacacctggttgatgtgtgcaggaagtacaggggtgtgaaggctggaaacagggtctagtccttcatgtctaaaggcccgtgtgtcttgggcatcaggagccctggctgcaggtgacaggcacctactctaagaagccgaggtgaagagctggggctactcgtgtcattggcatccacagctgggggtaccctggctgtagatgcgttagtttgtggagctgcttctcctgggacattggccttggatctcagagcaatgtcttggtgaggggccctaccttgtgcactgtcaccagccaggcctgctgccctcaggcagaaagccttctatttttgttccagcttaaagaataagaggtgaccagccgggtgcagtggctaacccctacaattctagcactgtgggaggccgaggcaggcagatcacctgaggtcaggagttcgagaccaactcaagcggacgttggcgggcgaagtcacggttttccaggctggaaaaccagcaggccgtgcaggggagagaactggtaccatggacatgcgggagctgaatctgcaggaaggtggaccccagggaggatgcgtggggtggagagagtagggagaagtcgagaaactccagggcagaagccagaagggcccagggaagaccaccagggacagcgagcgagccagggccaggaatgggcgccggggtgcccaagagagaggtctgatgagagcacgatcaccaagcgccaaatgctgcctgcgaggacccaaagcgcacctcggatgtagtgagcaggcccccgggaccaggtttcggtgggtttgagaaggaacgagctgaagaagtggggtgacaggttcagacgtcttggagtgaacgggaaccggctgaagaggcgcacgtggggtggagggagtctgtttagccaggctgtggagctggcgcctgatggctgccgggaaggacctggtgccagggaagagcgaggcaggggcagctggcagagggaggcccgaggggaggcggacccgaggctctaggccaggaccagcaggccggggagtcaggggagagttgcctggggcccaggaggctgcactgcagaggcctctgcatgggctccacatgggccactctcctcccccgggtgtcttcacccccaagctcagcctctcccccaggatctcccacaccctggctactccgctccagcgcccagcccagacaccccttctccccaggtaccactgctggcctggcctggcctgagtcattggccgccctctccaggcgcctccttggtacgcacgcagccgggccggattcccgggcctgcagccgctcctcccgcagaccgcggccccgccccgagccgcacccaccgggttcggctcactccctgtgaggcgcgtcaccattggctgactcctctcttgggttccgccccacacctccgcttccacgattggaccaaatgactgcccctcagcaatgttgcctggcaacagggaaggggcggctctcgagaggagcccgtgggctgctggaccggaccggacagcaccaggaagcccggcagggtaggtacctgggctgaggttcgcagtgagctgacccagaggcgcaggcccagctgagtcgggggactggagcagacgggtccagagtaggcctgggccctgcccctccctgg

SEQ ID NO: 16658 - DNA, 2300 bp, Homo sapien
ggccaaatattattttgtaagtggatgtagtacaacatatgtaagtctgtgatacccattttgtgtgtgtgcacacctctgtatggtggtgtgtgtgcatgcctgtgtgtgggagtggatgtgtgtgtgcctgtgtgtatatatgtgtatgtgtgtgcactactgtgtatgagggtggatgtgtgtgcatgcatgtgtatatgtgtgtacgcatgcttggatgtgcatgtgtgtgcatacctgtgtgcacctgtgtgtgcatgcatgtatctgtgtgtatgcatgcatgtgtctgtgtgtgcatgcgtctgtgtgtatgcatgcctgcatgtgtatgtgtgtgtgcatacctgtgtttctatgcacctgtgtgtgtatacgtttgtgtggacatatccctgtgtgtctgtgtgtgtatgtctgcacatgcctgtatgtgcatgtgcatgtatgtgtgtgagagggtgtgtgcatgcctgtgtgtgtgcacctgtgtgggtacattcctgtgtgtgtgtgtgcacacttgtgtgggtgcatgcctgtgtgtgtgtgtatgcctgcgtgtgtgtgtgttggtgtgtgcatatctgtgtttgtgtgcgtgcatgcctgtgtgtgtctgttcctccacctggtgagttccctggcgtggagtgaatcctgtgatctgctggctacttcacttcctttgtcctcagttttctcatctgaaaaatgtgtatgataatatctcatggaattgtgaaaattcaataagataccatgtataataattgcctggcgtatatgaagtgttacgtagatagtatttacttatttatccaacttttgctgaaaaatggaaacagcctggtatttactggcaatgaacatctttgagtatgtatgttgttattttttaaaaattctgttatttctttgggaaaaatccccaaacatggatgtggctgaggaataagaaatgctgggcacagttttgatggggcagaagttgaagatctgaacctggatttaatctctagcttgtcaactgatcaataagcttgggctatttggagctccgggttaagggagattctgaggttaagcctggactcggtggggaaagtgccatgattaatttgtgatgtctcctgtggacaccggagagaggagagtatgtttcccacttgctttccatgcctggtctagatgaagccgtagttagaaattaggcaaggtgcgtttggggcttctgtaaatctctgtggtcaggaaagccgagcctgagactccaggcagttgcccaaatgctgaagaggtcaggggccctgtcggggtcacagatccaggcataggaacagccgcctctatttggttttggccaaaacactcacagcgtgcttctaggacatcacagtgtgcttctaggacaccatgccttccatcttcattagatggttaccctgtgtccacccgaaatacagccgtgtgcctctgtcttggcttttgttcctcaagtacagcagggtcgcgtcactcctgagctacgagggtttgacacaggtgcctttgttcctgaatctgtcaaacccgagcccgtgccattttgatctgttagtttttccctttatctataatgactcatgcctattataagaacctgttccggccaggcatggtggctcgtgcctgtaatcccagcactttgggagaccgaggcaggtggatcacctgaggtcaggagttcaagaccagcctggccaacatggtgaaaccctgtctctactaaaaatacaaaaaatagctgggtgtgatggcgcatgcctgtagtcccagctacttgggagactgtggcaggacaatcgcttgaacttaggagatggaggttgcagtgagccgagatggtaccactgtactccagactgggcagtggagcaagactctgtctcaaaaaaccaaaaccaaaaccaaaaccaacaaacaaaaaagaacccattccttttgagtaaattataccttgctggtagagtttttaaaacctcggtctttcaagcactttgaatagttgtgggagggaggtgtaggggcctcggtggggttggcagcaggtgcccagtgggtttcatagctgtgtgttttcatttggctcctcttccttggggattgccttgtctcctagcaagattcagggtgctggggactgtggctgtatttcttcagcagttcagagtctttggtttattggtcatcatcacccacttgtggaaaagacacattcatgtgtccagcacatgtcttgtctatccccggctcca

SEQ ID NO: 16659 - DNA, 2300 bp, Homo sapien
aatggcagttaaaatatgaactgtttgtgaagtaagctgaataaggatatgtgatcccctcaagaggcacagaactttgttggaaaacacaaaaggggtcccaattaaatggggacaccaacggtttacagcagaggttctcaactgggggtgttctgccccctttggaggacatctgcaatgtatggaggcatttttgtttgtcataactggtggggccaggtgaggggtgctgctcagcaccctgcaatttacgggatggttcctaccagagagaatgatctggccccagatgccagttgagctgatgttgaacaattttggtttatcctagtggggtacacatgcacccgcatgcacacgcacacacatgcaatgcacacatacacatgcacgcacatatttttattttattttattttattttattttattttattttattttattttattttatttgagacagggtctcagttggccacccaggctggagtacagtggcgtaatctctactcaactgcagtctcaacctcctgggctcaagtgatcctcccaccttagcctccctggtagctgggactacaggtgcctgccaccgtgcccagctaattttttggtttttttttttttttttttttttttttttttagagaggtgatttctccatgttgcccaggttggtctcaagctcttgggctgaagtgatcctcccacctttgcctcccaaagtgctgggattacaggggtgagccaccatacctggccaatacacacatcactttaaaaattcaaaaaatcaggctgggcgcggtggctcacgcctgtaatcccagcactttgggaggctgaggcgggtggaatacaaggtcaggagatcaagattcatcctggctaacacagtgaaaccccatctctactaaaaatacaaaaaattagccaggtgtggtggtgggcgcctgtagtcccagctactcgggaggctgaggcaggagaatggtgtgaaccctagaggccaagcttgcagtgagtcgagatcgcgccactgcacttcagcctgggcgacagagcgagactctgtctcaaaaaaaaaaaaaaaaattccagaatatcaaatgatattttgataatacagagcagtggagggtgggggaacttagcatagtggattgtgaaacaaattttaaagtcatgataataaaaacagtgtggcattgaaataaaacttaatgtggatcaatggaacaaaatagccctcaaagccattttaataaaaatgactatataagatagaacaagcataacacagccaatggaaatgtgttcagaattcattgttgacctaattgccctagtcataagtgaaatatcctcggagccatatcccgggccaaattaagagccattttctttgtttcctcttcatacccagcaccccccttgcccctcctgtctctctacagtgtagagtctcattccaaactgcaaagattgaggcaaaaagagttgatgaatttctggtctacaaagaggatgaatttctggtccctaaataagatccataatttgagcctttttaaatttttatttttaaattttttttggctgggccctggcactgctggcggcacccacatctgtgcaatgggcccacccagactttgagccttgattgtaggaaggctgtaggcgttgcagccagaaaggcctgggtttaaatcccagcatgaccttgaattccctcacaaccttgaaagtgccatgtgacttctctgaatctccatttcccatctgtgaaatgggcatgaagcctgcagcactgttgccaggattcaggggagtgtgacaagggcagcggatgagtgcttccctcctgtcctctgcacatggtgctcccagggaactgcaccggtctcctgctgtgctgctccaggcgcactcgtggctcacagcctctccccagggacatgacatgggggtgttttaacgcagcaccatgttctcttttcgcttttggccacagatgacgtccggttgtttgccttcgtgcgcttcaccaccggggatgccatgagcaagaggtccaagtttgccctcatcacgtggatcggtgagaacgtcagcgggctgcagcgcgccaaaaccgggacggacaagaccctggtgaaggaggtcgtacaggtactgagttcctccagagtctggaggtcaaagctcgccaagggtcaccatcctgcaaggagggagagggctgggttcgactcctgggtctgtagcttagctgtgacttgggacaagcca

SEQ ID NO: 16660 - DNA, 2300 bp, Homo sapien
atcaaaggatccacctttgttcttctttctaatggccaattgtcccattacccttgtcaaggagtaaggtaggaatggctttgtggggtatgaaatgtgaatttctttttgtcttatttataacagcatctgcctctactcttctgaaactgtgttcctgtccacccacccattcaactacccattgattgactgattgattgattcattcaatttctcgtttttgtttttttgcttgttgagaattctaacattaattggacattgtccctgaccttttgggtttctatttaggatttgtttttatcacttaataaccaacaatgatgacattttatcgaatgtctagtatatttgttccaagtatcatttcaattacacttaaaacaaagcagtgatgtcagttatactatttttcccatttgaggagtcatttaaaagaggttttgaggctttccaatggcccccagttggaaagtggcagtactggatgcaattcaagagcccagtcttcaggatcctgcctttttacctacctggacgctgtaactggtctctgtggaatggctggatgagggaatgaatgaatgagtcagtgaaggaatgaggaagacagaatgagtcagctcgtgctttcagaggagcccaaagggagaggttaagataggaatgcaaatgaccagaatccagagtaaacgcgagcccaccagcgttttggaagcagtccactttctaccccctcctatttaaaatgcttcattctttccagttcctccccacctagaatccatggaaccaaacgctggggtagggacagtggccagcctgtctccttgggtttgacgcattacatcatccacgtggaggtcccctgtggagctctgcagccctgcagcctcaggggcaggggggtggggagaatgaggaagggggagagggggaataggaggagggagtaggggacagggagggaggagatgccaggagggtaagtggagaagagggaggcgaagccgggggcagcaggggagggggtcaaggaggaggaaagaggagagcttggggagaaggaaatagggaggatggagaagttttgggctgggataggcaagaagagggaggaggagagaggaagaagaataaagggggaagggagaaagagggggagggaagggagggggaagaggtcagggaagtgggggaagcaagcagtgggggaagaagaggaaggaggagggagaggaggaaggcggggtgggaaagggggttggggtagtgggagtttccagggaggggtcgggaggggaggaggggaagtgagaaggagaaggagagagaagagggatgttgggggagaagagagcgggagggaggagggagagtgagagggaggaggcaaagcccctactccagcccccaccgcggagttgcgcaagccttccggtctgggattggccgccagagaatcaagacgctccgcccccgcagcccgacggccaatgaagaggcgggccgccgcctgggcggccaatgggcgcgggggggcggggcgggccacggcctggggtccccgcgcgctctccgtccgcagtggaagccgccgccgcgctcgcagcttgcaggcgccgcgtagccgtcgccaccgccgccagcccgtgcgccctcggcgcgtacccgccgcgctcccatccccgccgccggccaggggcgcgctcggccgccccggacagtgtcccgctgcggctccgcggcgatggccaccaagatcgacaaagaggcttgccgggcggcgtacaacctggtgcgcgacgacggctcggccgtcatctggtaggaacttttcattcgtctccacgccccgctccccgggctcgcgcggggcctcgtgcaccgagccggcctccaggcgggacggattcgggcctcccgcgctgtcttcctcgccttattccgggacggcgtgccaggcccccgcgggcttctccgtggccagcgcgtctgttagattgtcctctgcaagcgccgcgtcgcgcggccaccagcgctgatgtgtgtgtgtgtttttttcttctcccaacccaaagggtgacttttaaatatgacggctccaccatcgtccccggcgagcagggagcggagtaccagcacttcatccagcagtgcacaggtagggaggcgcgcctgccgggcggatgcgcggtcgttgggaggttgtctgcacccggggagccccggccagagcgaacccgggaggaaccggtggccacatggggtgcccctggcgcatggcgtgggaggaa

SEQ ID NO: 16661 - DNA, 2300 bp, Homo sapien
gtctttttatgtttacactttgcatgaggtggtatggtatgtttttttttttttttcctggatcactttttatgtgtttgaatgtattcatcttttcaatggcttttggatttggatttgggtaacatggtttatggttagaaggaagctccccatattttcttctggcacttttgtgatttcctttttttgagacagagtctcgctttatcgctcaagctcgagtgcaatggtgcgatctcagctcactgcaacctctgccccccgccccgggttcaagcgattctcctgcctcagcctcccaagtagctgggattacagtcgtctgccaccacgcctggctaatttttgtatttttagtagagatgggctttccccctgttatccaggctggtctcgaactcctgagcttatgagatcctcccacttcagcctcccaaaatgctgggattacaggagtgatccactgcgactggtctgatttcctttatttgtgtttaaatttttgatccttttggaattttccctgatcaaaggatccacctttgttcttctttctaatggccaattgtcccattacccttgtcaaggagtaaggtaggaatggctttgtggggtatgaaatgtgaatttctttttgtcttatttataacagcatctgcctctactcttctgaaactgtgttcctgtccacccacccattcaactacccattgattgactgattgattgattcattcaatttctcgtttttgtttttttgcttgttgagaattctaacattaattggacattgtccctgaccttttgggtttctatttaggatttgtttttatcacttaataaccaacaatgatgacattttatcgaatgtctagtatatttgttccaagtatcatttcaattacacttaaaacaaagcagtgatgtcagttatactatttttcccatttgaggagtcatttaaaagaggttttgaggctttccaatggcccccagttggaaagtggcagtactggatgcaattcaagagcccagtcttcaggatcctgcctttttacctacctggacgctgtaactggtctctgtggaatggctggatgagggaatgaatgaatgagtcagtgaaggaatgaggaagacagaatgagtcagctcgtgctttcagaggagcccaaagggagaggttaagataggaatgcaaatgaccagaatccagagtaaacgcgagcccaccagcgttttggaagcagtccactttctaccccctcctatttaaaatgcttcattctttccagttcctccccacctagaatccatggaaccaaacgctggggtagggacagtggccagcctgtctccttgggtttgacgcattacatcatccacgtggaggtcccctgtggagctctgcagccctgcagcctcaggggcaggggggtggggagaatgaggaagggggagagggggaataggaggagggagtaggggacagggagggaggagatgccaggagggtaagtggagaagagggaggcgaagccgggggcagcaggggagggggtcaaggaggaggaaagaggagagcttggggagaaggaaatagggaggatggagaagttttgggctgggataggcaagaagagggaggaggagagaggaagaagaataaagggggaagggagaaagagggggagggaagggagggggaagaggtcagggaagtgggggaagcaagcagtgggggaagaagaggaaggaggagggagaggaggaaggcggggtgggaaagggggttggggtagtgggagtttccagggaggggtcgggaggggaggaggggaagtgagaaggagaaggagagagaagagggatgttgggggagaagagagcgggagggaggagggagagtgagagggaggaggcaaagcccctactccagcccccaccgcggagttgcgcaagccttccggtctgggattggccgccagagaatcaagacgctccgcccccgcagcccgacggccaatgaagaggcgggccgccgcctgggcggccaatgggcgcgggggggcggggcgggccacggcctggggtccccgcgcgctctccgtccgcagtggaagccgccgccgcgctcgcagcttgcaggcgccgcgtagccgtcgccaccgccgccagcccgtgcgccctcggcgcgtacccgccgcgctcccatccccgccgccggccaggggcgcgctcggccgccccggacagtgtcccgctgcggctccgcggcgatggccaccaagatcgac

SEQ ID NO: 16662 - DNA, 2300 bp, Homo sapien
acagtactcaccacgctaggaccattgctgattgacttgttttcctgtcttcctaagagccctgaaagtttcttctttgtatccctggcacctactacagtgccggccacacagcaggtgttcctgaaaagtctgttggatgaatgagaggcagtgcatgaattcatgtcagaacagagatccatccacatgtcggtatggagacagaataacaggaggattagctttgtctggggtagggacaggtccaggaagggtcaaagacaggcaagtaaggcttggcagggtgaatgtgtacagtccccaaagaaaaggggagagagagagagagagatgggggacagcaatccagtcagtgagaacatcatttaaagatccttggctcacacctgtaatcccagcactttgggagcctgaggcaggcagatcacccgaggtcagcagtttgagaccatcctggccaatatggtgaaccccatctctactaaaaatacaaaaattagccaggcgtggtggtgggcgcctgtaatcccagctactcaggaggctgaggcaggagaatcgcttgaatccaggaagtggagatttcagtgagttgagattgagccgttgcactctagccggggtgacagaaagactctgtctcaaaaaaataaataaccatcccggctaacacggtgaaaccccgtctctactaaaaatacaaaaaattagccgggcgaggtggtggacgcctgtagtcccagctacttgggaggctgaggcaggagaatggcgtgaacccgggaggcggagcttgcagtgagccgagatcccgccactgcactccagcctgggcgacagagcgagactccgtctcaaaaaaaaaaagaaaaaaaataaataaataaataaataaaataaataaataaataattaaaaaataaagatcctgtaagtgggctgggtgtgctggctcacacatgtcatcccagcactttgggataccgaggcacgaggatcgcttgagcccaggggttcaagaccagcttggacaacaaactgaaaccctgtctctataaaaatcaaagaaaaaaaaatagccaggtgtggcagccggcacctgtggtctcagctgcatgaaagactgaggcaggaggatcacttgagcctgggaggtggaggctgtagtgagcactacacaaaagaaatcgctgatccttcagcagccatttcccactccagcaactccccgcccctggcaaccactcatctactttctgtctctatggattggcttgttccggacatttcacatacacggaatcatacagtgtgtggtcttttgtgtctggcttctttcactaagtattacatctccaaggttcatcccgctgtagcatgagcgaagtgtgacaattgatagatggatcgatgaaggttacattcattcattccatacacatttactgagcacctactgtgtgccagtcttggcgacgacccagtcaggaatagaactaacagtaaaccctgccctggagggcttctggtagggaggagagacaataaaccgaataaactagtacattatttggaatattagacgctgataagagctcaagtgaagcatggggttggaagttgggtgcagagagaggggctgtgacttcgagcagagcggtcagcaaaggcctcgccgcagggtggccgcagggacgctcccgctcagcccggaaggaggcgagaggcgcggtgcccgtcccggcgactctgggccagcaaagagctcccagcgcacgcgtcggtgcctcgaggcccgggaccctgcgtgtctggtccccgccgtggccctgcgtccgtgacggtgggtggcaccagggagcatttcgcgcggcggggctggggcctgcctttgaagggacggagtcgggcgtcgtggtggggtggacaccggggatccccggggcgcggacgaggggggcgtccaccctgcgagctcaccccacggcccccgcgtcccgccctcagccgcaggccccgccccgcgccgcccggccccgcctccccgcggccgccgccattggccgcgcgcgccgcctccgccctcggcctcgcacttcctggcggagccatggctgcgcagcgggctggccgggggtctcctgaacccgggccccgccgccccgaccgcccggccccgccgccggggctgtccccgccgcgtccgtagcgcgtcctgccaggtgggcctccgcgcgcgcccaccctccagcccgggaccgccaggaagccgcgcccggccggggcggggagctggc

SEQ ID NO: 16663 - DNA, 2300 bp, Homo sapien
gacccccctgcgccccttggtgccggggcgggcgggtgggcgagtgggggcgccgcggccgggggaggggccgccgcccccgcaggtgacacaggtgcggcctgtgcggaccgccccgcgcgtggcaggtgagtggcccccgccccgggccgtcccgactccgcctcctcgccgccggctggagcctgctgggcggccgttgcgctgagttccgcctgggctgcggggtccgagcgaacgacagcggcgtccccggagaccccgccggcgagccggtgtcagcagcgtcgctttctccaacgctgaggtcgggagggagcttggggaggaggcgctctgggaaacccccggccggacggggcctgcggtcccatgtttactggaagaccttttccagtgacctgggattgtcactgtgcttgggggtggccttgacccttcacctgcttccaaaaagcgtcggaggccgctgacgtccaacacgggtggaaatcagaccccacccccacgcacttgcaggagacagcagggagcctccggccccgcgaactctctctaggtatcttggcctagaaaataaagcgttgagcgttagaaggcctggttgattctgggcaggctgcctggggcggtggagagagagggcacctgctgcttgctgttctgtgaccttgggcaaccccccctggggcacccgagcgccaggtctcactgtgggaacgacggtgtcacctctcagcgtgaaggtggaatgaagtcgagtccgcggtgggcaccgcaccaacgctgggtttcttctcttccctctctgggctctccagcatcctaggggagggccggggtgggaacagcttgtcattgtcacaaagtttctagtttgtcgagaggaatccagttgccccttctctccctaggggagttgcacgggacggactgtgcccgaattcattccttccatgggaacactggagtgccctccctgtgtccccagttatctaagaacagtgctgacttcttgtcacattgttctttattagtgaagactatttgttcaataggtaacaaactcttctcatgaactcaaatagcgggggaaaaaaatcctctttaaaaccttcgtctcagtatgtgacttgtgctaatattagttggcaaagtcccttctctgtgttcccttccatctttgaagcacctgcccctccccctgcctcccccgccccccacacaccaaagcttaactctgtctgcagtgatcccccacccaagagccaggcagtgtagcctaagagttaagagcatgggcgcttccctgagctggaatcccaattctgccagttcccagctgtgtgacgccgggcagcttatttcacctcactgctctcagcatcctccagtcacagtgctggcctcatggggttgcagtggggactaagtgaagatgcagagaagcacttggggacagtgtgtgtctagaatgtactgtgtacatggtagtcatcactgtaccacatcctcatctgcatcatgatatttttaaagtgtgatactctcgaacccgggcctcattcagcagcgtgtcatggtgatggatccaggttttgaagctggacagaccgaggcgtgattctcggccgtttactagctttgtgaccatgagatcaatatcctcatctgtgaaatgaaataagtgatatcagcctggccaagtataatctttgtgggggttaaatgagatggcacacttaagtcacttagcttggttcgagggctgtagtctgggctccgaaatgataacttatcattataaccttgatgtagccaaaaggtaattatttgtaggaagtgaaccaaatgacatgatatcagattttagatgataaaggaatgggagttaaatgttctgtccaattctaacaacccgatgatttctcaactcggtgtaaaagagttctttgtagtgcacggtcctccctccctccttcttccgtgtgactgttttcactgtcatccttggtatctgctagcagggcctgaaattaatgaatgacctagagttatgactgcatgctcagaaatcctgttcttctcctagggctgaaatctctttaatgatggagggaagcaggcagacgcgagtgtctcggccatacaagatcagcgaatcatcaaaggtctgtgaatgttcactcaccacctatgcaaattgcctaagaagtgtgatcctttttctgattcactcatttctaatcacagactgatttttttgtcattggtgttgtcagtctccttaatgacaagta

SEQ ID NO: 16664 - DNA, 2300 bp, Homo sapien
gcccagccagttcttcacctcagtcaccctggaatagaccagctatctatgtgatagttttcagttacctgtttctccctatgttgaattcatttatttatttatttagagacagggtttctttttgtcgtccaggctggagtgcagtggcacaatcatggctcactgcagcctcaagctcctgggcttgagcgatcctcctgcctcagcctcctgagcagctgggactacaggcgaatgccaccacgcccacctaatttttaaatattttgttaagacaggaatctcgctatgttgcccaggttggtctcgaacttcctggcctcaagtgattctcccgtctcagtctcacaaagcattgagattacaggcatgagccaccatgcctggcttgaattgttgtgttgtttggttttgggtttttttggtttgttttttgttttttcttgtttgttttgttttgtttgtttgttttttgttttttgagacggagttcttgctctgtctcccaggctggagtgtagtggtgtgctcttggctcactgcaacctccatctcctgggttcaagcaattctcctgcctcagcctcctgagtagctaggattacaggcacacgccaccatgcctggctaaattttgtatttttagtagagacagggtttcaccatgttggccaggctgctctcaaactccagtagccgggctgtcgtcccagctactcaggaggctgaggcaggagaatcacttgaacccgggaggcagaggttgcagtgagctgaggttgtgccactgcactccagcctgggcgacagagcaaggctctgtgtcaaaaaaaaaaaaagaaagaaagaaagaaagaagttatattaataagagaaggaaaaaaaaaaccacgatacacaggcatactcagaaacacctgtacttcctgcagtgccctctgatgcagcattttatttcctgttttcttcagtttcattttgttgaaaatgctggtcaggacccactgggttggaccagggccgagcaggctgctgcgccgtttctaatgtgtcttctctgtccaggtataccgctgggccgaccactcaagcacggtgctgcagcggctgaacgagcagcgtctccgcgggctcttctgcgacgtcgtcctggtggccgatgagcagcgtgtgccagcccatcgcaacctgctggccgtgtgcagcgactacttcaactccatgttcaccatcggcatgcgggaagctttccagaaggaggtggagctgatcggcgcctcctacattgggctcaaggccgtggtggacttcctgtacggcggggagctggtgctggatggcggcaacattgactacgtcctggagacggctcacctgctgcagatctggacggtggtagacttctgctgtgagtacctggagcaggaggtgagcgaggacaactacctgtacctgcaggagctggcctccatctacagcctcaagcggcttgatgccttcatcgatggcttcatcctgaaccacttcggcacgctgtcctttacgcccgacttcctgcagaacgtctccatgcagaagctgtgtgtctacctgagcagcagcgaggtgcagcgggagtgtgagcacgacctcctgcaggccgccctgcagtggctgacgcagcagcccgagcgcgaggcccacgcccgccaggtgctggagaacatccacttcccgctcatccccaagaacgacctgctgcaccgcgtcaagccggccgtgtgctcgctgctgcccaaggaggccaactgcgagggcttcatcgaggaggccgtgcgctaccacaacaacctggcggcccagcccgtcatgcagaccaagcgcacggcgctgcgcaccaaccaggagcgcctgctgtttgtgggcggcgaggtctccgagcggtgtctggagctcagtgacgacacctgctacctggacgccaagagcgagcagtgggtcaaagagacgccgctgcccgcccggcggagccaccactgtgtcgcggtgctggggggcttcatcttcatcgccggcggcagcttctcacgggacaacggaggggatgcggcctccaatcttctttataggtatgacccccgctgtaaacagtggatcaaggtgagattaaagccagattatttcttttctcttgaggactctctcggtttccttaacctagccttgactttccttacctctctggggccttgacaactatcctgcttctgaatgaggtgtgatgataaagtgacgagcagaataccccggggcctaca

SEQ ID NO: 16665 - DNA, 2300 bp, Homo sapien
tgcaggccgccctgcagtggctgacgcagcagcccgagcgcgaggcccacgcccgccaggtgctggagaacatccacttcccgctcatccccaagaacgacctgctgcaccgcgtcaagccggccgtgtgctcgctgctgcccaaggaggccaactgcgagggcttcatcgaggaggccgtgcgctaccacaacaacctggcggcccagcccgtcatgcagaccaagcgcacggcgctgcgcaccaaccaggagcgcctgctgtttgtgggcggcgaggtctccgagcggtgtctggagctcagtgacgacacctgctacctggacgccaagagcgagcagtgggtcaaagagacgccgctgcccgcccggcggagccaccactgtgtcgcggtgctggggggcttcatcttcatcgccggcggcagcttctcacgggacaacggaggggatgcggcctccaatcttctttataggtatgacccccgctgtaaacagtggatcaaggtgagattaaagccagattatttcttttctcttgaggactctctcggtttccttaacctagccttgactttccttacctctctggggccttgacaactatcctgcttctgaatgaggtgtgatgataaagtgacgagcagaataccccggggcctacatcctggacagggagagggagagccgacccaccccttcgaggggtccgtcatcgttcagagcagcactgcctggcggggctttctgtgcagatggaagggtctgtctgtacttcccgatacggtagccacagccgcatgtggcgactgagcacttgaaatgtggccagtgcgactgaagaagtcaattttcaattttatttcactttaaccgattgacgtgtaagtgtatgtggccgcacgaggcgtggctaccctattggacagtagcatgggtctagatgtttgatccatggttcaacatccccaggtcctggagtctctgtggggctcctctggaagcattttgggagatagtttaaggagaccactagtgctcacgcctggcccttgggcatgtattgtgtcctgattctgggaagagcgtgggccttgatgtcagacctgaggtctcatcccagcctggctaagtcatagctaggaaatttcagattcttgtcctctccacattttggattccccttctgggaatacgtgggggacagggagtgcagtagctcatgttgactggcaagcccctggcgtagggaaggtgtctcctttctgctgggagcgctctccagccactcggtccccgggacagtccatctcagcctctatactcacacctcagcgtcgcgcccagctcagtgctgttctcagctcaaaacccagtcagaatggactccagctgaccttttgattttactctcagaaatctgagactgccctccaaggtcgaagtgtcaccactggaaagggtccctggctttggagcctcctcccgaagcctggcagcagtggcagcagtgtgtttgccttggattcgtttaaaaaaagaaaaaaaaaagttggctcttctactttttgtgtgtgtgtgtgtgagacagagttgttctgtcacccaagctggagtgcagtggcacgatctcggctaattgcaacctctgcctcccaggttcaaacaattctggcgcctcaacctactgagtagctggaattacaggcgcctgccaccacgcccggctaatttttgtattttcagtagagacggggtttcaccatgttggccaggctggtctcgaactccgtgacctcaggtaatccacccaccttggcttcccaaagtgccaggattacaggcgtgagccaccgcgcccagcctcttctgtttaatttcctgtcgaatgccacgtcctgctctgttaacacggagtggcagagcagcactaactttacaaatctgatgtggggagaggaaagatgaatttttatttcataaagccactagatcagcaattctgacccctgtgaccacagagttcccatccacgcggctaacgacatgaccagagaagttcgggggttcagagcatctccatcccccttttggggactcagagcgtctccatcccacttttggggattcagagcatcttggtgaaacctcgggggctcagagctcccacctgaagaagccctctttattcaggtgcagttccctttcccaaacattctccggggttgtgcattccgcagacacatttgggaaccgcagcgccagatgttgatgctgtcccgggttcggggaagggaaggt

SEQ ID NO: 16666 - DNA, 2300 bp, Homo sapien
actgccctctgtggttagtgaggagggcagtctgcatgttcagctagctagttatttgcatgtgaagtccctggaggcttacaaactgttgagaggttctgcgaggcatacaaacaaacagaccaaaaggctggaaactctgcttggagctctgcagcattccggtgtatgaaaggttccgagaagtctcaacccagcatttccaaacttctttgagcctaaaagtcgtttgtctcatacctagtcccagacccccacaaaacatgttttgcagaacttctgccaactttgggatagcttacccccttcctattcgggaaaggttttattgcttgtagacccctcagaaggcagggtagggtgtacgtgggctgttctccccatctcagcctgggtcatgaacaaacgggcagttgtttggcctgaatctcggggcaagttggggagagcacatagaaagactctgtgagtgatttggggagtgggatagctttgaccttggagagaggagagccattggttttcagcctaagccagctcttttatgttttgcttctgggacttgtccctggaaatgtgtgagcttctggcctctattctgattttcttgtgcctcatgagttacatacgacgtcctgcgcttcatattttgtggtgtctctcctgatactatgaaggtggtttgtaattgacatggctttgaccctaatattactaaggttgggaccacccttttaaagggaggataaacaagtttcatcttgtgggtcaacttctaatatttgatggtggctacactgtgacaagaaaggtttttgagcttgttggggtcagtggatgggcacaagggcacccagtggtggtgcccgggccaggtttttgttacttgtctttttaagttgaaaattcaccctactgtgcatgaaaatggaactgaaaatggaagagaccatgcctgggcaacatggcaaaaccccatctctacaaaaaaattacaaaagattagccagggatggtggggcatgcagtagtcccagctgcttaggaggctgaggtgggagaatcacctgagcctgggaggttgaggctgcagtgagctatgaccacaccactgcactctaacctgggtgacggagtgagaccctgtctcaaaagaataaaatgttttttaactcagatgggcagagtttgggctgtgcttatgcagtggccatttgaaccgcacagtcacgaatgtggggttttaaactagagtgatgaaggcacaggtgcttgcaggctgccattttgagagggaaacagccacacatgtcatcatgttaaactttcagtgtttcaagctattctgcttgaattttgaagacacctggatctttttttttttttaacatttcaaaataagcatggcaggcttctattgaggtttggacttctctcatttctaaagaattagagttgtaacttcatattagttgtaagtttggggtttggtcctcacccaagttggaaagctgtttgcttaagacatagatgtattataataatagaagggagggagtagaaagctgatgaacccttgttacttatagcaaacttcctgctgttttaaatgcacagagattattttatcaactgtggttagcacgcaattggtatttttattgttctgccattttattgaggctatcaagtgggacttcagacctggctctgagcaggaccacacgtgtgtatttatattgagtgccctcactcatgataaggtgacttcatggagacccagaaactcaccctaaggggtgttcacctttgaggtgggcatccagatgctgaggggaagtggggtccatcctctgaggtccaggggcctactttgtgagctcagttgtgttcacctgtggttcagtgtacctcggcccctaagccaagtgatcgttcagtgacttgcagcaatgtgggaagtgaggggacccctgccacaccccccaccaccccctgtagagtcactgaccttcatccttcaccctggtcctccatggtgcagcagcatctcatgggccttgtggctgtcagagcccgtggttggaaccccgtccactggtcccaaacctggaggggcagctgcagatgaggtttagacctcctggtgtctccgtggattctgagtgcccaggaggggaggggagggggtggcatcctggcctctaggataaatgcctggagtatagggcagcgccacgggcacttggagaccctgtcctgcgcatctgccaagcctggcagtttttagagttttttga

SEQ ID NO: 16667 - DNA, 2300 bp, Homo sapien
taatttttgtatttttagtagagacggggcttcaccatgttgatcaggctggtcttgaactcccgacctcaggtgatccacccacctcagccttccaaagtgctgagattacaggtgtgagccaccgcaccgagccagagagacaaccataaatcactagtgagttttcacgtcccccagtttctatccaagtgcagatatcgcttttccatggttaaaattatagcacagacactatattgtattgttttccccaattttttgttataaaaattttcaaacatagagaaaagctgaaatatatagcactacttagagccaacaatagtaaacattttgccatatttgctgtctctccctgaatgtttatgtgtgtacatgattttatcttttgttgaaccattaaacaatagtttacaggcattatggccttcactcctcaactcttcagaatgcatctcctcacaataaggacattctctcagtgagcacagtataattattacactataaaattaccaataattcacgaagatcacccatatccaatccatattcaaatgtctccaattgtcaacaaatagtaaaaccagcttaaaagacatatcaggatccaagcaagatgacacattgtatttggttatgttttctagctcttctattttggaacaacccctccctaccacttatatttttcttttcttttctttctttctttctttctttttttttttttgagacagagactcgctctgtcacccaggctggagtgcagtggcacgatctcggctcaccgcaacctccgtctccggggttcaagtgatcctcccacctcagcctcctgagtagctgggacgcctggtgtgccacactacatcccaccaatttttgtatttttagtagagttggggtttcatcatattagccaggctggtctccaactcctgacttcaagtgatccgcccgcctcggcctcccaatgtgtgggattccgggtgtgagccgctgcgcctggcccacttatatttttcatggcatcccatttatgaagagaccaggctccctattttatgtaacgtgggaatggatcttcctgttcatctcctctgctcagtgtacggtctagcaagagcagactctctgtaggtgtttgttgaataaatgaaaccaatagtaatggttattaataacaatcccagtagccaatttttattgactattctcttggccagtgtgctcacgttaatctaatttgaacctcacagaaatcttacgcgttatgacatatttgtcttattcacaggtgaggaaaccaaggcttagggaaggaaagtcgcttgtctgaaatcacagctagaaaaggggccaaaacccaagggtggacccactggctggaaaacagtgcagttaggcaggggcccctgtttcttaataatgaatgaaccaacgacccccaaggctggtttgcccgtgcacacgcacgcacgtgtgcaacacgtagcacttgctgagtgtttgctacttgccaggcctcatgtcaagcactttacgcgtgcttttatgccctacgttttgtttttgtctgttttgcttttttcccctaatgcctagccaaaggcgtggcccaggcgcccaggcaggacttggggagtgaatgaagagtgaacaaatgaatgaatgcgcggcaacgggatcttcataaaccagaccctcctcggggatctaatgcgaacactcccgaggcccgggcccaggtacgctgagggcggctcgtgggccccaggccgacctcagcccgcgactcccgggctccgggggcccaggtggcccccagtaggtgaggagccgggcccgccggcgccttggcgttgccacctctacctgcctgccctctccccttccggatccacagccaggcctcggcgggctcctggtgtgcagccgcccggccgcttccgcccgagggtcgcggggctcagagtccggcaggctccaggcggggcaggggatgtccgcggcccggcaggcgcacgcccacctgtcggccgcgcaggcgcagcagcgggccggcctccccgcgccccgcggcgcgcggccagtgcgcaggcgcggcggccgatgcgagtgtgtatgtgcgggcgagaagatggcggcggcgggggaagcagcgtgagcagccggaggatcgcggagtcccaatgaaacgggcagccatggccctccacagcccgcaggtagccgccggtctgcgccttcggccggaaggggcccgagccccgggcgggcggacgccgcggcgg

SEQ ID NO: 16668 - DNA, 2300 bp, Homo sapien
atgattttgctgatgtatgtgtaacacagctaacgctctaaatcagtggagtttttccacatgtagtttgagttctttcccatgtagttgtccatcatcaaagacagacagaagcagacatagggctgcttagctcattgctcgagtggtgacccttgcagttgaacagtgaactggccctagacatctagttcttcgtcttctattttgtttacccaagacagaaacttttttttaaataacttttttgtgataaaggtaatgtggccaggtgtggtggctcatgcctgtaatcccagcactttgggaagccaaggcaggcaggtcacctgaggtcaggagtttgagaccagcctggccgacatggtgaaaccccgtctctactaaaaatacaaagattagccaggcatggtggcacacacctggagtcccagctactcgggaggctgaggcaggagaatcgcttgaacccgggagctggaggttgcactgagctgagattgcaccactgcactccagcctgggtgacggaatgagactttgtctcaaaaaaaaaaaaaagtatatttattgaagaaaatttcaaaaatacagaaagtataaataataaaaatccccattagtccacccatttagagatatgtgtttagtcagtttctccttttcctcctactcttgggatttcagctatgcaagggaaacccatgtcatcatgtcattgtttggaaatactttacatcttccatttcagaggaggcatggttggactttgcaagtactgcatgtcctgcaggcctttgacagtgatcagttcacagtaacgtgattatatttgaccttttcagggtcgacaagaagatgctgaggaatacttaggcttcattctaaatggacttcatgaggaaatgttgaacctaaagaagcttctctcaccaagtaatgaaagtaggttatggtccacttgccgcagagttgtgcaagagttcgctgtaaacaggtgttgcatactcatatgttatgttgcttccctgcccctcagtcgttttcctttcaaatagcatttattccctacgataacttacaccatcgagaaggttatatttaggtaaattacagtttatcccgaacctctgccattttcctttaacttttaattaggaaaatgatcaagcctataaaaaagctgaaagaatcgtttgatgaatacctttataattgccgagtgtacagttttaaacatattttctgatgctatacacacactgtgtatatatatatatgtcttatctgtccatccatatatacatacatacgcatacattttccctgaatgattcaaagttaagttgcagctaacagtttagttcatctcaggtgctaaagcatctcctgcgtaaccacagtcccttatctaactgagaaaaacaactgtaatgacacggtaataccgactttgcagagcatcttcaaatttcgccagttgtcccagggatgtcatttctaggagtttatgtaaacaaggatccagtggtggtgcacctgttgcgattggttgccgtggatcaagtggcattgcaatgggttgcagtggatccagtggcattgcgcctgttgtgattggttgccgtggatccagtgacgttgcacctgttgcgattggttgccgtggatccagtgacgttgtgcctgttgggattggttgccatggatccagtgacgttgcacctgttgcgattggttgccgtggatccagtgacattgtgcctgttgcgattggccgtggatccagtgacgttgctcctgttgcgattggttgccgtggctcctaatgtagaccacaccctgatttcatttttaaaactgcaatcgacagatctgtgccttttttttttttgctgttcttgtcgtaaatagtagtgtaagcagatgctctccttttcagaacttacgatttccaacggccccaaaaaccactcggtcaatgaagaagagcaggaagaacaaggtgaaggaagcgaggatgaatgggaacaagtgggcccccggaacaagacttccgtcacccgccaggcggattttgttcagactccaatcaccggcatttttggtggacacatcaggtttgtgcttttctggaataacttaatatttgccttttctagggttttgccatgttggtgaagggggaaggtgtgaggcttgttttgagacttcttggacgtaatggtttgcatcttgctcccctgcctgctcttctcttgcacttcctgatgcttcccttgtcagcccccgtggcttat

SEQ ID NO: 16669 - DNA, 2300 bp, Homo sapien
ggtactcagaggcatctgttttgttgttgtttgtttgtttggttggttggttttgttttgaaatagggtcttgctctgtcacccaggctgggatgcagtggctcgatttcagctcactgcaacctccacctcccaggctcaggcaatcctcccacctcagcctcctgagtggctggaaccacaggcatatgccaccatgctggctactttttgtagcaactggatttcatcatgttgcaggctggtcctgaactcaagccacctgcctgggcctcccaaagtgctgggattacaggcctgagccatcgtgccaggcctccaaaggcatctgctaacacagatctcttctccccttggatttgtcttttgtcaatccaaggactgttgttctggaacagtcttattcactactgagccctccagtgcttgaaacagagcccagcacatagtaggtgcttaattattggatgactgcatgccagttgagtgcctctgaagaatgatgcttcaaagactgagaaaagtaaaacaaaaagaggaaaaaaagataacagaaaacatctgcattattattatctttttgagatggagttttgttcttgtctcctaggctagagtgcaatggcgccatctcagctcactgcaacctctgcctctcaggttcgagcgattctcctgcctcagcctcccaagtagctgggactacaggcatgcaccaccatgcccggctaatttttgtatttttagtagagacagtgtcaccatgttggccgggatggtttcgaactcctgatctcaggtgatccgcccgcctcaaactcccacagtgctgggattacaggtgtgagccaccgcgcccggccagtctgcattattctgtatctgcatttgagccgcaccaaaatcttaggcaagccttccctgtttgagtccacgtcacgcaggcagccttccatagtccttgttccacccattccccatccttgtttctcccacgtgccctagctcgtgggggccccagactctgagatcccggaggtgtcttgtttgtgcctgctgtatagcacagggcccggcacagagcgactcgatgggtatttggggaatgagttaatgctggaggagctaattccggtgtcttggtgcggagatgagcagtgcggacaggccccctcctgcccttgggccccagcaccttaccgcgcagtgcctgcatacccgtccacattttgtgactgaggcgggagcacggggcagtcccttagctcttaaggaacgtggatttacctgtttcaaaggtgatttcgtctggctctaaattgatttccgtatgtacctgcacaggttaaaaatgctaaatgcctccgggcaaaagagatatgaacatgctgcactgctcctagctacgggacttggggcacgctcttctccaagcctcagctactggatctgtgaaatgaggtgatttccacctccctggattcctgggaacgcgtcctagggtcgttgaaggtaaagtgcggagcctggatccccgcgctagcggccccatccggaaacaagtctccctttcttcgtctgcaaattgggaagagggggcctaagttttctgagcacgtgtagagggtgggagtcacctcagtaactgtgtactctgcaccgcgccacagttcacagcgcccagcccttgcggatttcatttgctaaaatcctgggaggtcgcctccttattcctattttccagttgagctgcagagagctggggtttggtaaatttgcaagccccttgtgggaagcgcttggcaccgcgccaggcgcatagtaagcgctcaatgaaaactatgcttgtgtggccagtggcgagggagctgagcgtctccttgtccctagccggccctggaggccagcggccccgccttcctcgcccacccggcgcccgcgcctcagctgccccccgcctccttcagcccgctgagcctgcggggcggggccgggggcggggccggtgatgctcggtcctaccagcgccgccagcgatctgggggcgtggcctccgggctccggggagcctacaagaggcggtacgctgagccccggcacccactcgcatcccagggcgtctccggctgctcctattgagctgtctgctcgctgtgcccgctgtgcctgctgtgcccgcgctgtcgccgctgctaccgcgtctgctggacgcgggagacgccagcgagctggtgattggagccctgcggaggtaagtgtgatttccatgcttctcccttttgcaaactgttacccccccg

SEQ ID NO: 16670 - DNA, 2300 bp, Homo sapien
ctctgtcactaggctggagtgccgtggtacgatctcggctcactgcaacctccaccccccgggttcaagcagttctcctgcctcagcctcctgagtagctgggattacaggtacaggcgcctgccactgtgcccgactaatttttatatttttagtagagacgggtttcaccagcttggccaggctggtcttgaacttgtaacctcgtgatccaccggcctctgcctctgaaagcgctggggttacaggtatgagccacccgcacctgacccacttttttcttttcttttctttttttttttgagactgagtccagtgcagtggcgtgatctcagctcactgcaacctccgcctcccaggttcaagtgattctcctgcctcagcctcccgagtagctgggattacaggcgcacgccaccatgcccggctggtttttgtatttttagtagagacggggtttcaccatgttgaccaggctggtctcaaactcctgacctcccaaagtgctgggattacaggcatgagccactgtgcccggtcctacttttttctttagtttctttagatcttgtatgttcttagaaatcagatgctattggaaatagggaagaagtgtcaaaatgatggcttgcaaaagaatggattaataaatgaaggaaaggctgggcatggtggctctacctgtaatcccagcactttgggaggctgaggcaggaggattgagcccaggagttccagagcagcccaggcaacatagtcagacctcatctgtgagctgtgattgtgccactgcactccagcttgggcaacaaagggagactgtgttcccaaaacaacaaaaacaggaaacttttaaaagattaaaatagaggccgggtgcagtggctcatgcctgtaatcccagcactttgggaggccgaggcagatggatcacctgaggtcaggagtttgagaccagcctggccaacatggtgaaactccatctctactaaaaatacaaaaaaattagctaggtgtggtggtgggcgcctgtaatcccagctactcgggaggctgaggcaggagaatcacttgaacctgggagacggaggttgcagtgagccaagatcgcaccactgcactccagccgggcaacagagtgagacttggtttcaaaaaaaagattaaaatagagatgaagggcattctagaagcagggtagagtgtcaaggaacagagatataaaaatgggagtctgctccaaaaacatcacagataagcgaggataaactgagaatcaaattgaggaaaatcaggtaagaccaatgaggtcagtgtgtatgaggcggtgtaaagatgaatagagaaccagtgacttactcgtcattctttcatcatgctgcttgctgaagtgtgtgccgagcacctgcttgggagcatttaggtgagctgctgagcagagcaggaacaggtggggctcaggggagcaggcgcagcagtgatacagcagagctcctctccacgctgccggggaacccagtgctgggacttcgcgtctagcttgtgctttccataatctttgtatgtggccacggctggccatagataggttttgtatatgtaggcataacctgtactgtgggacttactgtgttgtagtaaagcaatcaatcaagtcagagatttaaaaattcagatcttagttatgtttttatgttctttcccactatgtgtatttagactaacttcatgaaatggccaaggacaaactgtaacacatcatatttaaggtagcttgtgagctttttgagccttaccagctctgtgtcgtccccctccccagggtgcgtcagggaaatcatgcagccatcaggacacaggctccgggacgtcgagcatcatcctctcctggctgaaaatgacaactatgactcttcatcgtcctcctcctccgaggctgacgtggctgaccgggtctggttcatccgtgacggctgcggcatgatctgtgctgtcatgacgtggcttctggtcgcctatgcagacttcgtggtgactttcgtcatgctgctgccttccaaagacttctggtactctgtggtcaacggggtcatctttaactgcttggccgtgcttgccctgtcatcccacctgagaaccatgctcaccgaccctgtgagtactggctgcgtctctgggtggctctcttgtgtctggtctagtgtcctcgggtgtggctgaccctttggaggaagcagtgcacagggacatattgacatgggtgtggaacaagaaaggtggattgagctcattttgggagc

SEQ ID NO: 16671 - DNA, 2300 bp, Homo sapien
tatattcataagagaaacttgggaaagagtaactcgaagaggtagcttggaatgtggtttcacatagtaccttcgacaaagaataatacctttggccgggcgtggtggctcatgcctacaatcccagcactttgggaggccaaggtgggtggatcacttgcagtcaggagttcaagaccagcctggccaacatggcaaaaccctatctttactaaaaatacaaaaattagccggacgtggtggcgggcccctgtaattccagctactcaggaggttgaggcaggagaattgcttaaaccccggaagtggaggttacagtgagctgagattgcaccactgcactccagcctgggagacagagcgagactccatctcaaagtaaaataataataataataataaaagaacaatacttttgtagagaaatgacaggacaaaggagttttgagcttccaaaagtggcaaactatggaaaggtttatatatgggaagaaacttaatagagtaaggtttgtttgcagattcctttggtgccctctctgggctaagaagagtctagaatgtccagtaaaggtgaatttacacctgccctttaggcagaaaagggaggataaagagaacttttcctgcatttgtcgcttcttaattgccttcagctgaaaataatttttctgtcgaagaggcatattttgcggtgatatattctggttttttctttttcttttttcattgagatggagtctcgctgtcacccaggttggagtgcaatggcgcgatctcggcccactgcaacctctgcctcccggttctcaagcggtttctcctgcctcagcctcccgagtagctgagattacaggcgcccaaaactgcacccggctaatttttgtatttttagtagagatggggtttcgccacgttgaccaggatagtttcgaactcctgacctcaggtgatctgcctgcctcggcctcctacaagtgctgggattacagatgtgagccaccacacctggccttattctggttttctttaggtgtcttcattgaacaagtaggtattgtctggcatacccttctgggttatctcgtcttatggggtcttacttttgtctttaagctatctagagctctagtggagcattgtatatataccatcattaatgagttaaatggtatctttgacatatgttcattttatatttgtgtgagagtcataattttattttaaaaaaaagatatgctttttttttttttttgagactgttcactctgtcgcccaggctggagtgcagtggcttgatctcagctcactgcaaccttcgcctcctgggttcatgattctcctgcctcagcctctcgagtagctgctgggattacaggcgtgcaccactacatccggctaatttatgtgtttttaatagaaacggaatttcaccattgttgttcaggctggtctcgaactcctgacctcaagtgatcagcctgccttggcttcccaaagtgctggagttacaggcgtgagccaccgcgcccggccttaaaatacatgttcctactttcaaacacttagggcttcctatatggaagggacagtggcggtgctctagtgtccaagtccctcaaggaggaggccgggggctccgcggacctcaggagtcaggcctccaatccccagttcagggcgctttcctcttttcccaagtgctttctggctcagccatttccactcccgctcccttactttcccatttccttcggtcacatccccgcatatagtacaggccactggagctgcctctgagacaccgccgcgggcgcgggtacacactccgctaagggcattcccaacccggttccgcagcctaacggcgtggcttggaccctgctgcagcccgtagcccctatcctttctcctccggacttcagtttggcggcatctctgtcttagcgagaggggctgtgactaaaagctgccttttctcaatgaactgccagtttgtaagagcctccgggtcccctcaaaccgcctcgagcgcccctctccgcgagagctgcgcggccggaactgcgccggcgtgacgtcactgacctcgtcgggttcacttccggcgctcgcaccgccccgctctccagccaaggctccgggctgaggcatttgcttggctgcagcctccttccgacctgcccggcgggacccaggggaccaagccgagccgagccgcggggcccgctccagcccggccatgagcgcggccgcatgatgcgtccctgcctcggccgctgcagtcgccgccgccgccg

SEQ ID NO: 16672 - DNA, 2300 bp, Homo sapien
cgcccggccccctctcttttaaaaaccagtttgaattgagtttccatcactataactgaaagaatactgggaaatataccttccaggcccagatatatatttccaccatatttccttgatttacacatttatacatttcacatcaagaaataaggttaacctagtgtgacttggtctttgtcactgttgtttcatctttggagaggtcacaaatatttttttgttaagtcatctgccctgaagattttccaggcccaatgtcaggttcactgatctgtggtttgcagaactcactttcttcctcttttaaaaaatggtcatgtaatctgcctctctctaaccttttgacaaggtcagaaaaccttctacgaagtcaggagagggtctgcatgatattcccctaaaacagaatctgactctaaatgagtcacctttttacaattctcccaaacagctggtaatgcaagggcaggtcaggatggcacaagtcggtgccttgtgctaggttcacttgctgacccagggaaggagtttattcagccacagcatccatcctcctccattcccatgaattctacaagatggcacttgcatcctgctggactcacggcagaacctgcagagaccaaaagcgtacccactcgcctgtagcaaccacgtaaaggaatgaggggtattggacacaaactgaattcacaccaagctggagacaccctgagttccagcttcacatgcatggtggccacacccagttggtcaaacaaatctggagtgtactagaaggagctatggtgctgaaggctccataaccctcacggcactgcagctcccagcttttttcttcatgtgttcccttaaactttcccaaggagtctacagttcaagtctacatctttccaaggactgccacttctgcttggggtgtgggacaggtacttgatcatcgatccatatgtcatcttttctcttaagtgatagaacttgtttctcctgcataactcccgtaatttcagaaaacccaccgttttctaaaattgacattcagccctatttcagatatcactgcatttctttagagacagagcttgatcatttaaggagctaccagaaggagcattatagcactggaatgtagttgtacaaatatcttcagaaaatttgaggtgtcagtcaatactccagaaccagattctccactttgctaggtgctggagtcgagtttgacataacccccacattactagggaggggctgtcagtttatgtttctatacttcctctacaactaaaaaggcgtccaaaggcagcacttctattttaaaaactttttttcttttaattgaggagacacagaagaaactgaatggcctgaacgttgtgtttactgtatttgctgaaaagatgccgactggcctagaatttatggagcagctgagatggaatctaccagtctcaaagatgccccgttttaaaaagtaaattggcctctgattgctcttccataccaagtatccaagccggacatttttcttttttaaatctcttttgaaaaatttttataccatttatttattattattttttttagctcctgctcaaagcctcgctggactaattttaatggtatgttggttaataacatgccttcgccgtaactaggggatagggagggtaactgacacggctgttttaaaggtagggaaaccgagggccaggaaacaactagaatccgacggtatttcctagctccctgatggcgcttcccatgcccccaactaaatcatgaaataacccactcacctgtttgcaccgggcctgccccacccactcctcccagagtccgagaacacccagcctctaagcagagccagcaagggggcgccgggcgtacccgagagcgctcccaccgagcgtgggcaggcctcgggcccctcaggctccgccctgtcacgtgacaccaagcgctggccgcctcccgccccccgcgaggggagggccgtctcgcgcctgcgcagaaggggctggaggcgggcgcgtccggttgactgacagctcgcgccgcggcgccgggaaaggacccggctgctcgcgggcggcgcagtcgccgcagcagccgagtctgacggcgccggttcgctgcccggtccgcccgcggtgagaggtgcggtggggtggcctcaggccggcctgacaggctcatgaggggaaggatgacccgggagggacggcggggacccgggatgggggtctgcgaggggtgacagctgggagcgccgtggggcgaggggcgcggggagggag

SEQ ID NO: 16673 - DNA, 2300 bp, Homo sapien
cactgcactccatccagcctgggcgacagagtgagtctccgtctcaaaaaaaaaaaaaagaaagaaaagtttcaggtaaaagcccaccaagtatatattgctgcagacagacttttggcaaagtaacttggtgattcctatcacaagccttaataatgcgcacaccctttggccagcaattccacatctagaaatgcctcctcaagcatctgagatgtcgctgtaagaggtgaggatgacgtggggatcagggcccctggttctccagctgacctgtgtgcgggttccttgcccggtctcttcctggcctctccccgccttgccttactgcagcttcaacaggggagacaatccaggtgcacatgcgtgtgatgtgtgtgtgttgtgtgttgcctgaggttttgcacactctgggtgagaggagcagcacatttgggagttcttggggacacgaaaagagaggagagtcttgaggttgatgggaaggggcaggctcacagaaagttccagattctccctgcagggagctcttgtctgattgcccaaggccaacctgctggagaagccacagctctggttgttccgggatgctggggaaatcagtgtgagcacagctccatggggaagtggcagagcagccacaccggggcaatctcgtgagttccttctacagctggaggctgctgggtgggaagaagcagtgggggaagtggggcggaaggggttgcagcaggaggttaggaaaccccctccagaatacagaccgctgtggcctcttttcccatgagcggtggctccccggcctcattggccttcccggttcttgaactttctaaagtggttaccttagggcctgcatgcttcatgttccctctgcctgggtcaccttcaagccttttcaatgctggttctccctctttccatctcagctcagaggtctgcctccccaacctccccgtccaaagaagccacttctcagccctctcaggaccatcaccttcagatcgtctctgtagcacttagtgctgcagaagctcttgtttggttttttattctattaactctatcttcccctctccctgcccctggtacgtacgtaaacacacacacacacacacacacaccccataaggtctcactcatggcttcatttctagctccttgcacagtaaccgatgcatagtagatgctcagtacatgtgtgaagaatgactggatgtttgcagaatctcataagggctttggaaggtacaggttgacttagaattttagcctaatttggttggtggaagcctccatcatggggcctacgatgcgaattgcaaagtgtaaccgcaggggggttgcagtgcttcaggcccgcaggccagcatgttcctatctgcggtgacacagattcccctgtggccaaaaacacggtttctcagagtctggggacctgcagtgggcctcagtacctccttgaatgtagaacgaagcagatgggctgggatgcaatccacagatgggttttttgactcccagcgtgttttgaaataaatttaaattagttgccagtgttgaaaaatcagaagatttcatgtaacgggatttcagcattccttagaaacctgtagaagctctgatactcctgggtctacattcccaaatggtagcaccgggctggctctgagcagggacagtgtggctccttgctggaccacctcctctgttttcgccagatggccaagactgtgaccctgcaatgtgagagtggccatgaccttgtcctgcctagaggcccacaatgacctttccttcttagaggaagagggtggggttgcttcccttgccatgactacacacagtcactgctgtgacatcttagatctgtgagcgagccccagacagctgagatccctgagctgaggggtccggggacaggggtggtgcacgccacagctatcggcgtgcaggaccagccctcctgccacccatctgcttcctctcactctgtgcctctcctgtgatatcgcctccgtgctgagcccacggaggaaggcggcacccagcactcagggcttctgggagagggtgactcacgagagcatctgaacggcccaagagtgcctgaggctggatcagaaatagccacgatcgtccagtttgattgattgattgattgatttagttgtgatggagtctcgctgtatttcccaggctggagtgcagaggcacgatctccgttcactgcagcctccacctccccggttcaagtgattctcctgcctcagccttccgagtagctgggattacaggca

SEQ ID NO: 16674 - DNA, 2300 bp, Homo sapien
gttgcagtgagccgagatctcaccattgcactccagcctgggctacaagagcaaaactccgtctcaacaaacaaacaaacaaaacaaacaaaaccacagcccttaggaccgacaacccaaaattgcaacagagcagagcatttacgtgaggtggacgtggggggaggtgatggggtggaggagtgtgttggaggaggggaaagggcaggggtgaggtcagggggctctggagagaccctgtggggtagaccataggacggcttgctctctttggaccctgtgtgagtgtcctggggctcccatagcaaaattaccccaaactgggggcttaaaatgacagtagtttcttctctcctagttctggggccacagagtccgaaatcaaggatctacggaggctgctgcagtccctccggaggctccggggctgtctccggctcctggcagctctccgtgctcctggctcacactgcgccgctcccgtccctgccccatggccgcatggccatctcccccgggtgtgtctctgtctcctcttcccatgaggaccccggtggtgggatcagggcccaccctcctccggtgcgactcagccaatcacatctgcagccaccctgtttccaaataaggccacactctgaggtccccagggagacatacatttggggggacactctcccacccagcacagcccccaagagtgaaggaagcagagagcaggagagggacttgactggcgctcagcgacggctgcacggcacaaaggggacacaggaccccaccaccccacagcttggcacagaaagggaggagccacgctgactgtggaaccccagggggctacttagagccatcccgtgggaggttgtgggggttcatgccccagacagagaatggggacccagcagggacagagctggggtggtccatgcgttgttcggggactccggggaacacagggcagggcatctgcaaagggacgattggagagagtgtgacgatgagatcactggagaagcgtgaggaggggccagccagccggcacagcccagtgggcacctggggatcggtcacagagggaagccgccaccagcctgggcctgtgcactgggaatttcaatgagttctgggtccccgccccagcctctgtgtctgtcccttcgcccccatgccagggacttacttctcctaactgagtactgtcatgagcccattctgcaggggaggggactgaagcccagagaggtcaggggacttgcccaaggtcacacagcagagcggggtctgggatttgaacctgtatttagctgaccctgaagtccttgcttttatatatgctttaaaaacaaaacaaaacaaaaaaccctttccatttccataatgaaagcctccaaacatacaaagtaacagaacggcagagtaaggcctgggccgcttcctctgcccgcctcccatccccgttccttactgtcgtgatttttatgtttcttttctgaaggtaaagtgtctatacattgagacatagaaatcataccattagtggaatgtattggacttgagctagtcaatctgacatgtgcatttatattttctttctgtggtatcttaattatcttactttactaacagtgagcagataatgcttttataataagggaaaaaacaatgcaattatgataaaaacgtgaaagacgctcctttgagctggttccttgccccaccctggggagcccgagtttactctgtgtgtctgcaccccccacctgagcttttccatgtcccgcccacctgagactagaccccagaaaggccagtggcaggctcggggcaggcagcttccctgaagggagggaggagcccagtgggcaggacccacacatgtggccgcacgcaggcctgagccccctaaatctctccctgctacctcctggggagccccagccactagccccattccacaagagcctccatcttcaaagggagagtgtgggcctctgtggggtgccctcttctctcagcagctcctgagccaacgcgaggctggggaggccggcctcagggaggcattgcccgggcgaccggctcctcctagggcctgccgtgggcggccccatcgcctagcaaccgggtggcagcgtcccttgagcccaggccacacagctgcacccagccctgcccggctcctcccaggcctgcaggacccctggggccctgtccttattccccagcaccgggacagccaaagctctggtcacaatgaacatcgtcttctccaggtgagtgggccagcgccagcctgg

SEQ ID NO: 16675 - DNA, 2300 bp, Homo sapien
accccacccccagcctttcagggctgctggactggggcatgagagtggggtggcgctgggctcgctgggtggcagctttggggacagcggtgcctgttggtataacagcctacaggcaacggtccaccagtcactcagcagtcctaagggcatcattatctccacttcacagatggggaaactgaggctctcagaggttacgcgacttgacagggtcacacaactgagtgtaccggggggaaggcagggcaaggcttgagcccaggcatatctgccttcaacagggacagccactgccatccccccgctgcagacaccacagggcttggtgggctccagcccctccctgaagctgtacctgtgaccctcacacctggaggaagcactgggaagtgctggaatcagagaggacagcccttccctcagctacggctccaaactatccagcaaaatgccctggatgggccagaaagtcagaagggacttggcccaaatagcagttccaggagcagaggctcaaagctgtgatgtcccttccttctgaagtttctccaggacagactgtggtgtgtgtgtgtgtgtgtgtggtcaccagctatacatggtggacagatatccactcacagctgggctctgtgagagaggagatgggagcagagagtggggaggccatagtcaggccaccacgagaccagggcatctgtgagtcaccccagcatagggcgaagggacagagaggcagctcctcagctccctggcagagccctgtcagtgggagccacagagctgtcaaggaaagagctctggaaaggcccagcacggcactcacatctggcattcccagcactttgggaggcagaggtgggaggatcacttgagcccaggagtttgagaccagcctgggcaacatagtgagaccctatcactacaaaaacgttaaaaaaattagccaggtgtgctggtgcatgcctgtagtcccagctacttgggaggctgaggtgggaggatcacttgagcctgagaggtagaggctgcagtgagcagtgatcgcaccactggactccagcctgtgcgacagagtgagatcctgtctctaaaagaaaaataaaaaagacagaaagagccctggcctgggggtcagaagggcctgatttcagcctcagccctgtcagttatcagcagctgcatcaccactgtgaccctcagtttcctcatctgtacagtgagcaaaacatagttcctcccccggcagctgtcctgagacacagaaaccacgaccacaaatcacagggctgcttggcgctcagacatattaggaaaaaaaggaagaagatttgggtgatctgaaaaggtcagtttgagggttgagggagagagtcctgcatttcctccctggcctggcctcagctgggccccacttcctgtcccaagctggccagtcagctgtgcccttgtttaacccccttcctgcggccatctctgccgggaggcacctcggtactttggtttaattggcctctgcctgcattttaaagcagaaagcggcctctctctgaggacccagcgggggcagtccctccccgtgctctgtgcgcagccccagctgcctctgcactcctcatccagctgccccgatttcacggggctcaaatgttcaaggtcactgggtcgcccagagtggctgctccactcccttctcctcgcccacgctgctgggactgccggagcccctcccagccggccaggagcctggctgattcttctcctaaactcaccctgcccctagcttgctgcatgagctcaactccaagccccattccagatcccgatctcctggtctgcagaagagtccagtggccacgagcgaccttccggaatcgctcctcgcacggtctgagactcaggagggaacattcttcattctcagggaaggactccattggtcctgttcaggtcccgtgcccatccctgcaccaatcacagtggccaggggaatgggaaactgtgattggtcgggactgggttacatgcttcccctgttaccaagggtcaagggcaaagtactgggactggcaccatccccagaaactcaggggcagagggaggagcagcccatttccaagccgggatgcagttccagggcaggcagtagaggcccaggtaaccccaaaccggatgccactcccagggcagtccacggtggagtgagcagccaggtgggaagggcagggtgtctcctcctaactgcacctgaccccatcctgtctgatgtgcgtcccaggagagggggtgtggcgaca

SEQ ID NO: 16676 - DNA, 2300 bp, Homo sapien
gtgcaaggagaagcagagaacatcggcggtgacaaggagagggtcccgtgggtcctcgggctgaattggaaccaggtcctggcgttgcctgcccaggtcttcccatctgggtttgctccagtgcctgggccggtcagagctgcctctgccgccccatgtctctgatgggttgcggggaagtttgagatgaacggctctccctgctctaaagtcacttcagcagggacccaaaattgtcaagaagcaaatgaacccacgatgcaaacggcctctctcagcatcacctccacaaagccttagagctggacatgatcttccaggctgtcagttctgaacctttactggggaggacatccgaggcctgcagaagccctgtggcttgtcccaggtcccaattagctggggacacaagaggccctcttgacagcaggcaggtgacggctcctctgagaacagcactctggatggtgacgttcacaccctccaaaccccggccaccagcagctccaagcagttccaggcacgagttaattaaccctcacagcagctctccaaaggagataattattactcatatcccctctgtaggtggctaaaccgaggcccacagggatggggtgagtgtcttaaatgccagatgagaagttaccttgcatcggagcgccgtctaacctgcctcttaattagttggggctaagaggccccagtgactttcaaggattccatttttgttattttcctctaaaaacgatatgcaatgctccagaaagagaaaaccctagaagaatgtaaaactcaagttccctcctacctggtcaccgtgggcaaaaccaaggtgcatggacgtggttttcagggtgtcagcccacttcaggttataggtggtgtccagtgatggggtgggaggatggagagcatgtgcacggggttagtgttgcttccaagcttatcattgccactcttgatttcaggagctctggaagcaaagcggaatagattcacgttatctgagcaggacacgcccaccacagcatgccagcattattttgccagaaacctcacagtccccaggtttgccacccacatgcagagccctgtgtagggtcttagatggcacagatggtgccgggtgccacagccggggttatcctgtgagttgctatgttttcttttcttttttttttttttgagacagaggctcactctgtcacccaggctgtagtgcagtggcacgatttcagcccactgcaacctctgcctcctgggttcaagtgattctcctgcctcagcctctcgagtagctgggactacaggcgtgcaccaccatgcccagttaatgtttgtattttcagtagagacggggtttcaccatgttggccaggagggtctggatctcttgacctcgtgatccagccgcctcggtctcccaaagtgctgggattacaggcgtgagccaccgcgcccggctgggttgctgtgttttcatgactgctttagatcaatttgccaccgacctgcctctcactggggtagactgacttcaaagcttttttctcctccaggtttctgaaagttgttttttgctgaaagcccggttcagagttctcatgtgtgttttggggacccagggcatttaccgaacccggtgagggctggaaattccagtctcagaaagtcagagtcgcacaggatcggggaaacgttcaggcatcctggactgtttggtgacgaggtcacagagcccccggaggatcaggagctgctcgttaaaagctggggacactcagaggctcttgtttttccttggaggatttttatgaattatgatttcctttatttctgtccataattttgtgcttttgctataccaggattttagtcgagattcaatgttatcacctgccttgaagtcttgtctcttgacaaatttgcataattctgtgttgtattaattatctagtgctgcataacgaatcactcccaaaccttgtggcttacaaccacagtcatcactgatgatcttttacagtttctgtgggtcaggattccaggggtggcgccaccaggcacttctgccttggggtttctctcggagttggagttggacatcagctggggctggagtcacctgcaggctggcctggggtcgggcagggggatctgcttccaaggctctgcttcagaggcggctccctcccacggtaggcgcatggtttcctgtctccaaagtgggcctctgcacaaggctgcttggatgacctcatgatatggtggctgctgaccagggtagaggctggaac

SEQ ID NO: 16677 - DNA, 2300 bp, Homo sapien
aaacaaaacaaacaaacaaaaaaaaaaaaacaacaaaaaactgatgctggctgggcatgtggctcatgcctgcaatccaagcactttgggaggctaaggcagggggatcacttgggcccaggagttcgaggctgcagggagccatgattgtaccattgcactccagcctcggcaacagagaccccacctccaaataataataatcatcatcatcatcctgatgcccagggtccatcgtcagagattctagcttcgcggactggaacgaggccaggacatcagtattttgtggagagctctccaggtgattctcacgtgtagaccctgctccagtcatgggggtggggaatctggagatggcccagggagctgcttgcctagggcagagcccaccaggacaagctgcggcccaggatggcatgtgccctaggggaatgggagggcctctcataaggagttgagctgggctggatgggctcctaacaggatgtgggcttgtgttgggcgggcctgagaagggtgtggaagtgggtcccacactgggttggacagtcaggaagcaggggtcactcagtgctgggctatcttcattttttttaggggctcaaaaggttaaagcaaggttagagttgtcacaggtaaaggaacagcaatgaacaacgctggttgaaagagggggacattgagtcattctgtggctgcagagcggcctggtcgctgtcttatccccagtgaagtcgagagggccctggcctgtctctgccatcttctgcaggtgttatttatgttcaggcaggaacatcacggcccagctgccaacaggtggcttttcacgttctcagctgacaccaggtttggtggtggactcaaggcaaaagggatgccccacccccccgcccccggcttggcagctgccatgcagcttttcaatctcaaaagctccccacttccctttcctttctgaagctacacgttgggtgcttctcctggcatgggagagcctgagctccacagagctgagggcactgcccctggcgggcgggctaccctgcctcacccacaatgcccaggagtcagctggggcccagcccccacagaatgcaggcacccagcccctctgctagagagccccggccccaccgagggcctctccccacctggctgtagccaggagaagaaaagggcaggaggtcagtaaagacaccatgccaggggtctactcccagctctccaccacgcagccgagtgatcgatcccttccttttcctgggactcagtttcccggcataaagcaggacggctggctatgtctctggggcccgtttgctctgtattccctggcaatgggatgcggtgcagaaaggccactgggcagcgattctgttccctaaccatggagagacacaccagggacctcaggaggccaaggggctctgtcctgcggctttttctgctgtctcctcttatctgggcctcgcttctggaaccttctcctgccctagaccactggggtcctgttctcattgtctccgctgtcttcgcaagcagcccagaggcaggaggccggcagccgagagcagcaccaatggccggggcgtccccgggacaaccctgggggcagcggcactgccaggcgattcccagccttctcccatgcaaccctcgcaaccccgccaggccagggcctgtgttcaccctcgtttcactcgtgaggaaactgaggcagggccaggccgcagccgctttcccaggtgcccccagaactcgggaggcggcggccggtgcctgtggccccagcgcccggctcctgcccgcaccgccgtgtttcctaacctggtctgcagctggccagctgtgcggcctcgggcagccccgtttacctctctgagactcagtcttcctgtcaacaaaatgggagtcacaatagaacctgccaccctcagttgtcgggaaggtccaatgagcgagtccagcggccccgggctcacagcaagcgctcagcaagcggcggacagcggcgggggtgcggcgccctctggtggctaggagggcttcctgcaggaggaggggatgcgcggcaccgtcagaccgacaggtgggaaaccacagacctcctttctggaaacatctgggtcgggactccccaccgaggggtcatagaccctcacttccagggtgtgccctgacctcagcatgactggggctggggcatatcctggagccccagataggaacccaaccagagtgaccgcggcaagcagggcagtgggtcccatggaaaactccgcctccgcttcccg

SEQ ID NO: 16678 - DNA, 2300 bp, Homo sapien
tcctgggcccaaatgatcctcctgcctcagtctcgcgagtagctgggaccacaggcttgtgccatcacacccagctaaccctggcctctctgaggtgcttgctgaaggcttactggaattttcagttttgtttctggaaaaccaagtgtgaaacacagcccagggtttagtgtgtttgttgagtgaaaaaccgcccaccctctgtggttcaaggcgtccctttctttctggtggatcctcctaggactcccgtctccagacacccctcttagttcctgagctcagggagtaggtttaaggtgtctcatgttcatctgagatggaaagctttcttttttttttcctcctttgaaacagggtctcactctgtcgcccaggctagagtgtagtggcacaatctcagctcactgcgacctctgcctcctgggctcaagggatcctcctacctcactttcccaagtagatgggactacaggcacacgccaccatgcagggctaatttttttttgtttttaatagagacagggttttgccatgttgtccaggccggtctcgaactcctgatctcaagcaatatgcctatcttggcccccccaaagtgctgggattacaggcgtgagctaccatgcccttaggaaagcttttaaattttaaatctcttttgtggtgcaggtctaataggttccagggcttgtggaggtagggctagagtttgcacctaggtgtcactgaagcaggtacctgaggcaggtgaggggctgggagcctgccttccgctcttggaggcacagtttagcttggcaggggcctcagggtgtgagcaaacgcgcaccaggcaccagcatcctgttgccttggcacaaagcacagtccgtggtaaggagcaccgcgtgcagcatccccagggcaggtgtcctgctctgggaggtgcctccgtaggcctggccctggcacctacctagctccttccaggcaaatgggagtggagggtgggaaggaggtccagggaaagagagctgtgcccaggaagggctcgcactatctgggggcgcggggctgtgggtagggcgctgcttaggaagagagaggaggaggagcaggcctggagggaaatggagggaggccagccttagccccagtgctgggaaattaggagtcaagcgacaaacctcgttagcgaggagcgcgccggctgcaggagagcaattcccacccttaaactcggaggccgtgctccggattactaatttccgggggccgggcgcactgacagtgagtgtcatccatctcccccttgccagcccgcctggtggccgccagcgtttcccggccaggactcacagagcggctcgctgctgccccccggcggttgccggggtgtccggcagcgcctcgctcccctaggcctactgggttgggaaggggagtgacttccaggtgtgagcagtttggggcgcagcttgcatgtcacctgtgtgcacatgatcttgagcaactcagggcctcaacttcctcatctgtgaaacgggaccagaccacccatctcgcaatccaggggagctagatgtatacgccggagggattggccggctctaaaaagccgagtgatgcacctcccagtggccactccacacgtttttgtggttggccgtcgtggtcctgctcaaacaggtggagaaacctaaccccaccttcacccctggcccaagggcctctccaaggaagaagggagtaggtggtggcaccgtgtccgggtgagagacctggaggtggggcctaggtgtctacccggccaggtgcgagaggttcatttgcatgctgttcccctccccccgcagcttgtaatccaggtgggaaaggggttgggccagtcccggaggtgaattttgtttttaaggctcggggccagtcgtcgtccattccttcctaacacctccctatcctcccctccccccgcccgtgactcccagtgggggtggaggcgcccctccccctccccctccccctcccagccctggccgcctggggccgggtgaatccgccggccagtgcgggtataaattacccgggcccgcgcggccgagccaccgtgtggtgcgtaaattatagcgtccggccaaggccgcaaggggggcgccgccggtgagctggcgggtcgtgcggggaagcagcacccccgcgccgtgccagggccggccagcgtccgcaggtaggagccagtaacggcccgacccggcctcgccggtccgtttcccttttcgtttgtggtctgcccggagccttgtgcaaggcggggggcc

SEQ ID NO: 16679 - DNA, 2300 bp, Homo sapien
aggctcggggccagtcgtcgtccattccttcctaacacctccctatcctcccctccccccgcccgtgactcccagtgggggtggaggcgcccctccccctccccctccccctcccagccctggccgcctggggccgggtgaatccgccggccagtgcgggtataaattacccgggcccgcgcggccgagccaccgtgtggtgcgtaaattatagcgtccggccaaggccgcaaggggggcgccgccggtgagctggcgggtcgtgcggggaagcagcacccccgcgccgtgccagggccggccagcgtccgcaggtaggagccagtaacggcccgacccggcctcgccggtccgtttcccttttcgtttgtggtctgcccggagccttgtgcaaggcggggggccggcccgcgtgcgcccccacctccgggccccggcgcgcgctcggtcggaggtcgagcggggagcgtggggcctgagggagcccgccagaccctgccccccggagggcacacaggctggttctgctccccgctggcgcgggccccgaacgctctaggcccgccagcgtcatcgggaacagatggatggggggtggcaggcgcccagcgctcgctcccgtcgcaatccgggctggcgcggggagggggagggaggaaggcgggggaggcgggctcgcggggacggcagcgtgcgcgcctgccaagcctggcgcgggcatgtcccggggcaggtttggggctggcacgagggggctgaaagtcgaaacccgcaccgcagcgcagcgctggggcggccgcccagggggtgctggtttgccccagggctcagaagtagggacgcgctagatcagaggggtgttggaagaggatgaggagggagcgaccccggggcctcagagccgcccgggggggttacagcccagggcgccagaaggcggcaggggaggctcgccgacccctgcccccgaggcccgcccctttaaccccgagcttcctggggacgcgcccgccgcgatggggtgggggcggggcggggcggggcggggtgggcggagccggggggtgggaaggctggggccttcagtccctctccgcgccgcctgtgggtgcccaggaatttcaggacgctccctgagtcattccagtcaagtgcctgggtgaggtagggtggggggtgccaggaatggggaggcgctgcgctggggccagaagcgcaatgggtcgtgccagtttctggaggcgggcgacctcgcctctgaccgcaaccccagctacttaatgatccccctggcgaagcggcgcctccgtgggttctccagcccctgggccgcgggttctttaaagaacaccccccgcagcggcccgcaattgtggccttcccaaaagttacttaaaactggggggtggggtgccttatggaattttgaggccaagttcttagtattcagccttttctagttggggtaataaggtcaggcatggggggggtggggcttgggtacacagtctgttttgtgtcgcctccccccaccccacgcgccaccagcgcccagaaagttgttctccaaaaggcctccaggacacggagttacccgtccgcccattattgggcctgctctgtgtcaggcactgttctaggttcccgggacgcagctgcgagacagggctccgctcacgtggcgagggtgctgcactactttaagagttaagtggccggtcttagccaccaaggtccccgggacccccgagcagtccagccaggggctcccgagagtgtgggggtggcacctccgcggccccgctggtgtccccggctcacctggccggccgggccggggaggggcgtgtgcctgggcgggtggatccgggcgcccgtcggtgcgcgcgcgcgcgcctgtgtgtttgcggctgaaacccgacacctcccgctggctgaggtcagggagccgggagcgagccagtggcccgggagtgggcggcgttgcgtttgggtgtgtcctcggcggcgacagcagcaggtgtttcttggccggggccccggaagctccacctccccagcgggcccgagctgccgccgccgagcagccccgggtgagataagcagtttagacaaacactgggcgacggtggctccagcatgtatcagccgaggtggagctgcggggccctggcatgaaaggtgagcgcgccgcacccggccggggacggggtcctcccccctccccccaccgcactgtcctcctgcaagttcgcgggtttcgcgggggcggccgccaacggctcccgggcaacttcccc

SEQ ID NO: 16680 - DNA, 2300 bp, Homo sapien
atgagcgcttgcccttaggggaattcacgcaagcaggtgggaaaatcgaccgaaactggatctgtcccaggcctgagagggtctctgccttccctagcagcttaggctgggagcctccctatcctcttggagcagcctgcacacacctgccgcaggtgttggagggccgggcacagtggctcactcctgtaatcccagcacttcgggaggccaaggcaggtggatcacttgaggtcaggaattcgagagcagtctggccaacttggtgaaaccctatctctactaaataggaaaaattagtagctgggcatggtggcacacgcctgtaatcccagctactcgggaggctgaagctggagaagcgcttgaacctggtaggcggaggttgcagtgagctgagcttgccccactgcactcctgcctgggtgacagagtgagtctttttttttgttttttttgagacggagtcttgctctgtcgcctaggctggagtgcaatggcacggtctcagctcactgcaacgtctgcctcctgggttcaagcagttctcctgcctcagcctctggagtagctgggattacaggcacccgccaccatgcctggctaatttttgtattttttagtagagatggggtttcaccatgttggccaggctggtctcaaactgctgaccttgtgatccaccctcctcggcctcccaaagtgctgggattacagggatgagccactgcgcccggccgagtctttaaagaaaagaaaggaaaagagaaaatgaaagacagaaacaatgatccttggggtggagtgtgtgtcccctccctgcagccctgttggcactggctctctaaggggctgcgccatctgtgtcatcttaggagcggcaggcagccagggaagcctgtggatgactgaagggtcttttctccctgactgaagggttggtttcactccctaggccaggaccaaaccgtcacgagccaggtggccgtgaccctccgcagcactttggggggccaccacctctgatttcgcccaagccccagctccatgctgcacccacggccctctggaaccccgtgtccctgatggacaacaccttggagacgcggcgggccgaaagccactctctgcacagccacccggctgcatttgagcccagccgccaggcagccgtgccgctggtgaaggtggagcgggtcttctgcccggagaaagcagaggaggggccacggaagcgtgagcctgcccctctggacaagtaccagccacctccgccgccaccacgagagggagggagcctggagcaccagcccttcctgcccgggcccgggcccttcctggctgagctcgagaagtccacccagaccatcctgggccagcagcgggcctccctcccacaggcggccaccttcggggagctcagcggacccctgaagcctggctcgccctaccggcccccagtgccacgggcccccgaccctgcctacatctatgatgagttcctgcagcagcgccggaggctggtcagcaagctggacctggaggagcgcaggcggcgggaggcccaggagaaaggtctgcctccccgcgggccccgagctgctcagggagagccgcacagtggggatggggagcctgcatgccagccacctgcccctctccgtccactcctgctttttgcctggggtagtcccaggccccaggtggcaagtgcactggcttctttgtagcagcatgacaccctcgtaggggaggcagaccctagtccccgtgcctgtcctgcctcgatgcaaattgtcccaaaaagccaaatcaaagcccgcctgtgaagatagttccgcagacaagcatgatgaataagtgatgagcggaggctaataagatagttttaaatattaatagtgcagcataacaggagagccggcctgggctcagcgggggctccacatacagggccgctgccacgagctgcagcaggtgggtcaggggttgaggacgcggcggctggcactgccccgggtcagggtaggaggtcaggcacttcattcttatttctgcttgggggtggggcgtcctcagccagcggctccctgagttctccagagagccaggaagagcaaccgagcaggcgagagtgtgcagaggggagcaggggctccagcccagttttcttcctgatgctgaacactcaggtcctgtccagtgctgagctcagcctcctcttcaatagaagctggggcacaggcggtcttcctggttgttggtctaggctggatggagggcccagccaaatttctctc

SEQ ID NO: 16681 - DNA, 2300 bp, Homo sapien
tgctgggtgttgtgtcctggtggccggaggcctggggaagggctgccaagcagggcagcacacactgagcagatggcttgccttgaaagatgcttccagttcagtctggccacacagggccacattgggacagaccctctgggctcgaatccatatagcagaagaaacaatgcagccacaacacctgctcagggttttggcttccttggcctgcagcgcaggctggcttggtgcccagatgttgacgttcctggccctgccccttacgcacgctttcaagtcctcgtgggcccctggcctcctctctgggagaaagtcgaaggaaagcagagttacttcttggaccttgagcagcttcaaggtgttgatcagggtgtagccgtttactttctccttttaaccagtcagtagttttccctttctcttagcgggctagtgacgtgttgattgccagcccagttccctagatacaaagcatctttttccctgaatttttggaggaaaaaaaattaagggcgatgcagcccttgagtttcacagtcaagaagggccgggtgacatcagggatctgctgcgtggaacatcgtggggtcatctttccccttcaggaagtggcagtaatggtaggagtgggggagaaggcaccctgcctcagaggccaggcctgggtctttggggtgtttctttgtgttggggccaccttgtctgacttgaaataagaatacatcctcgcacgtcaccaccgaggtccgtgggcacagtgattcacagaggcgtcgtcaccgcacggacagctgtctttggagcacgtctaggacattgtgtagtggatgccgagagcaatctgggctcgctttgagatggttgcttcctttcaactgggcctgccccatcacacctgcttttggtttttcgggctttagtgctttgcctgcccctcaaggctcggctagaatcccgctgtccttctctccaaaaaatgatgcaactggctcgttaatctcaggctgcttttctcatagacaaagagagacttgttgaaatgctccgtgccatgaagcagaaggcactgtcagcagcagtggccgactccttgacaaactctccgagggacagtcctgccgtctccctgagtggtaagggaaggatagccccacctgccaccacccaggaccatcccatgggctgcccaggctcagaggcgaccactcgaggtcttcatcattgtgaatgtggcctcctgcaggctgtcttcttccattcttgtaccagcgtacgattcttgcacagttgtgacagtcattgggacggaacgtcagtttgaaggcgggctcagagttgaggggagggtctggcttctgtggagctctacgtgctggtcactatggtcgtagtaaccgttgtccttcagttacggcacagaggctcacatggaggccaatccaatggtaccatcccaggagggagggcgtgctccagccttagtgcccgcagcctggtcctgccactagcctagccgccctggctctcttcctgctctttgtcttcctcactctgccctctgggccctgccggcacctgccgccacacctttcctcctcttacagttctggctggcctctgccctgtcagatgtcagagggaatctttacagtgcgtcccagtcctcggcccctcacacactctcttgtccggttggactgaatacctccatgctgcctccgtggctgggggacttccttcttcctgtggatctgcttcttccttcttgggacatctttcaaggatggacttgccactaaacaccccactgtcttcagagaatagccatgtgcgcggcggttacttaaatgttccccgggtcttggttctttgcgctaggtctttgttaagtgtaagctctagagaccaggatctgcgtgctggacactcagcctgttaacttgcatttcttaatattttccttcactttgtctctaaaagaaccagccacgcagcaagcctctctggatgtggagaagccggttggtgttgctgcttccttgtctgacatcccaaaggccgcggagcctgggaagctggaacaggtccggccccaggagctgtcgagagtccaggagctagctcctgccagcggggagaaggccaggctgagcgaggcccctggaggcaaaaagagtctgagcatgcttcactatatccggggcgctgcacccaaggacattcctgtgccgctgtcccacagcaccaatgggaagagcaagccgtgggagccctttgtggcagaagagtttgcacat

SEQ ID NO: 16682 - DNA, 2300 bp, Homo sapien
agagtttgcacatcagttccacgagtcagtgctgcagtccacccagaaggccctgcagaagcataaaggtaatgaggctgccagtccctgctcagctctcggctgtggttgaggctgaccaaagttgctgagcgccacagctgctcagccgttcagccgtgggcacaagtttttataaactccaatcaccagaagaaaataatttcgttattatgccaaaaccatgtttgtttgtttatctccaagctctaaaacctgaactcgtaggtgagaaacgtttgtaggcaccagcgctgacgctgtgctgtgagcagggacgcatcgatcggtaagaggtaaaggagtgaacgccgacaggcattggtttttgcagagattaaaagattccccaaaggcaggaagagcacttgagtggatttttacccgcattcatttgaaagaatcatgtttttcaagacagagatgcagatggccgccagtcctcagggtagagcttcccttccttcatggtggtatctaaagatgtcaccaccagccctctggatccgtgggttccgcgtctttggattcaaccagcttcagattagaaatatttgtgggtggggtggaattccaccaagttccaaaaacaaaacttgaatttgccaagcaccaggtactacattgaatccatgcaaatcaagtcaagtgtaggcattgtgttaggtattacaagtactctagaggtgtgcataggtgatacgcagatactatgccactttatatcagggacttgaacatccctggcttttggtattcacaggaggttctggagccagttctccatgacagataccaagggagactatacagtgctactgagatgcctttcgaaacttcagaataccctccctccctgccctttggcagtgcaccttgtagaggcttttctgtggccctaggacactttctgccttattctgaccttgtcctggccttacactaaactgtttcctctagattttagtcactctgccataccagtttgagccaagtcactccattgactgggctggtctcaggccccaccaggggctgccatccccacgggaggccaggtgtgctcctgaggatgtcacccaccaggccacgccatgagacagggcatgccctcttgaaacggggcacaatgaggctgattcctgggggagggcagagccccattatgcctagggatcaaaacagccacgccttgtgagaggatgggctggtgtctgctgagggctgactatagaccaagctcaaagagatggaggcagccgggcgcagtggctcacgcttgtaattccagcactttaggaggccaaggcgggcagatcacctgaggtccggagtttgaaaccagcctgggccaacatggcgaaaccctgtttctactaaaaatgcaaaaattagctgggcatggtggcacatgcgtgtaattccagccactccggaggctgaggcaggagaattgcttgaacctgggaggggaagttgcagtgagccgagatcacgccatttctctccagcctgctacccagaggactgagggcagccaaaacaaaaaatggagtctcagagatgaattccaacaaaaatggtccacgtaccagaatcaactagcactcagggctgcgttgtctcctggctgtctcggactttctcaagtggcccagaggccttgggctaggtccctcctctctacgcgatgtcatcttggtccccggagccctgcagtcatgttgactctgcaccaagggcagagcagagctcccttctgagacagcaccctgtgtcccttcccccaacacactgatgcaagccctgtcccctccacagggagcgtggctgtgctgtctgcagagcagaaccacaaggttgacacgtccgtccactacaacattcctgagctgcagtcctccagccgcgcccctccaccccagcacaatgggcagcaggagccccccactgcaaggaagggccccccaacccaggagttggaccgggactcggaggaggaggaagaggaggatgatgaagatggagaagatgaggaggaagtccccaagcgcaagtggcaagggatcgaggccgtttttgaagcttaccaggaacacatagaaggtaagggggtgctggggaagaggggggagggggtcaggaaagtacctttggaaaggaagctgagtgatgagttcatgcagacctctgccagcctggggactgtttctccgtcctggggcacagtagatatgaatactggaagtttcttccggctt

SEQ ID NO: 16683 - DNA, 2300 bp, Homo sapien
ccacattttgactattatgaatcgtgctgccatgaaggggaagacacaagcctaccaagtgattctcacacactcaggcttgaggcatcaggacaccacccttctgcaatctgtaaagctgcacactttcccatcctgttctttccaaagcccagtgaggctaacagcagccctgtccccattttacagataaggatgccgaggctctgtgatgtggacagccaggctctggtagccctcctacccatccctcagcagcctctctgaacctcagctttctcatcttttcctttgctcttttataggctggacaaatcaggacgcaaaccctcgtcagctttggaacacaaatatttgccagtgaagaaaacattccctcatcagtcaaaacccggacagtctggcacacacgtctgcagctgcctgagggagcttctactgtgggaggggccagatggcccacagctccccctcctccctgaacactgcaggctccttctcttcctacttcattttgaagataaagagacaggggttcagagttgtcacttgcccttggtcacatagcatccagagtgacctttgatttcttctcttcgagcatatctgtcttttctcttttgtttttatttttttttaatagagatggggtcttggcatgttgcctaggctgatctcaaactcctggcctcaagtgatccttctgcctcggcctcccaaagtgctgggattacaggcgtgcctggccaagagtatgtgtcttcacacatgaaagtaactcagcgaaaactccagatctgtaaataacaacttctaaggcagatacacaacagacacagctttgtgagcaggcctgtgagctttacggctttttttcaccttcccagtgaccctctatggggcttcagggaggttggagaggagagcatccggttagctggggcgggggcagggggtgctttctgctggaattccaaaccctggaatcctcatgtctcctgtgatttttctcgcgggcctaattatcaaggtttcaaattcgactgcagtcctagaatagcgcttcacccccaggaagcttttccggccatgaccaccccatcaaaatcacctggccctggatgaaattcagctttctgtcctttccacgactccggaatcccaactcccaggagcgtgcacacagacaatgggcacccgctaggggattctgacacaggtgagctccagccaccgctctggcttcacctgcgcccactgtacaggggcagccggtccagcgagcaggtgagtatttgctcaggtggtgcaaacctgccgctcctgtctcatgtggggctcctgccgaagtgcaaattctgagctcctgctctgaagtgtccgaattggaagctgtggggtgggatggaggaatctgcatttttacagctgttttaaacaatgtgtgcagagagggcagaagattgtgaaattaatggaaacaaggtcttccctcatccctctatctgtcagcccgggtgatgcctagtcccgggcccggtgctgagtttgggccaataaatgcttgtactcttggcctggcacgatggctcccacctgtaatcccagcactttgggaagtcgagatgggaggatcgctggagaccggaagttcaagaccagcctgagcaacacagcaagatcccaaatccacgaaaagttgtttaaaaattaaaataaaataaatgcgtttactcttggccccatgcggaacgccggcgtagaagcggcccggaaccccacccccggctcttgattagggccgtttgcggcgggcgccggggacaggtgaagggacaccaaagctggcgcccgcggcaggagatcctgacagcgccaggtgcacgcccacgggcggggcggggccggggtgggggcggggcctgtccgcgggccggggcggggccggcgcgcagcctccctcggccttgccaatccgcgggctcttcgcgagcgcggtctccgcccccccgcccgcagacagcgcctataggctgtctaccgccttcctataggctggcgcaggccgtcttccggccggggcgggctctcgccgtggcgggaaaacggcggccgcggcgtctcctccgggacgctgaggggcccgaggagaccgtgaggctctggcctgcagctcgcgccgccatggacgctgccgaggtcgaattcctcgccgagaaggagctggttaccattatccccaacttcagtctggacaagatctacctcatcggggtgaggcctgggcccgccgtggggag

SEQ ID NO: 16684 - DNA, 2300 bp, Homo sapien
tcaggctgcaggctgctgtctctccgggcatgacccggagcccccctccatcaatcacgcctttggacacccagtgtaaccacagcccccggcaaacaaagactctcctatcaggcaagatattccaagggcttagagagcacctctcagaaaccgcggacagagaccagacctctttttaggcaagattaaattatttactgcacaaagggcccagagaggaggtgcagtgcacgcagggtcacacagctggtggcctgattccaaagccagtgtgcctactgctttcagtttttctgagcctgcagccttggtcaagctgcaggtgaaccaagaatttggcctgaatggcatggctccaggtcctctaggtgtacatgcttttgtggattcaaacagatcatccctgacagcccaggtgtaacctgcctctcagaggaacaccccttgggtgaacaaaggttaccctgagaagcctcctgtgatttccccacagccgggtatgagattcccactgtgcacctgccatcccttcctactgggtcagggaaagatttgctgactgtcagtaatctatcactgcataacaaactatgccaaaactttgtggcttaaacatcaaacctttattatctcagagtttctgtgggtcaggaattgaggagtggcttatctgggtggttctggctcagggtcgatcatgatgttacatccaagatgtcagccggggctgcagtctcatctgatggctggactggggctggaggctccactgctgaggaggctcccttgtggctgttggctagaggccttgattcctcacccacgtgagctgctccacaggctgcttgagcatcctcgtaacatggtggctggcttccccaagagcaagtgttccaagagagagcaaggaggaagttgcaatgtcttttatgacctcaccgtggaagtcacacaccatcatggcagtcctatttgttggaagcaagtcactaagtccatccacactcaagggcttagactctgcctctcagagccatatttcagaacccccacactgaccctacagtggtcacttaggaacattgtcctaatggtggtcaagggaggcctgagaacagtaggaaaaatattcccccaaccccttattactcagcttctcctgttggtcaggggctctgatacttgagctaatttaatcccagcctggcaccgtttggggcaaaaccaaagtgatgggacatagagacaaggattgtaacacctagcttaatgctgcctgaagggtttttggttgcgtttaatttttttttttttttttttttttgagacagagtttcactcttgttgcccaggctggagtgcaatggcacaatcttggctcactgcaacctccgcctcccggattcaagcaattctcctgcctcagcctcccgagtagctgggattacaggcgcataccaccatgcccagctaatttttttttttttgtattttcagtggagacggggtttctccgtgttggtcaggctggtctccaactcctgaccttaggtgatctgcccacttcagccttccaaagtgctgggattacaggtatgagccaccacgcccagcctttttttttttttttttaagatggagtcttactctgtcatttaggctgaagtgcaatggtgtgatctcagcctacttcaacctctgcctcccgggtttaagtgattctcctcctgcttcagctcctgagtagctgggattacaggtgtgtgccaccacaccgggctaattttcgtattttagtagagatgggggtttcaccatgttggccaggctggtcttgaactcctgacctcaagtgatctgcccgccttggcctccgaaagtgctggcattacaggcatgagccaccgcgcccggctggcatttgaaatttaaagcactcctacttactctgtctcgagcatgcgctaggctcaagggaaacacagatgaatgaaatagagactgtcctccaggtgttcacagcaaagagaggcagaagtaaaaataaatcatgtcattcattgatgaatgagtgagtgcagatgggcaaaagagggagcagccagatctgctgggacacctttcccaaggaagagcccgttgcactgggctttgaaggataagcaggagcttgttactcaggcagaggaagaaagagcatcccaggcggggggagcagcatatgcaaaggcacgaaggggccccaggagcctagggagtctggggaagtgtgagcactttggagagtggaggctgga

SEQ ID NO: 16685 - DNA, 2300 bp, Homo sapien
gggagacccaggacctgtgacctccctaagcctcgggccccacacctgagagggttgtcatgaacaggcagtgacgtgagggccgcctgcccagttggcgccaggttaaacacataacctgataaataagtaaatccccagttctcctttgaggaaactgaagcccagagacaagctgatctccaccagtgtcactccttctgcacccttccagaacaagaaagcaggggtgagggcaactgcttgtctgtcatccctagggacttccgctgccaccattagaggagacagttcacagcagctctgccccaaagctccctggagaggagcaggacataggaccctcagcagcccaggaaatggccccttgggaccttcaggaggtgctgcacttccccagggacccgctgactcctgaggggctggggcacagggatcccctgggatgggcaggaaccggcagtgcgggggagatagatattaatcaaatctttgcacaatcatgaaagggaacctggctgcagggcagggacagctgggctgggaggtgactgatggaggagggagacgctgtgccgtggggtcccggagcctcagttcttagtcgcctaggcttgtccatcttagttcctcagaagcctaggtctggtccctgcctccccacacccagcgaagggccggcacacagccaggcatgatgatttgcccacagccagcttgttgagccccctaaccctcctaccctgaagcctctgagctctttctggctttctagcccctccccagggatgtgccctcagcagggagccacctgcacaggcctcccccagcccagcagctggggcagcagctttgatgggcacgcccaccaccccagcaccggccagcggcaggtcccatcctgcctccggagggtggggacgaatggaaggaacgtcctgccccaggcctgccccttctctttgttagaggcgggggagtgggggacatgatacatttcctgcctgtcagtctggactctataaggtcaggggaacctaaagatcgccccatttttaggaatgactcaagcagcagcacacggctaggaagatgactccatttcctgcaactctttgccacattcactaaaggaatgtcactttcctgctctgtgactcagtttccccttctaagcctccagaaatatatagggcagggggtgtggagacgttgggcttgtagggtggacagggtaccacaggcttgtgacaatgacatagaaagcacagggcaggcatctttctgttcctcctgccccactgggcaggtgtctgcagaggcctccacacaggtagggctgacggagggagtgtgcctcctaagaagctcatctggccaaaagacctctgtgtccacaccgcggggagctctgtgtccacaccgcggggaggtgggggattcctctccctgatgctcatcaaggtcatcaccaaacacctgaagctgcccagggggccaggaggcaagccctgacctccttgtaggctgcaacccagggttcgcccccgaagtggggtgcaaaggcttgcgtggagagcaaaagggaacccccacagctgcagccacagggaaggggcactgcctaccagtccctggggtcctgcacaaggggagggcggctgcagacggcgagatggggcgggggggctgttctcgcctctcctcttcgcttccgggcggcgaggtccactgaacccgggccccccagtatgggaggaaccctggtgccctttttcaacacccagggctggggtgcagggcctcagggagcccggcacccagccccggagaggggcgcacggtggggagccctacgggccgcggcccaaactttccccgggactgcccggggcctggagggaggaaacaggcaagcagcgaggggtcgggaccgccgccgagggcgccgggcgggtcctggcacgctccccagggaggcgacgggcgggcccgctccgccccgcgcctggcccgtgcaatcctggcgcccgcggcccggcggctgccgtcagcgccgccctctaggagcggggcgggaccgcgggaggcgcgcggctgcccgagcgccggccgggccatgacccccgctgctctgtcttgcaggctcgtcgccgcggccccccgagcccgaccgccgccgccaccaccaccagcgcccgggcgggcctcgcgcgcctcgggcgcggctccgcagtgagcccaccaagaaggaagcggtgagtgccccgcgcctcgtgcccgccgccccttccccggga

SEQ ID NO: 16686 - DNA, 2300 bp, Homo sapien
gatatcttcaagagctaaaatacttagttttataaatatcatctaagtattataatcatctgaatcctacccggaaatgatatgaagtttaactttaacaggcactcaaagatgtgcccaggaaccttacgccaggactctttgcccagagatacttcttgcttgcccagaactgacttgggtgtcataattagttaagttataaatggtagattatgaaatggcttcgttttacttggtggaggagggacacagataaagaaattctacttacaccttctcaagcttagctacttcttacatcaattagctactattttttagcatcacagtttattcttaaatgaaaaacaaacagcacctcagctcaggtatgcaggtctgaagctacagtttacttttccttcaggttttaacaactcgatggaatttatagatggtctttttcccttcattgatcaccggaactgaaaagctactgcctaaaattcacttaccaactagtctacctgcatgctacatcttttttcccactgtacttcaataaagctgtcattgcaaacaaaaacataaaagcgtgttggacagatcgtctgctcctgctgtttaatgtcacagaaattcgtttttttttttttttttttttttttgagacggagtcttgctctgtcacccaggctggagtgcagtggcgtgatctcggctcactgcaacctctgcctcctgggttcaagcgattctcttgcctcagcctcccgagtggctgggatgacaggcgcccgccaccacgcccggctaagttttgtatttttagtagagaaggggtttcaccatgttggtcaggctggtctcaaacttctgacctcaggtgatccgcctgcctcggcctcccaaagtgctaggattacaggggtcagccaccgcgcccggccccacagaaattctttagcttttaaaagccatggaaacattctagataagttgttaaccattaacgggaacaaattctctttacacaaagctcaggcacattcaatcaaggggagccaggcctaagatgcatcacacagatctgaccatgcaactacctttctacaagtgtctgagctccggggtgcccgagtaccgacagccaaagaagcatttacactttgccagataaggaatcggctctgcgaaggtgcgaagaaccaaatcctagcgattaatgtcccaacaacgtgaacacttcctgcaactcgaaatcctcaagggaaactctgtcgaatccccaccaagtgaacgatgacttgtttctacaaaggctactgatttcaggaaactaacgtataactcgtcgccttaaagtgcctctaaaagcatccacgacggttaaagtcgctgctactacgggacgctatttattcagcgccaagacccaagcgccatcgtggatcaccccattcctggccacggcaaccctagggagcgggtcctaggagcctgctggagggcgaccgctgggccagcttcctctctgctgactgaggggaggccaggctgcctgcaaggggaaggggccctttccgcgcttaccagggtgagagccacctccagcatgggggcgagggccagggtgccgtggaagagggggatgcagtccacgaagagggtgtggtgggcgccggggccgcccagggggaggtgctccttacgcggcttctgcttctcggccaccaggagcccgttgacggcgcagtgcgggtacttggcgccgtgcagcaccatcttgcagtaggcctgggtggtcagtttcaccccgggcatgctgacccgggagggccccggaggcccctgggcgcgcggctgaggcctggacccgctgcctggccgcgcggcgcctcagccgagaagcgggacgaggcggcggcgattgatggcgcggccgcgggctggcgggggacccttcaggcccggccccgtttgggcctcggctcctggaaaagcgactcgcgcctctgggaagccgcagccccagactccagtcgcgcttctcgcccggcgccgccggaaagcagcctctccaacgcctgccggaaagcagcccggcccggcattttacgacgttcgcagcgctacccttttccgctccacggtgacctccgtgcggccgggtgcgggcggagtcttcctcgatcccgtggtgctccgcggcgcggccttgctctcttccggtcgcgggacaccgggtgtagagggcggtcgcggcgggcagtggcggcaggtgagacaggaggtggccggtgcggcgccgccaggcc

SEQ ID NO: 16687 - DNA, 2300 bp, Homo sapien
gaggtgatgcaaatggttgggagttgtgggggcaaggtggggagggaggtcattaaggtcagtcagttatggtgcagaagatcttttgaaaggggtagatctcgaagcttaaaaaagtggaacggaagggaagggtaagtggggaagtatcagtataaccaaagatccagaagagattcaatttgacttataaacacttcttaatctagaaccaagccctgtgagaacatttatatctcccctaaagaccctcaagagccgaattaaggtctttaaaactccagcacagggctttatacacagcaggagcaaaatgaaattagttcagcctatttaaaagtaagaaaagtcacacttaccatgagctcgtacacacacagaggtggaaattgctcgcttgccaactaggctaaataccctggtagccaacattctgaaagataaaaatgtacaccttctctatgaataaggacaaacagcaaggaattagtcttctttttgccccagagcattttggaatttttttgtttgcttctccccaacgcaaatgatccattctttatcactgtctctgaattcacaaaatgacctaggatgaggtttttcttagtaattggcatgcttttaaggagcttcattataaatcaactgccataatatatacgcgcttcaggtaattaacagaacattggtctttttaaaaaaacaaggagaggccgggcgcggtggctcacgccggtaattccagcactttgggaggccgaggcggacagatcacctgaggtcaggggttcaagaccagcctggccaacatggtgaaatcccgtctctactaacaatacaaaaattagccgggcatggtagtgggcgcccgtaatccccgctacttgggaggctgaggtagaagaatcgcttgaacccgggaggtagagactgcagtgagccgagaccgcaccactgcaccccagcctgggcaaccagagcaagagtccgtctcaaacaaaaaaaggcaagaagaaaaaatgctaacaaggtgactctgaaaaagctagagatcattaaagcactgtgctgccgtgacagactccattcttcagggagcggtggggggaggtgacagctcacagggaccgtggcacgcatcacattcaactgagtgtttaaaacctaataccgcctgtacatagactagaaggggaaattggagaaggctgccaacacagccccgatcaatttccaatccctgaggagagcggaaaacctatgagaccccccctcacccgggccctcctctattcaggcccatcaaccttacacggccccctttaaatcgacccttcggaggactggtgagagtgatgtggggaaataccctccttggggcagaataaacaagcatgacgtcagggctgaacgcccgcgtctagcttctctccttgggcctagcccttgcgtgagcaaacaataggcgccttccaggctggaaagccgagcgccgcccgggagccccgcaaaacccgggaggggttgcacagggaccttttgaaggagcaagggcggaggctgcaggcacagagcgcgggcccgcctccccgcagcctgagccctcggccagcgggcgctccaaggtcagtgcccgaggccggtccgcagccgctgcgagaccgggtaagatggaccgggcacttcggggcggccccccgagcctggagccaccgagcccggagtccccacgggccggcctcaatgtcacctggctccgaggcccattcggtgcttcctgctgaagccgagcggccaggctgcggacgtgcagacttgatggctcccggccccccgacccggcccggcctggcggcgccgcaccggccacctcctgtctcacctgccgccactgcccgccgcgaccgccctctacacccggtgtcccgcgaccggaagagagcaaggccgcgccgcggagcaccacgggatcgaggaagactccgcccgcacccggccgcacggaggtcaccgtggagcggaaaagggtagcgctgcgaacgtcgtaaaatgccgggccgggctgctttccggcaggcgttggagaggctgctttccggcggcgccgggcgagaagcgcgactggagtctggggctgcggcttcccagaggcgcgagtcgcttttccaggagccgaggcccaaacggggccgggcctgaagggtcccccgccagcccgcggccgcgccatcaatcgccgccgcctcgtcccgcttctcggctgaggcgccgcgcggccaggcagcgggtccaggcct

SEQ ID NO: 16688 - DNA, 2300 bp, Homo sapien
gtcaggtgatctgcccgcctcggcctcccaaaatgctgggattacaggcatgagccaccgtgcccagccagaaaaatggtctttcaattggaaatgtaattccagagaataaagaatagaaccacactgtaatatgacaagtaataacacacacaagcgctaaaggattttttttttttttttttttttgcctcccgatatctgaggggcaggctccgtggagcctccaggctgagaggctgagactggcagagcaggctgggttctggattctgatactcctgggcaggagtgtctcaaagattgagacattatgttcattctttggggctcctgttcttggcactatatctagcacatagtagttgcctcataaatacccattaaataagagcagaactaaacacatctggttagaaattgttcctaggcagcaaggaaccaacacgtggaaaatatggggtttctggagcagtgttaatgcaagccagttcctgtaatgtacatagtgacacctactgccaatgacacgtgctggagcccttccactgttgatttcctatattcacttacccttgtctttaagtggatgttggtggaaacttgaggatacatctttgtgcagcagacagcatttgtaagtaaatctgtgtaggcttagggccacattgataaaaatatatgagagtaaacatatacagaagctgttttaagaacttctgatgtcctagatgctctgatttctggaagctccatcccacatcgtagcaaatatattaaaacactctcatattctctaaatactcttaaataatgtgagtgttaaaacagtagtttcatttgaaattatttgatgttgcggaactcactttctaatgactatgacttcccggcaatcacggcattagggaattcataccaagtgatgtctaagttatagtttcaaaatataatgaaacatttatccatcaatacattacaattatgaaattaacatgttttggggaccttcatttaaacatttattaatctcagatttgcagtatactttttgtattgtgcagtcaataaaattttcagtctcaaacattttcataggtccctgaaaagctcaacgcaaaaaacagcccccatgtgtgattctctactgggcaataaaagccaatcgcgaccctcattttccccccattccagggcttccccaggatagaacgcggaaacgcttctttttccgtttccagggatttctttctttttccagtgtcgttctccctctcccccacttcatttttacaataaatgtcagtgcacacccaggagcgggtggtcccacaggggacatcttaacgcccacccaggagcggctggtcccacagaggacctcttaacgctgacgctttctggagaaaaggatttgtgatgaaaatttccccaaggggaccttctagcgcctagcaccttcgatgctcctgtttcagtcgcggtctcagcgggcagtggcctcctttgaagctgggattctcctgcccctcccgggcagcgcaggccaccggtgacccgggacggtctgtaaacgaccttcgcgtccccgtccccgtggaataacgcgcggcgggcatcactgcccaatatccagcgctcgtgaaggcggagaccggcggggcagctagtttctggctgtggattctgattaatgggccgcaggcgcacggtctgcaccgtccggctcgttgctagtggctcgctcgggagccgccgcactcccggggctgtccgcccgagccggcctggaaggcggaggacgcctccaggtcgctccgcggggcctccggaattcctgggaaagcccccctgcagcgccgcccctggaccccaggtgtgaggagcggggctcggccagcggctccagaagaggcccggaccccactgccgtggctgccgggggcgggaaagtgatttctcggaaagcagagcacttcgaagaaggcgggccgcgcgagccaagctgacgctattggtcggtgtggccgtcgctctgcgcaccgcccgtcccccccacgaccctttttaaggccgcgcgaccgctggcgcatcgcctggagcgcggcagcaagcgtgggaacgcgggcggcgagacggcggcaggacggcggcaggtaggcacagtgggcgggtagggcgcccgtgtcccgcgcggtccggtcccgcggggtccccgacgccaggcggggcgtgggggtggaactacctaccgtaatgtccccgggcgcagctcagtggccacccgtgtccctctctgc

SEQ ID NO: 16689 - DNA, 2300 bp, Homo sapien
agaatagtgcctggtacacagcagctgcttaataaatatttcttcagtaaatgattagaatccccctgtacctcatatataattcaaagtaaggacaatgtggccaggcatggtggctcatgcctgtaatcccagcattttgagaggctgaggtgggaggattgcttgaagacaggagtttgaaataagcctgggcaacatagtgagacccccaccactacaaaaaaaaaaagttaaaaattagccacagctactttttgtggctaattttaataatggtggcctgcagctgtagtcccagctacttgggaggctgtggtgggagaattgcttgaacccagggaggctgacgctgcagtgagcggtgatcgcaccactgcactccatcctgggtgacagagggagaacctgtaccctacccccacaaaaagagaatgcaaatagaattcctctttgctgacattcaatagctagattttctggttgtggtgttctggaaagttcattggaaataggacttttcttatttctctggggccccttgagtttctgatgtcttagatctagagagcccatacaggcttcacagctttcaagcccaccccttgaacccagggtcctcaactgtgtgtccatgaatgctctggctgaggagttcacccaccccttcccactccaagcctggagccaccacacacagaaaccaagaccctccactcccacagacactgttcccctgtaagcatccatcctgattccaaagagcctactggatttttcctcccagagaaaaactgagtcaattcttagagatctgagccctgtggttcacaccaaggtgacttcaacagggtctggcctaggagtggctgagtcctccctcgggccacccgccacccaagcatggtggcaacttaatccatcccacatggagcccccggtagatgctgacctttgccctttaaccccaagacccggctgccctggcagaactaccgtgtgtcccttgataacctccctgacataattcaactggactcacacaggctgcagagatggcccgataacgacgctacattctggggtcaagttagaagggcacagcgacagcccacactgcctacaaaaaaaaaacaaaaaacagtcaccagacccctaagaacagacaccactgtgttctaaaatgcctttgctctggaaacccagggaaagaacacaggctagggcagagactaaaggagagactccaccgtggcagacagcagccaaacccacccaagaagtctctcgttcatttgggaaaagctcccaagccctgaggaggaacaaccagggtactggccttgttcctgtttttcaaatacaaattgcaaaagtggacccacgggccttaagggagagtccccaggggcagggccatagcacatggtccccaggaagtgggtacagggccctgaatctcttaggcatgaaaatgaaagtcatgtctcggtggaggctgctgaaagtcacctgggaagtgacctgtgagtgcagacggtgcttcctggccagggagcaacaaccttccctggggggctgcagagtcacctgggcctgggttcaaatcccagctccatctcttcctagctgagcaacactggcaaagtcacgcattctctcttggcctcagttccctcatctataagatggggctgagaagaggactgtggagggaacatggggagatgatgctcctagcagcacgcagcacatagttaacaggtaggaatggttccgtcaataacatcccctgctctccctgggggtgtggtcgagatccccctgaatcccctcactgggaaggcaagagagccaaatccagaccctcccagcccagctccccctcgggcctctggcccctgcgtctggcttccctgtgagtttgtgttgcaggaacagggctcccagttccagctgccagcgtctcccccaatctgagcccatttcctcacctgtaaacgcgagtcaccccatgcctgtctgcaaaacgggcatcacaataggccctccctcccggcaaccatggagattgaatgagctgggccaaagagcaggaggcacagcccgggctcaggggccaacactgagctgcacacggagctggggtatggttaccctgctcagagcctgggatccctcggctgcagcgcaggctcagggacacctgccctgacaggggtgttgcagagaatgacatccatacatggcctggcacacagtggtaggtcttccacttctgctatttattattgccattc

SEQ ID NO: 16690 - DNA, 2300 bp, Homo sapien
caactaatttggcatcctagggtctccaggtactatttacaaactgctatttaactctcttaacaaaggagagcaagatacgaaacagttcttgtaagaggagaaggcggaatcctcttctgtctcctctccccatctttaaatggccccattttaaaatttttaactcttcccattaaaaaatttttttaaatctccccatttaaaaatatctgggtaagaggctgtggaggaaattaaagagtaggagccagaggtcccaggtgcagaaactctggggtatggcgagacccctgaggcaggcatgactagctttgagatctgggtaccagatgcccatctgctaccctgtctcatgaaagttggccaactagaactcagctggtcatgggggaggcagggtaagatgccaagaggagaacctggacatctgctggaagcaccggcatagactcttaaagagccagcgcaagaaatgtcctccaggtggagcctcagtttccccctctgtgaaacagggagactaagagtacttcataggattgtcatgacaatttaatgagataaaaatgcaaagttgccagcacagttcttggcatttcggaggaatctgataaatgtcataccgctgctgttttagtgttagggtggtgatccatagcggacacctccggctttcggaccattccattcaactcacaaccttggaaggaggcaagctccaggccatcggctccctgttcaacctctttgggcctcagttcccccatcggtgagatggaggttctctgctgctgcattatgggggtgggggtggtgtgggaagggtgccagggattgggcacaggaaagcacccccagcccaactgctgagctgccagaaacctggagagtatatgaggtgccactttagggcattccctgtttcgtttcagggttcctgtatggaacctgagaccaccaaaggcacgctgtggtgccgagacccagtgcctgcctctctcagtagcactgttccaaagccatcagctctttcctccccttcccatcccccacctctggacttagttcatgaatctccctcccctattcccttctcctctattgggcccacccagctccacatagttttagctcctggtaccctccagcacattctacagagaccccaggtctgtgctccacactcctgcctttcatctgggttcccagaagctgcagggacaacagagaccaccttgtgccccacccaccttcctgggtggacacccagatgctaggctctgagaccccttcctatggaagcacaaagtcccccctccgggctgggccgcccaccactgtgctgtccacaccttccggagggaggcaggtacctgtgggtagagctggggagccccagcgcaccatttcaggacttggagaaaataaaataacctggtcgcacctcagtttgcatatcagtgaagtgcgatgataaatagtaccttcctcccaaggtcaattgtgaggattaaaacagaatattcacaaaagtccgtagctctctagactataagcgcctgcttcattcgtagcaggtgctgtgactattatcatgattatttcaccctaaaacactttgaataggacagcggaaagacccttgacccctccggggacaatccaagagccccttggctaaaacagagccatgaagccccactaggctgggctttgagactaacctcaccaccaccctcaacctggtgacccagcacaggttcgctgtctcgctgtgtagccccgggtgtaatccatgtctggagatagaacactggagctcagtggggcctgagctttctggagtgagggtcaccgcagggcatgcactggaaatccagatccctgggccgctccctgggaagttctgatctaatatgtccaggctccttctgggatctgtttattaagcatcaggatgattcatatgactccgccgttggaacactggagcctgcgcgggtgtcaacgcttgttcacttgttacaggtgaggtcacccctttgtcacgcacctcgggccctgcgccctggtggtccagggctggtgcgggggcttaggtgcagcctctcccacgtgcacctgcgaggcctaccctttctcccgtctcagggccttgatgcccgtgcctgtgaagctggcatcagcgaagacctcagacgggaagggatgagtgagcaggtgtgcccccagggaccccacgcgccccccgccccttcgcgcaccgaggtcgtcctgcgtctccgggatcccaggcc

SEQ ID NO: 16691 - DNA, 2300 bp, Homo sapien
ggtgggaagatggcgacaagcagttccttgtggaccccggtccctgaccccacagagtggggaccccaagggcagtgaggggcagagtgagtttgtaccaggcactgggaccccaagctccctctctctggccatggctgtgggggtccccaagtggaagtggaagagggaaactgaggaaaacaaaatggtcctgcttgagagagggaacatgggctgctttctcctcccccaccagctagtccagtgagcctcatctgttctcacgctactaataaagacatacctgagaatggggaatttataaagaaggaggtttaatggactcacagttccacatggctggggaggcctcacactcatggcagaggacaaaggagaggcaaaggcaggtcttacatggtggcaggcaggagagcttgtgacagggaattcccatttaaaaaaccatcaaatcacgtgagacttactcactaccatgagaacagcatgggggaaaccacctccatgattcaatgatctccacttggccctgcccttgacatgctgggattattacaattcaaggtgaaatttgggtggggacacagccaaaccgtatcagagcctttgagatgtgtcgaggctgccaccccagctgaattcatcagcaggacaggaagggggctgggaagggctgtaactttcttgctctgtgatccaagctgagacagaaatgtttgttgaaaggggctggggtcaaacaagcctgggttcaaatcctgtcccacccttgcttgttctgtgacctcggaagtcagttcccctctctgagcttcctttgtctcatctgtaaaatggggacaaaatataaaatgtaaaaatacaaaccaggaagttggaagtcatacactttctgatttcaaaagttactagaaaactatgacaatcaaaacactgtggtcctgacctacatacagacagatagaccaatgggacagaacacagagcccagaaagaagccctttgacttatttgacattcaagtgtcttgagccaagacccttcagtggggaaagggcagtcttttcaaaaaatggtatttggaaaaccaaataccacacgcagaagaatgaagttgagcccttctcttacaccagatacaaaaaattaactcaaaaaggatcaaaggcattaccataataactaaatgtaaaaaaactacaaaactcttagaagaaaacatagggggaaagcttcacaatgttggactcggcagtggcttcttggccacgacacccaagaacaggcaagaaaaggaaaaacaattaaatccatgcaaacacgtgtgcacaaatgtcctcagagcgctattcctaacagccaaatgctgagagcaacgaaaatgttcattgacaggagaatggataaacaaaacgtggtccatccatacagtggaatattattcagccttaaaaaggaaggaagttctgacacctgctatgacatgagtgagccttgaggatatggtgccgagtgaaacaaaccactcataaaaggacaaacattgtataattccacagacatgacttgcctaatgtcagcaaattctcagagatagaaaatagcaggtggcggagggctgctcagggttacggggatgggggtggtgtttaacagggaccttcctgagctatttcctgatagcagctgggagccttttgaacagcctgcagcgggattctggaacaatctaaactggccatggcagttccaggggcagggctgactttgaactccagcaggaagtgcagtgcgaggccagctcacccacttcagcgtctctttcctttgtgttgtttagacccccaaaaacacccccaagtcctgtctccccttgtggaggaaaggctggtgggaggaaagaaggcttgttgagtatctactgcacacccggccctggggctacggctggaagctggacaggccgggtccttgccctcctgagacctgccttctagtggggagagagatagagacggaggaaacaaaacacagaccagaggatttcagagggtctgagggctccgaggagaaggaacacgatgatgtcatagagtcattgtgggggaggggccggccagccagggcaggcaggggcggcctctctgacgagaaggaggccactgggctgaggccaatgaatgggaaagagccagccatgtggtgagctgggagagggcatcccaggccgtgcgacctgcgcttgcaaaggccctggggccggacagttcttggcagagtctgaggtacaggatgat

SEQ ID NO: 16692 - DNA, 2300 bp, Homo sapien
cggagaaaaccgagaggcgggtaggctttgaacgcgccgcgccgcgggccgtgctgcgagcccggcacacgcctctcgccccagctcgcgctggggcttggcctctaggctcttcgcgatgacccgcgaaaacacccctcgcccccctcttctcaactcggaaccctggagggagaggccgcgcccggccagcagtcgctgcgagagcagcactcacctgggtctgtgcgcgccgcgatgcgccggggctcctgcgctgtcctgcgctccgctctcggcaccacctttcgtggctccaccgcccccagcccgcacccgagcgctgaggtggcaagggcaggtctgcgtgcgagccccctgcgggctggcagccaggtgcgcgagggccgcccttgccggcgctcccagcccgcgctgtctgctctcaggaacctggcctggcgcgcagtgtcagaggccccgcggcggcggcaggccgagcccacaggggcattaggccaactcccccctcccgccctgcgcacgcggaattctctattattattattaaagaatcccccagaacttgtttacgttaaaccctgtaaacttcctgccagggcctttgccatctctcgggaaatcggaacctgcgctttgaaaacggggccgcggggccaaataggcgggttttcagtgtgtgttgggggtgggggagggcaactgaactacgtgtgagttcagatccgagcgtggcgtgtgtacgcgtgagtgggagtgagtgcgaacttaagctcctgtgggccttaagcttccgtgtcaacgagtgcattagtgggtgcgcacatgcctgagcgccctctgcatatgagtgtgcacacacgcatgggtgtgtttacacgtctgtttgcgtaatttaccgggtttgcatgtgcatcaagacatgtatgtgtgtgctaatgtgtggacaagagcgcgagggtgtgcgcgcacgggtgagtgactgagcacgccgcttattcaggggcctgtgcggtctgggtcgcctctgggccagcgggttctcactcgcccccgtcaggcccgcggcgcccgagacaaagcggccgcgactcgtgctgcgctttcgttttccgcctgcgctctgccccggcggctgcccgcccgctcgcaagctgctgggcgagtccgaaaaatcccgggagcggcgcagttcttcccggggcggggagagtgggtaggcggtccctcgcgggaacttagccggccggccgcgaggaccggagtcgagccggctgtgcctgcgatggtcacgaccgggaggccgccgcacttgcgatttgctacagggctgtgcgcgtcggggaaggccccggcccagggagcgtttcccgccgcgccgcccgggcggggaaggcggggtccagcgcgcaccggggctgaaccgcgggcggagggcgcattaacacttgctcgccaggttggtggaggcggggcggattctgctggcggccgcggggcggcgagagtgggggctctttaagcgcccaccaacgcgggggcccgaggggggcagggacggagggagggaactccgggagggtcttaggccgacccgcgagacgcagccgagcggagatggagtgaaggctgcctcgcccggaatctcggagccgagcgccgcgggcggcggggactcagggctgctcccggctggggcgcacggccgtaagacctggaggtggtgcctccccccaaaaaataccggcgggggtagcttcctcacggccttcgcccgggctgccctcggcctcagctcggctcctttccttgtgggagggcgagaaagaaagagggaggagagaggtgggggaggcgggagttggagagagaggggctctgagccaaccgccggcggatccagcagctcctcggggagggcgggcgggagcgcgggggcgggcgcgccgcggctcgctcgggagaagtggccgccgatgacggcagaggtgcagccagccccgcgcgcgcagccccctccccttcgccctcctcccccccgtcgtcctcttcctcctcctcctcctcctcctcccggcccgtccgcggcgcagagcagcggcggcagcggcggcggcggcagcagccacccgatgtcttcggcgcccgagaagcagcagccaccgcacggcggcggcggcggcggcggcgggggaggcggcgcggccatggaccccgcgtcgtccggcccgtccaaggccaagaagaccaacgccggcatccggcgcccggagaagccgccctattcctacatcgcgctc

SEQ ID NO: 16693 - DNA, 2300 bp, Homo sapien
ccagtagtggcccttgccgggccgcccaaggcccttgggtagcttgatgaagcactcgttgagcgagaggttgtggcgcacggagttcttccagccctggtaggagccccggaagaaggggaagcggctctgcaggaactggtagatctcgctcagcgtcaggcgcttggtgggtgaactctggatggccatgacgatgagcgcgatgtaggaatagggcggcttctccgggcgccggatgccggcgttggtcttcttggccttggacgggccggacgacgcggggtccatggccgcgccgcctcccccgccgccgccgccgccgccgccgtgcggtggctgctgcttctcgggcgccgaagacatcgggtggctgctgccgccgccgccgctgccgccgctgctctgcgccgcggacgggccgggaggaggaggaggaggaggaggaagaggacgacgggggggaggagggcgaaggggagggggctgcgcgcgcggggctggctgcacctctgccgtcatcggcggccacttctcccgagcgagccgcggcgcgcccgcccccgcgctcccgcccgccctccccgaggagctgctggatccgccggcggttggctcagagcccctctctctccaactcccgcctcccccacctctctcctccctctttctttctcgccctcccacaaggaaaggagccgagctgaggccgagggcagcccgggcgaaggccgtgaggaagctacccccgccggtattttttggggggaggcaccacctccaggtcttacggccgtgcgccccagccgggagcagccctgagtccccgccgcccgcggcgctcggctccgagattccgggcgaggcagccttcactccatctccgctcggctgcgtctcgcgggtcggcctaagaccctcccggagttccctccctccgtccctgcccccctcgggcccccgcgttggtgggcgcttaaagagcccccactctcgccgccccgcggccgccagcagaatccgccccgcctccaccaacctggcgagcaagtgttaatgcgccctccgcccgcggttcagccccggtgcgcgctggaccccgccttccccgcccgggcggcgcggcgggaaacgctccctgggccggggccttccccgacgcgcacagccctgtagcaaatcgcaagtgcggcggcctcccggtcgtgaccatcgcaggcacagccggctcgactccggtcctcgcggccggccggctaagttcccgcgagggaccgcctacccactctccccgccccgggaagaactgcgccgctcccgggatttttcggactcgcccagcagcttgcgagcgggcgggcagccgccggggcagagcgcaggcggaaaacgaaagcgcagcacgagtcgcggccgctttgtctcgggcgccgcgggcctgacgggggcgagtgagaacccgctggcccagaggcgacccagaccgcacaggcccctgaataagcggcgtgctcagtcactcacccgtgcgcgcacaccctcgcgctcttgtccacacattagcacacacatacatgtcttgatgcacatgcaaacccggtaaattacgcaaacagacgtgtaaacacacccatgcgtgtgtgcacactcatatgcagagggcgctcaggcatgtgcgcacccactaatgcactcgttgacacggaagcttaaggcccacaggagcttaagttcgcactcactcccactcacgcgtacacacgccacgctcggatctgaactcacacgtagttcagttgccctcccccacccccaacacacactgaaaacccgcctatttggccccgcggccccgttttcaaagcgcaggttccgatttcccgagagatggcaaaggccctggcaggaagtttacagggtttaacgtaaacaagttctgggggattctttaataataataatagagaattccgcgtgcgcagggcgggaggggggagttggcctaatgcccctgtgggctcggcctgccgccgccgcggggcctctgacactgcgcgccaggccaggttcctgagagcagacagcgcgggctgggagcgccggcaagggcggccctcgcgcacctggctgccagcccgcagggggctcgcacgcagacctgcccttgccacctcagcgctcgggtgcgggctgggggcggtggagccacgaaaggtggtgccgagagcggagcgcaggacagcgcaggagccccggcgcatcgcggcgcgcacagacccaggtgagtgctgctctcgcag

SEQ ID NO: 16694 - DNA, 2300 bp, Homo sapien
tgattgagttttaagtatttgagttaaggttcaatagcatcttctttttttaaaattttattttaagttccaggatacatgtgcaggatgtgcaggtttgttacataggtagtaaatgtgtgccatggtggtttgctgctcctgtcaacccatcacctaggtattaaaccccacatgcattagctattcattctgaaagcatcttcctttcataaaagagccagttgattttttctaaggggtctcttattactactatttattatttttatttattattatgtttttcaaagaggagttctggctgtgtcgcccaagtggagtacagtggtgccattatagttcactgcagcctcaaactcctgggctcaagtgatcctctgcctcaccccctcaaggagctgggggtaaatgctctgaggcacttctaacttgaaaacatggaactgaagagaatgcccttcctagcaccacctgctttctaaaattgccactggcagattgtccctggcgtctcgttaccatctgggggccgtgccaggctgaccatcggagagacttgggctctgttttgagcacagctgggtaacagaatcctgcacacacttccactactggcaccaagtctacttgcataaaacactctgcagatctactgtgcttccatgaaaggcggaaaggacatccaacctctgtgagagattttattttatcacctccaaaatgatgtttgcactgcttttgccagcctggtgaaagacaggcccgcccacaagcagaactgaggctcctcggtgtctctatgtattaatgttgcggacaccacataggaagagagagttgtgatgggacccacaggagttgcaattaagcacgttgtcagggctacacgctctgccctttctctgctgggagactcaggccaagcttctttaacatgtctgagcctctgttgcctcctgcgtaggaggcgggtcacatttgcctctgagggtttgctgtgaaacatagttagctatgacttttaaggcgctaagctcaatgcctggcatatcgtagcactgttaattaccattattaattatgtcctaaggaggtcaaacggcacattatgagttaccagcagacatgagtaagtcgcttgtacacggaacaccattttctgtatctgttaagtaggcgggcattcaaactcttttgtctgtttcccaagtgtgttgtgaggatctcataaagttttgggcatgcaatttcgaaaggtggcagccacgttttgagtgcttgtgatgtaccaggcacgtggctacggggatgccttcattcgctcagggagtggttcctagtggctggtccctgacatctgtgtgtgtgctgggtgggggtgtgggatgtcttcttcctaataagtgaatgaactgccaggctgaacgccctcgttttcttcccgcggggctggggccagagagggaatggacgtgacggtctgtgcagcctggtctcctcgagccgcttctcgacccttaggttagcaaacatgaaagacatagacaagcagacgcaggctgccacgttcgttctttctcagggtatgcagaggtcagggtaagaatccacgggtgtttctcaaaggatggcctctggccgtccgcagcgcagtcgccggggctgggctggcctcgaatttccatctgcctgccgctttaaagagctgccggctgaatccgctgcacacccacgtgtgagcacctgagagtctgcaggatctcagaggagggaaccgcgtcctacatgaggagcaatcaaggccggctttccggaggaggcggcctctaggactggaagaggaggcgggatgtgtttcaaccggcaatgggtcccgagagaccagggacttgttcacttcagtaactccagggcttggcaaaacgcctgtcacgggcggcgctcgacaatgactagctgaaagcaagagcgaagggcctgggagcatccctgactgtccccggcgcggattttacccgcccgagcatgcgcgcctgggcctcgcccgctcagcctccgcccctcctaccatcgcgcaggcgcggagcgggtgacgtcactacgcgccagaacctgcgccgggaagcgtcgcacagcgactgcatcaccatggagccgagggcaggtggggggcctggcggggctccggggcggctgggaatggggagggacagccgggaccggtgagggtcgaggcggggccaccggggctggcagaggatggggcagaatcaccggaagcggccgaggaggtcaga

SEQ ID NO: 16695 - DNA, 2300 bp, Homo sapien
agcatccacactacctcctacatcctaagcgaattctgatttcttttttcaactttcttccacgcccaggtgatctcaaggggctgagacattcatagttccagggatggggcaagtcccgcccccttggcaatgattggttcagacacccaggcttcagctaatcggtttctagcagtgccttagcaactgttgctagtgttaagcccttgatctgagtggcccaatcaggtagaggatgggcttttattccaagttggagaaatgacgctcctcggagctaggaaatgaacaagagtttctgcagctgctgatgctgccaccatcccgcaacaacgagggaaagagcatgagaacgaagcccaggcacagaagaaaggcagccataaaagtgtcagaaaaacggagccggagcctgattatcctcctcatcttggtacacactcacactcacacactccctatgtctgcggactgacagtcagaatattcaagcaaaacagatctccttaaatggcagtgaccttacctgaaatttaacaggcctgaatttaccggtctaaggtcaaccaggaaggctgtgtgccttcaagcccaccactcaaagacgccaaccaattcacctgtctcctgtatgattctgggttcacacacatgggtgcacagactcccccgaacacacacacacacacacacacacacacacgcacctgcacgcatgcacacacacaattaggttcagaaattaaacctcaaagtaatagtaggcctcaattatcctacatagctgtgaaacagatagcctgttagctagtcactggagtactgcttgaaatagagatttattgcacaaaaagcagcacatacaaaagtttctatgatcagtattacggctgattgtgaaataagacatcattggaagtgcaccaaaaatgaataatgcagggactgaacagagaagctgagtgaagagaagccagataaagaaggaacacatattttttcagcccacagcttcacccattttcagcgaagcaaggatttcccttagggtgaagggagaatcctaggtctttctattccatttccgggcatgaccagacaccaaaatcatgacagagtaagcttgaaaagaaagacttcgtgaagactgttggtcaagacacaaccggggaacagaaacatctcggcatgtacaggagaaggagtttaatccaggaaggagattgtggcaggtggagggtcagaaaagccactgcagtgtcaaaccacacacagcgaattattcattcagatctcatgacaagaaaacttggtgtctttgtctacctgggctgctgtaacaaaatatcatccactgggcagcccatgcacaacagagatttatctctgacggttctggaggctggggtgtccaagatcaaggccctggccacttcagtgtctggtgaaggtcacttcctgactcatagatggcaccttctcgagagtccatatatgctggaaggggcaaggggcctctctggggcgttttttattattttatttttatttatttaattttttgagatggggtttcagtcttattgccctggttggagtgcaatggcatggtctccactcactgcaatctctgcctcccgggttcaagcgattttcctgcctccgcctcccaagtagctgggattacaggcgcccgccaccatgcccggctcatttctggatttttagtagagatggggtttcatcatgttggtcagactggtctaaaactcctgacctcaggtgatccgcccacattggcttcccaaagtgctgggattacaggtgtgagccaccgtgcccgggcttggggctctttcataagggcactattcccatgcatgagggttctacctcacaaaccactcacctcccgaagacctcaccttttgatagcatcacattgtaggtgagaatttcaatattcaaatttgagggagacacacacatttggaccatagcacacagttgggtcataaagccagggttccgaggcaagtctgaggtcatcagccaagggtgtctgcatcggacaacactcaactcgggattggcacccagccagtgccctacactatacaagatgccactgtagggacagggatgacctctagcaaggtgaccctcagtgggccagagggggcttctgaagagaatttctctagcttcttggtgtttcctgcctgctactttcaaacaagggtcccatttttaatgttttcccagtaataccttatgaatgttattgcaaaggtaaa

SEQ ID NO: 16696 - DNA, 2300 bp, Homo sapien
attgcaataaacaagagagtgggtttgtgtaggcatcagggctgctctatggcagatcaggtgtccgggataacaggtgtgttcatagtctgccatgtcctagactgggtgaaattgttctccagttgaaatggttacataggataagtgtccctgggctctgccttaacagcaggccctttatcttcaatatgacttcatcagtgcacagtccattttcaggaacgtgactttactgtgttgttatttctaagctgattcctgccgaccaattttattccttactttacaacggagtttccaggaatgggttctagtgaggtgttgggactgcctttgcgcattcatggatggataagttaatcaaggagttaggaaggcaaggtcatttgtcatgggcccacctcctacctgtcagacaggacttggcctcagaagctctgtgggcatttcatcctgctgctcagtgtgctctgatgcccagctctgcagaagagagaagaagggccagccaggagcctggcaagtgagcagtgcttagtaactactcatggtgctcagtaactactcatcattgcaatgcttttctctctcatgctcacagcacccctatgagggagatctggggaattttcccctactgcagaccgggaatccaaggctgagaggttacaggactcagactgagaaaggggcgcattgtcccactgccttgttggtgcctcctgacagggaggcatgagggctgtggccgccacggcagatactggccttggcatccacagccctcatgctgtctctgcaggccgggcgccatgtgaccacactcctctctcagaccccacaagagccccgtggggggccgtgtgctgcccactctcatgatgaggaagccacgacctgagagaaacttagcgtcttgcccccgatgctgcgatgcttggggatgggtgtaaacacaggcggctgccggcacatctgggctctccttgtgacctgtcaggcccgcccgctgcaatagagcctcctctgtcccctcggggcttagagaggtgaggcaaacgctttcagccagaggcagtgagaagggttccctccacggccagcagtctgagctcagataactgacttgcaaaaaatccctgaccaaccgggagcctgagaggtgtgggccgggtagggcgggaggagggggaggaagccctgggtaccccagggcgcaacatggcagggccacactggaggatgagatcaggcctcccaggcctcccaggcccccacctgcgatgactcccccgcatcgcccatcgcggctgggattctggagccaggcaggggttctgtggtctgagtccctctgcctgtgtgactctgggaaaatcaccagaccttcctgagcctggatttccttccgtgtggaaagataatcatcaacgacccgcgcctatttcaaggagactcttggcccaaaaatcccgattcctctaattcctcctgatttttctaagtcgtgaacacattaatttattgtctttctaatgaggcagtgagtgaaatattccgaatattaaacaagaaataccttttcggaagggtttttgtgaagccctttaatggagggagcatggagccaccgtcagacctgatcttcacggatttcggggccctctgctggttgcctacacatccaccccctccctaaaccttcctcgttgacacgattctcgtttcatttggcttcaaaatgagttccaacaacaacaaaatgcaatttcccagactcctttgcagcggagagtggtcacatgaccccattcagcccaatgagacgggagccagcgggcccagagagggcgtcccttccagggacactgcatttcggatttgtgctttatcctcctcctagacgggctgagagtccacaggtgcggcattcaccttgtctcctgaggccacaggcatggcggccaggagaggaggagggggcttcccgccccgcatggccgcaggccgtctccatggcaacaacctcccaggcccaggggttccgcagcctccgccaatctgagatgattgacagcaatgccatccaattacaacatttcctctctccttggggacaccgaaaagcagaccacccgggcatactaaggtcaagatgtcgttgatcggtttctttgttttattgtattacttgttttatttacctatttactttcttggtaaaaccagcctgccggcttgctcaggacatgaactatgacgtccctggagatggtctcttgggagaggagcccccc

SEQ ID NO: 16697 - DNA, 2300 bp, Homo sapien
tggtgatggtaatgatggtggcatcagtaatggtggtgatgatagtgatggtgatgataatggtgatgatggtgatgatgatggtgataatagtgatgatggtaatggtgatgatggtgatgatggtggccatgttaatgatggtgatgatggtaatggtggtgatggtggtcatgttaatgatggtgatgatggtaatggtggtgattgtgataatggtgatgctgatggtggtgatgatgctggtgatgatggtgatggtgataatggtgatggtgataatggtgatggtgatggtgatgatgatgatggtgatgatggtgatggtgataatggtggtgatggtgattatgatggtgatggtgatggtggtgatggtgatgataatggtgatgatggtgatgatggtggtgatgttagtgatggtgatgtggatgatggtgatggtggtggtggtggtgatggtgataatggtggtgatggtgatgatgatggtgctgatggtgatggtggtgatggcaatgatggtgactatttcggtcttctcaggctgtcacaacaaaataccatagacagggtggcttaaaaaacagaaatttatttctcacagttcttgaggctgggaagttcaagatcacagtgccaacatggttaggttctggtgaaggctatcttcctgacttgtagatggctacatctccctgtgtcttcacatggcgaggagaaagaaaaagagagagggagagagaaggagaggcgggggggagggaggtgcagagagagagagagagagagacagcacacgtacactctagtgtttcttcctatactgacattaaacccatcatagaggctccaccctcatgacctcatctaaacttaattacctgtcaaaggccccatctccaaatgccatcacgttggacgttagggcttcaacatgcaaatttggggtgggggcacattcagtccataatagtgatgatgatgatgatgatgatgatgattatagagacggtgacaatatgcatgggacagggtggccttaatgatttattcaggaaaagtattaaaaatgctttgtacaattcttggcactaagccctcagtgaatgccagctatgatgactgttgttttcgcaataagattctggttttaaatctgactaagcaatttcatgtatatttataagcatctctcaatatgtgacctgtattaactgagaccctttagtttgtaaatagctgatttatgccaattggggaaattaactgcttctcttaactagaaggtctagcttccattaacatagactaagaggctcaaacaatgtctccaaatcttggtctctctctgtcccttgatggttttctctgagccagtgttgttttaagtaggctctccctgggggtggtaaggagcttctggcatcctcaagttcaaatcctcacagttcagcaatcccaggacaaagagaatttctctttcttggggctacagcaaaagattcctcaagggctctcagtcgagtcatttgggataaataacatctctggaccaatcgcaatggtcagaaagggtggagtattctggaactcctggcctcaagggatcttccagccttagcttcctaaaatgctaggattacaggtgtgagccaccgcacccagcctaggatggagtgatctcatggctgatactgggtcacatgcccaccccaaaccaggttgactggaagtggagggaacatgattctttgaagggaaactcaggtgctagtaacaggagagatgagtgctgagagagcacaatcaacagctgagcactgcatgttcatggcttggacaagcctgctcaatagggaaaacatctatttacctgtcgactgtttgccatacaccaagcaagggtgttgtgctcttcagcctatcccctgcagaagacccaagtagaactgaagaaactgggcttcttacccagccgctaagagagaggcttgggccaccacggccttggatgagagaagacatccccttccttggttcttccattacagcaatgaagtcacaatgaaggggaggaactgcccagttgggcagcgcgatgggaaggagcccacccacgactgtggatgtttaaccaaagccttcctgtaggaaagcaggaaagactgggtggcctgagggcaaggtatgctgggtgggtctccttactcagaaaggccagcgccagcaaaccaccgggtcaaagtttgtcccctgagagcccttggtttgagttcattcttctgaagtgatat

SEQ ID NO: 16698 - DNA, 2300 bp, Homo sapien
accagaacaatgattctgttcctccatttgctaatctgttcatcagtaccctcatccactcatccatccatccatccacccacctatccatctgttcatcattcgtctacctatccatccattcatccttcaggcactcattcatccttcagtcactcattcatccatccactgacccattcacccagccagccagccagccaccatccattcatctacctatcactcgtccatcaactcgcccatccactcaacaattcatccactgtcctttcatttacccctccatttacccacctactcacccacccatctacccactcatccatttatccattcactcacacacactctcattcacccacccactcatctgttcatccattcatccattcatccatccatccatccacccactcacccacccagccacccacctatccacatactcacccattcacccagccactcattcatgtattatctgtctatctatacacctactgattgactcatccacgcatctatgtaaagtcaaaacatggttaggcccagccatcgtaagccagggctgcccgtctgttttctttgttttgtgcatcttgcgtcccatgtgtccccttgcactggagtgtcagctcccagagactgggtactgcagctgatttgctcatcctgaatgggacacaggtgaggacaggatggaagaggggcaggtggggctgtgtcggggaggggcaggggcagaggagtggaggagaggaggagctcagttggaggggcctctgagacactgaggggtgacactggctcgctggttggatgaagagtaacactgagctgcccaggctgagacgcagtctggggtccaacagccctggtggcaattggtgaacatagccctctgggcaaggccagcgacttcaaatttctggatgttcatttttttacctgctaagtgaggtagtgctggtgacgtgctcagccagtgccaggcacagattgagctgcaggtattgaatgcatcctccatagtaatgtcatactctgaagcaggtaccattggcatccccattttctagatgaggaaatgggggtgcaaagcttggattttggctctgctgcctctcacggtgtagatgtgaaatgtgcaggggcctgggagagccagagccctggaactgccctttgctacccaagtcactgtgacttcctttcagatccctggggtcccttagggtcctggttcaagggctcgattggaaggaaaccaagaggctgtaattgtctacctctggaaacagtgaaaagatgtaaaacgaaaatattatcatgtcatcatttcttttctatggaaatagttactttccttcccacccaccccaccttcaactgctctaaatacgttttcttggggtttccaaacatctcttttacttttgtcctcccaggtgagagagaagctgattatggccaggtctggcacagaaagcccctgtttgtgcaatcctgcattcttcctttttaaataaaatttaagaccatctgaaacgacttgccagcttgacctcccggctctggttctcacttgagtttctgaaatgcttatgagtccagcctgctaatgtgctgaaatgactgtgctcaccttagggaagtgttaatgccttgagcattttcccaccagttgtcttgcagctggtgagaaaaatacgcaccaacctcccccatggactgtgaggtcacagccttcccatccttttcaggagctgccatctcagctcttgattctaatggatggcagccacacttgaagacgcaccagaggaagacgtagctgctcccatctgtgttcccagatgggatggtgtccttgggaactgatctcagacatgtcgtggtagccagcctccaggatagcccccagcagtcccacaccctggaattcacgtgcttgtgtagcccctcctacattatatcacataggtctgtgtgaccaatagaatctgcagaagtgatgccacagtacttccaagattaggtcataaaaggtcctgttgcttccctcttggtttctttccctctctctctcctctctcctttctcttggaccctttgctctggggaaaccagctgctacatcaccatcagccttgtgaccatgccacatggtaaggagctgaaatctcagcagccacatgagtgagctcggcagcggatcctttaggccccgtcatgcaatcctggattgcagccctggacatccacttaactagcaagactgagccagaaccacccag

SEQ ID NO: 16699 - DNA, 2300 bp, Homo sapien
aggtagctgccaggtgtcctgtcctgttttctagttgttcacagcaggagcttagcccggtcttggtcactctgccacggctgggagcgggagcgggaggctctcccctgttttttgggttatccattctcctagagttggacgttgcctcccactccctgggcagtcacagttgaggctgtgatgtgcatcggggtacgggtcccttgtgggcctgggcgccagcctctccaggccatgcactgggaagggggccaggagcgggcgcggtgagctctgtttggtctctgagcatgagcagtacctgggcaacagcgagagctttccttctttgtcgtttttcttgtggatttatctttctttttatgtttggcagcttgatgatcacatttagtttgactcctttgtacccacactgggagaagcaaagaagaacacttggccttaaaggatgggcaaggctgggcatggtggcccacacctggatcccagccttagaggatgggcgaggccgggcacagtggcccacacctggatcccagccttagaggatgggcaaggtgtggtggcctacacctggatcccagcactttcggaggccaaggtgggaggatcacttgagcccaggagttcaagaccagcttgggcaacatagtgagaccccatctccacacaaaataaaaaaattagctgagtgtagtgctgtggtcccagctacttgggagaacgaggtgggaagattgcttgagcccaggagagtgcagttgcagtgagctgattgtgccagtgcactccagcctgggcaacagagcaagatcctatctctaaaagaaatttaagaaacaattttaaaggatcaatgttaagtagatggtcagggggcccaaaagggaattgctaagccctggcctcaggctcaaattacttggtaagatggaaggaatggaaggaaggagaggggaagaaaaagagaaagatgcctgggctttgtctagagatttggagtaactgttctggggagggcctgggcatgctcttgttttgaagttccccagaagtgcagtccaggtggagacccgcctgcatgttggtgcagcttcctgttttccagcccctgaattctggcacttggagggccccatctcttcctgtccttatcaacagcttgtctagaaagacccaggaagtcactcactctgtggtgttggtgattcatatgcttccatagcaggtgtctgcttctgagccaagctcccagggcagcggagcaggcaccaaccagcatcccaggggagggcacagcttgtccagctgggatgtttgggtgccctgtgagatgccccaagccaccaacccagcttatctcaggagaagcctcggcggcccgtctgccggcctggagagatgtgctacagcagccgggggtggggggagagggtgggcttagaatctcttggcagggagcccccaagagcagggtgagacctgccttcatttcacctgtccccttcacagttctgcaaagccagcattatcatcccttttcagaaggagtgggcactcaggtggaatgcctcaccccagtcctgcggctggaaagcgatatggccaggactgcaccccacccctcatccctgcaccccttccctgcctgggattcctccagccctgtgcactgtggagcgcctctgccttccgctcatggaggtttcccaagggcacgcgctgagggcagctggtctcagcctggggccgggtcctagtaactgtctctctttgctttccagccagtgttttggggtttgaagttggaatcttcagctactgtcaagaacagccacaaaaatgtgtcacgatcaagatctttgagagtccaccaatcaggaggcgtctgtgacagtcgctgtcttctcagaacagaatccacacccaggattcaacccaaatgatttctcatcaggtgattcttggttgtagcaaagttcatgtgaatgtgggtgagtttctgttatgaatgtggtcaataaatgttatttgtgaaactctaaactggccacctcttaaatgatgacctctgatttcccttcattaaggggggacttgtccccatgtccgtgtccctgggggagggcagctatttccgagtgtctcttcagggacagcagacccactggatgagggcccgaaaatggtttcagcacctgtgtcaggtgggtctccctttaagtagcataacattgtatatgtgaattgaattttaaaatctgagatctcttttatatgtcataaaattcactctt

SEQ ID NO: 16700 - DNA, 2300 bp, Homo sapien
tgcagagatgaggtctcactacgttgccaaggctggtctcaaactcctgggctcaagagatcttcccaccttggcctcccaaagtgctgggattacagatgtgagctaccatgacagtccctggtttttgagcacctttcatgctctttcatatttgatcttctgaaacttccttgggattggttctatggttatcattattttagacataaaactgaagctcagaaaagttaggcaacttgtctgatacctgtctctgataagaggcagagcaaggattgggatctaggccttgttactcagagcacaggggcagggtggctggagtttccttcacatccccagcctgtgtcatgatggatttgctttcctggttttgaacatcacacacatggaattgtctgtacattctggggtctgacttcattgtacacttcatccacattgttgtgggttgtggttgtgtgcccatttccattgttgtacagaatttcctctctgtgaacatgccatactttctttttaaaatctttttttcctatggatggacatctggatcatttccagtttggggccatcaggaagaaagctgctgtgggtagttttgttcatgtcttctggtacacataagctctcatttctcttgggtgagttgaggaattagttggtcatcaggtattcatatgtttaggttttgtaaatactaccagtttgccaatgtggttttatcaatttcatgagccatgtatgagggttccagctgtgacatcctcgacaaactaggtattgtcagtccttttaattttagccattcttgggtgggtgagggcagtgaagagctattcttgacatggaatgacaagacctagtgtgcccgaggtgaaggcctgagcgtccaggggagcatgagcctgtcttctatgccctgctgtgctatggcagtgtttcagtgtgctctggaggaaaacagcagagaagccgagtgctccaaagtgggcagaaatgagacaggcataatgtgctaggctaatggtgactcttggaattttgtcattagctacaaagagggcagtgacatgatttacacacacacacggggtggggtatctgaaatattaggcagctagtatggcaggggcaccgtctaatcagcatggatgctggccaggagaggacatgtgtatgtgctggctggaaacagtcctgctcataggtcacgatcttaatgattaaataacaaggcaagaaatccgagagggcagtgcctgggagcaccctgtttgctctgtggccagaacgcagcacactgaagtattgcccatcagggtaagaggtgctcgtgatggtttgggcaaatacaaatattaatccagagtatttgagtctacatgaaaatactgaaaagtgagggaagacccaaccgtttccaagaaatacaaattggaactggcgataacttaaagaacataatcagagaggcagagggcattgggttttactaaaatatgaagacatacgtcctgtctccacgtcagcaactgcccaaagtacacgcgttccagcgaaaagagcgggtggggtggggaggctcagggccagccagagcttcggtgcttgcacgcccaggcctccgggtgacgactgcttccaattccgcgccctttaaaccccatgttgttaaaaaaaaaaaaaaagaaagaaaacctatttctctaaaagtcacgattcgagccccacctgaggacgcagcgatccagcgccaactcattatctgagataaaggagtgattttaccagaagcgcctatgcaagacgcagggccccgcgcgggctgctcccacctctttctctccttgcaggctaccgagaccctggctggggcggccggcggcccctccggcccatccgtcggaaatgatgagtggctccagtggccggggtccgcaggacctaccccagcgggcatggcgggagccccgcagccccacacagccgcgctctgagccgctgaccccgcgtctctcgtgagggaccaatcagctgccagctaaggtcacatacctagaaggccaattttgattggctgggcgcgggctagtcagcgggacgggcgggcgcgcgggcgttgttgggctcctctgagcggttgaggttggggctggggttgagctcgggttgggttcctcctggggcaggagggaaaggcgggagccagggcgtcagggcctgcggacgatgtgtgtgtgaaagggcgcgtcagccataagaagccatatgcgtgcgagccggtccccaccgtc

SEQ ID NO: 16701 - DNA, 2300 bp, Homo sapien
aatttttgcattttttcagtagagacaaggtttcaccatgttggccaggctgatcttgaactcccaacctcaggtgatctgcccgccttggcctcccaaagttctgggattacaggtgtgagccaccaggcctggccgctatcctttttttctagaacattctcccatcaagtgttctcctcctggctaactccaaattttcctttgatttataaatgtcatttcctcaaagaacctttgatcatccaaagtctggtctctgctataagatcttgttagttttacttattgttagagcattacaatttataatttatgtatttatctatgtggttacttgtttaatggctgatctccctggtagatagcaggatgttattagttgaaaccatttttttttttttttgagacagagtcttgctctgtcgcccaggctggagtgcagtggcacgatcttggctcactgcaagctctgcctcccgggttcacaccattctcctgcctcagcctcccgagtagctgggactacaggcacctgccaccacacctggctaattttttgtatttttagtagagacggggtttcaccgtgttagccaggatggtctcaatctcctgacctcatgatctgcccgcctcggcctcccaaagtgctgggattacaggcgtgagccaccgcgcccggcctaattttttaaattatttgtagagatgggggcgtctcactatgtgggtaggctggtctccgactcctgggcttaaccgatctacccgcctcggcctcccaaagtgctagaattacaggcgtgagccactgcgcctggcctgtgtggtttgtttgtttgtttgtttgaagagacagggtttcaccatgttggtcaggcgggtctcaaactcctgacctcaggtgatgcacccttctccgcctcccaaagtgctgggattacagacgtgagccaccgcgcccagccatttgtggctatttttgttttttgtttgttttggagacagggtcacgctgtgttgcccaggctgaagtgcagtggcaccatcacgggtcactacagcctcggcctcctgggatcaagcgatcctcccgtctcagcttctctttctaaaattttgttttgtagacagggtctcgctgtattgcccaggccggtctcgagctcctggcctcgattgatactcccgcctgggcctccaagagatggggtccgaggcgagcccacggcgacgtgcgcggctgctcaggtgagaggacgccttcgcggtcaccacccgcggacctgggagacgaccccgctcagcggcctcggcggagcccagctggagcaggcgtgcgcggctcccagcagctgcaggaacaggcgccctttgggcggcgccgcatggcagggcctccctttccagaccgggcgcgcatccccggatctcttgggccgcgccggccgccgcccctccaagccctccccggggcttccgcagggagctcgggatccccgaaggtccctgcagagctccgcagctcgggccttttggttaccataaggcggagacgatggaacgcgcgttgtttcaatggacaaaagggcttctaggcgccctttggggttctggctgctgcctctgtatttggaggctgtaaggcgcatctttctactcaccggccggcgcggcacagtttcgggcgccggaagcgggacgcacgggcgcgaggggcgacccctatctccacaaaagccgcggcgcgaagtggtcgccgagcagcctcgttagcgcagtaggcagcgcgtcagtctcataatctgaaggtcgtgagttcgagcctcacacggggcagtctaacgttttgcactcggcatcaccactttcttttctcatgcccgtcacgggcggcgccctcacgctggaggggagggcagcagtgcggggtctctgaggtcgccgccccgcggggagggggtggcgcggccggggcggagctctacgtaggggcggggctaggctctccagggggcgtggcgagctctgcggcgggggcgtggctcggcgctggcggggcggggccgcgctggagcgtgcgcacaggcggcagcagtggccgtcactgggcggcatggcggtgtgtgctcgcctttgcggcgtgggcccgtcgcgcggatgtcggcgccgccagcagcgccggggcccggccgagacggcggcggccgacagcgagccggacacagaccccgaggaggagcgcatcgaggctagcgccggggtcgggggcggcttgtgcgcgggcccctcgccgc

SEQ ID NO: 16702 - DNA, 2300 bp, Homo sapien
ttgtttggcagaaggtaggtacataatatgcgcttaccggatttttttttctattttcacagaatacaaaccaacagactgtagccatcttctgaacgctgtcctagatcatgtgaaggcacagcttcagaggttaaaaatttcggaatctggaaaccagagagaatgtttaagtactcttctttattaattgtatgactatcagagatgtctgaggtaaagaactatgacaaaaaaatcagggacagaaagtgccacctgcacaaatgcaccgttatttcacaaaaagtggtacaattggctgggcgcggtggctcgtgcctgtaatcccagcactttgggaggccaaggcgtgtggatcacctgaggtcgggagttcaagaccagcctggccaacatggtgacaccctctctctactacaaatacaaaaattagctgggcgtggtggcaggcacctgtattcccagctactggggaggctgaggcaggagaatcacctgaacccgggaggtggaggttgcagtgagctgagatcacgccactgcactccagcctgggcaacagtgcaaggctctgtctcaaaaaacaaataaataaaataaacagtggtgtaataaagaactacaactaacgtcattcttctgatggtgggagtaaattaattatacaaggatctatgacagtagttggcttctctagaagaaatcccaactgtataaaagcactttgagaaatatattttctttctttttttttttgagatggagtttcgctctttcccccaggctggagtgcagtggcaggatcttggctcgctgcaacctctgccttccggtttcaagcgattctcctgcctcagcctcccgagtagctgggattacaggcgcctgccaccacacccggctaatttttgtatttttagtagagatgggggtttcgccatgttgaccaggctggtctcgaactcttgacctcgtgatcctcctgccttgacctcccaaagtgctggaattacaggcatgagtcgccgcacctggcgcgagaaatatattttcatactttttttcttcttttttgtggaggacggggtcttgctatgttgcccagtcaggtctcaaactcctgggctcaagcgatcctcccagcctctgcctccctgagagctgggtttacaggcttggagccaccgccccccgctattttcatgttttgtatgattcaagcttacagtgtagagtgtattagcctaatccaattactttatccaattgggatagaagaaaggcttttacaaagtcaaaaggagaaatcctggaactatggggctctttcaaagtattagatgttaaagaacaaaaacagccaaatagccgggagcagtggctcacgcctgtaatcccaactcttaaggaggccgaggcgggagggttgcttgaggccaggagttcaagaccagcccgggcaacacagcgagatcccggctctactcccagcttctcgggaggctgaggcaggaggatcccttgagcccaggcgaccgaggccgccgcgagctatgatcgtgccactgcattccaggctgggcaacagagcaagaccctgtctcaaaaaaaccccaaagaatctagtgctgttcctacagagacacattggccacaggctgaggtgggcaatagcaaccaaatatcgcatggtggtttacgcactgcagcccatttggagtcctcaaatatgactgccctttcacagatgagtctgagactcaaaaactgtcactagcgtaaggttgtccagcgagtttagtggctgggaggctgaggggtagacagggcggctagcgatgtggggcaggcctggcagtcgccacagacgacctaacggtaggaaaatcttacagccaccaggagagttccaggcgccgcggcagggggactgggagaggggactgcgcccagaatgaaggctcgggacaaaagcagttgcgcaaacgcgccaaggctgggcgtcgagtgaccgcgggcggaggtcaccagcggccactccccggaagccacccacggaccacgcgcgcccctgcacgcagagggggccagggctccacgggcgagcggcgaccctgcctcccggagacggcgcggcctgccctgcgcgcctcagccccgggtgccggcgtctcgggcagcaccaccaagtctctctggaggggaaaggatggtcggatttgccccatgtcccttcctctgacccctccctcaagagtgccccgggacaccccgcctgtggctcagcctcccccgcc

SEQ ID NO: 16703 - DNA, 2300 bp, Homo sapien
gaggttgcagtgagctgagatcacgccactgcactccagcctgggcaacagtgcaaggctctgtctcaaaaaacaaataaataaaataaacagtggtgtaataaagaactacaactaacgtcattcttctgatggtgggagtaaattaattatacaaggatctatgacagtagttggcttctctagaagaaatcccaactgtataaaagcactttgagaaatatattttctttctttttttttttgagatggagtttcgctctttcccccaggctggagtgcagtggcaggatcttggctcgctgcaacctctgccttccggtttcaagcgattctcctgcctcagcctcccgagtagctgggattacaggcgcctgccaccacacccggctaatttttgtatttttagtagagatgggggtttcgccatgttgaccaggctggtctcgaactcttgacctcgtgatcctcctgccttgacctcccaaagtgctggaattacaggcatgagtcgccgcacctggcgcgagaaatatattttcatactttttttcttcttttttgtggaggacggggtcttgctatgttgcccagtcaggtctcaaactcctgggctcaagcgatcctcccagcctctgcctccctgagagctgggtttacaggcttggagccaccgccccccgctattttcatgttttgtatgattcaagcttacagtgtagagtgtattagcctaatccaattactttatccaattgggatagaagaaaggcttttacaaagtcaaaaggagaaatcctggaactatggggctctttcaaagtattagatgttaaagaacaaaaacagccaaatagccgggagcagtggctcacgcctgtaatcccaactcttaaggaggccgaggcgggagggttgcttgaggccaggagttcaagaccagcccgggcaacacagcgagatcccggctctactcccagcttctcgggaggctgaggcaggaggatcccttgagcccaggcgaccgaggccgccgcgagctatgatcgtgccactgcattccaggctgggcaacagagcaagaccctgtctcaaaaaaaccccaaagaatctagtgctgttcctacagagacacattggccacaggctgaggtgggcaatagcaaccaaatatcgcatggtggtttacgcactgcagcccatttggagtcctcaaatatgactgccctttcacagatgagtctgagactcaaaaactgtcactagcgtaaggttgtccagcgagtttagtggctgggaggctgaggggtagacagggcggctagcgatgtggggcaggcctggcagtcgccacagacgacctaacggtaggaaaatcttacagccaccaggagagttccaggcgccgcggcagggggactgggagaggggactgcgcccagaatgaaggctcgggacaaaagcagttgcgcaaacgcgccaaggctgggcgtcgagtgaccgcgggcggaggtcaccagcggccactccccggaagccacccacggaccacgcgcgcccctgcacgcagagggggccagggctccacgggcgagcggcgaccctgcctcccggagacggcgcggcctgccctgcgcgcctcagccccgggtgccggcgtctcgggcagcaccaccaagtctctctggaggggaaaggatggtcggatttgccccatgtcccttcctctgacccctccctcaagagtgccccgggacaccccgcctgtggctcagcctcccccgccccgcgctgccatctcctcagggccgggcagcaggctcccgagcgcccacagacccggggtgcggcccagcccacaaccgtcacctcaggggcctcaggcgcccagcggtgctgggcggggctggggcacgaccgggagcatgcgcagagcgcgcgtttcgcccatcgcgcacgcgcacacacctgctccgcccccacgctgcgtgccgctgctgggttccgccacgcccgtcatggcggcggccccggccggctctggccccgcccctcggtgacgcgtcgcgagtcacctgaccaggctgcgggctgaggagatacaagggaagtggctatcgccagagtcggattcgccgccgcagcagccgccgcccccgggagccgccgggaccctcgcgtcgtcgccgccgccgccgcccagatccctgcaccatgccgtcggagaagaccttcaagcagcgccgcaccttcggtgagtgtcgccgcgagggcggcgggtgcggcggggccggggtccg

SEQ ID NO: 16704 - DNA, 2300 bp, Homo sapien
ccaaagtgctggaattacaggcatgagtcgccgcacctggcgcgagaaatatattttcatactttttttcttcttttttgtggaggacggggtcttgctatgttgcccagtcaggtctcaaactcctgggctcaagcgatcctcccagcctctgcctccctgagagctgggtttacaggcttggagccaccgccccccgctattttcatgttttgtatgattcaagcttacagtgtagagtgtattagcctaatccaattactttatccaattgggatagaagaaaggcttttacaaagtcaaaaggagaaatcctggaactatggggctctttcaaagtattagatgttaaagaacaaaaacagccaaatagccgggagcagtggctcacgcctgtaatcccaactcttaaggaggccgaggcgggagggttgcttgaggccaggagttcaagaccagcccgggcaacacagcgagatcccggctctactcccagcttctcgggaggctgaggcaggaggatcccttgagcccaggcgaccgaggccgccgcgagctatgatcgtgccactgcattccaggctgggcaacagagcaagaccctgtctcaaaaaaaccccaaagaatctagtgctgttcctacagagacacattggccacaggctgaggtgggcaatagcaaccaaatatcgcatggtggtttacgcactgcagcccatttggagtcctcaaatatgactgccctttcacagatgagtctgagactcaaaaactgtcactagcgtaaggttgtccagcgagtttagtggctgggaggctgaggggtagacagggcggctagcgatgtggggcaggcctggcagtcgccacagacgacctaacggtaggaaaatcttacagccaccaggagagttccaggcgccgcggcagggggactgggagaggggactgcgcccagaatgaaggctcgggacaaaagcagttgcgcaaacgcgccaaggctgggcgtcgagtgaccgcgggcggaggtcaccagcggccactccccggaagccacccacggaccacgcgcgcccctgcacgcagagggggccagggctccacgggcgagcggcgaccctgcctcccggagacggcgcggcctgccctgcgcgcctcagccccgggtgccggcgtctcgggcagcaccaccaagtctctctggaggggaaaggatggtcggatttgccccatgtcccttcctctgacccctccctcaagagtgccccgggacaccccgcctgtggctcagcctcccccgccccgcgctgccatctcctcagggccgggcagcaggctcccgagcgcccacagacccggggtgcggcccagcccacaaccgtcacctcaggggcctcaggcgcccagcggtgctgggcggggctggggcacgaccgggagcatgcgcagagcgcgcgtttcgcccatcgcgcacgcgcacacacctgctccgcccccacgctgcgtgccgctgctgggttccgccacgcccgtcatggcggcggccccggccggctctggccccgcccctcggtgacgcgtcgcgagtcacctgaccaggctgcgggctgaggagatacaagggaagtggctatcgccagagtcggattcgccgccgcagcagccgccgcccccgggagccgccgggaccctcgcgtcgtcgccgccgccgccgcccagatccctgcaccatgccgtcggagaagaccttcaagcagcgccgcaccttcggtgagtgtcgccgcgagggcggcgggtgcggcggggccggggtccgagctgtggagggcggcagggcctgggacgccgtgaggggtcggggccgagccgggaggccgagcggggccggtggctgccggccggcggggccgagggatgcggggcccggggccccgtgagggacccaggccgggaccgagccgggagggccaggggctggtctgggccggggcggcctgcggacctctcggaggcctgggaggaggcagccggcggagggcgggcgggggccggtgcgctcggggccccgggcctgctgaatcaccccgcgccctccgcggcggggtgcctgccgtaccccggccaccgccgcccccgcaagcgcgctgcgggcgagggtcgcgcttctggggcccaacagcccccggggccgcgctgggccgttcggctctgaagcggggctgcgccgggacccagcgcgtcaccttcagggctggttttcccgtcgagggagcccgcccgggtgcgagtgcctcttacag

SEQ ID NO: 16705 - DNA, 2300 bp, Homo sapien
tgacagatactgacttacatcatcttcataacagccctttgagggctgattatacctatttaattctaactgatcccatgtggtgatttttaccccattttacagatgggagaactgagtcacagataagaaattttcctgaggtcagctgggattcaaagccagagctaatgctcttaaccctgtggctggctgaagaaaatagcagaggaaaagaaaggtgggactgtactgaaagtggaaaacacaccgttgtgtgggcagtgcctatgagtacacattaaccagtgaaatcattcctttttttcctgacctatttattgtgaacattttccagttcaggagtagagattgtagcctagtaaaccccgtacccagtgcctggctgcagctccaggtcactgtgtgtggcttctgagccccctgcccctcgtgggtgtggctgagaactgcggtgcactctccagcgctccagtccctgtgttgatgatttactgaaacttagggaagctgttgtagtgtacaagctgagatggaaactgcttttactaatactctcaacaaagtaagttctgtaactttggactttgaggaattataattttttaaagttttctttttgtgagacagtgaaggaggtatactttcattaaacttgtttatataccagtagttttcaatctttttggtcttaggacccctttgcactcttaaaaattagagattccaaagaatccatgtttatgtgggtcacatctataggtatttaccatattatcgattaaaactgagtttttaaaaattattttaaatgaatgttttccattgtgtgcccctggggtttgtgtttgccatgcagcgttgttacagctgaagagagctaaagaccaaactccaaaacaaaatctatcccaaccaattagaacatgaattctaagaagacaagaattcacctaaaatctaaattttttttttttttttttttttttttttttggagacagagtcttgctctgtcgcccaggctggagtgcagtggcgcaatcacagctcactgcaacctccgcctcccgggttcacgccattctcttgcctcagcctccggagtagctgctggggctacaggtgccggccaccacgcccggctatttttttatatttttagtagagacgtggtttcaccgtgttagccaggatagtctcgatctcctgacctcgtgatccgcccgcctcggcttcccaaagtgctgggattacaggcgtgagccactgcgcccagccctaaaatctaaattctaaaatgcccacagtctgtggcctttcctgggttgtgctgggattccagtgtgtagccgaaatcgagaagccttgatagtttcaatttccttatgggttctttatctaacattttattatgaggactttgaaacacacggtaaagttgaaaaagtttcacagtgagtacccttcacctagattagacagttccattttaccgcatagatgcttttcaacttacagtgggggctgcaagttgaaaataccacaagttgcaatgcagtgaatacaccacacctgctacacatcatggcttagcctagcctaccttaaatgtgctcagaacgcttgcattagcctgcaggtgggcaaaattatctaacacacagcccacttcatagtgaagttttgactcatgtaatctattgagtctgtactgaaagtggaaaacagaatggttgtatgggcgctcgaagcagttccttctgaatgcatgttgcttttgcactgttgtaaagtcgaaaaatcgtcaactccagccatcttcagtcagggaccatctgtacttactatttttaagctggttgcctgtagcattcctcagccacggattctgatttgaaccccagggcacagagaatcatttgagtgatggttttctcaatttccctgaagaaaatgtgattagagacacaggaggagtcaagttcttcatcgtagaagagcttctgtaggacgctaggactttgcgccctctatgagccccccatttaagagaagcaacaggaatgcactacacatctttaccttttcaggctctactctgagttaatgttgagccactccatgtgacacagaagcctcttgtcactgtgttgttcattggggtgccgaggccagctcatggtatctcctgagagccagtcgttcactttccagtatttttttttgcgggggcggggggggacggagtttcactcttgttgcccaggctggaacacaatggcacgatctcggttcacc

SEQ ID NO: 16706 - DNA, 2300 bp, Homo sapien
gaacagaccccgttctagatcaacagacattcaaagcagcgctctaggggaagggcaggggaggaatgagcgtccagcccccgcggctctacttctatgcctgtgtgtaagtggtgggatttaaaggtggttgggtgcaccggcccttcccccacctgcaatccggtgccaatgcaagtgccaggggagggtggcgtttctgtttacttccagccaggtcagctcccttgccccctcccctgtgtttgcattttctgcgtttggcgagctggtgaagtagccgcggaaagaaggcggatttaaaggctccatttggacgaggcttttggagaaagcttgcacctcccatcacacccccagggcaagtcagccgcctcaaaagtgccggtgccggccctctgtgagctcaacaccttcgcacaaacctcgggggcggttattattaccctctttttcccggggaggcgcctggggctcagagaggccaagtgactcgcccaaggtcacacagctttgcagtggccgacccgggattggaacccggggctccggaccccgcggcggccgtttctcgaagatacccactacctccctcttacaccgctcaaaaataaagcaggaaggccgaacgccccgttttcgccgaaaaacaatgctccacgcaaatttgcgggaacaaaagcaaccagaaatccagcccgggttttccgcctctccgattccgcggaccaatcgcgtcttgacggccgccgagggacgggaggcggtggccccaacatgatcgacagcccccagggaggcgtggccgcggaacgggcgaatgggattggggacccggcacaatcacgggccgagaacgggccgcctgagccaatcagtgggggggggacgggcccggcaggcccgggctgtcgcgagaggcggccaccccgcccacttctgctgatcccggccgcccgtcagccgcgagcgcgacgatccctccgctcctcggccggcgcctcctccgccgtcgccgtcgccgtcgccgtcgccgtcgccgccgccgccgcgctcgggcccggatccgtccgccgcgcgggagcagcaaggccggcaagtcccggccggatccctccgcgcctcccgccgcgcgtccctccccctccagcgtccgtttcgcggccgcggcccccagcgctccccaggcggcgacgccgcgcccgcggcccggggtaacggccggcctgggcggaggcgcgggcggcggcgacggcatggccggggcggctccgtcggggggcggcccgcagtgacagaccctgcggcgcggggggagatgggggcggccgcctcccgggcgacgacgacgacgacgacgaggagcagccgccgccgccgccgcgcaccggccgccgctgggcacgggcgcggggaaggcgcctccccgtgagcggggggcccgaggccgctcgccgcccccggccgccccggccgccccgggcccccccggcgccccgcgcgcgcccgcccgccggcccctgacgggagccttgcccggccccggtccccgcccccgccccggcgcccgcccggcccgcggcgcccgcgcgccctcgcccggacccggccccggcccgcgcgtccccggtcccggcgcgccccggccgcggcccccggcgccccccggccgcccccgcgcggtccccggccccgggtcgcggcgcggcgcgggcggcagcatggtggagaagcgctgcccgctgcagagggacggcgtgtaccgctggttctcggagctgccgtcgccgcagcgcgtggagttcctgtgcggcctgctggacctgtgcatcccgctcgagcttcgcttcctcggctcgtgcctggaggacctggcccgcaaggactaccactcgctgcgcgactcggagatcaaggccaacaacccggccgacctgggcagcctcaccaacctgacggacgaggtggtgcgcagcaagctgctggtgtcgctggcgctgctgggctcggagcagcgcgaggcggcgggcgtgctctaccgcacgctcacgcacatcgactccatcatccacaactacgggctgcagcttaacgagggccgcacgggcgatgagttcctgctgctgttcaccatggcctccaaccacccggccttcagcttccaccagaagcaggtgctgcgccaggagctcacgcagatccagagcagcctgaacggcggcgggggccacggcggcaagggcgcgcccgggccgggcggcgcgctgcccacttgcccagcctgccacaaggtgcgtgcc

SEQ ID NO: 16707 - DNA, 2300 bp, Homo sapien
cgacccgaatctcttgaggacaaggtgcagttcctttggcccacacatttacaacagagaaatttccatggacatgaaacagcccagagatattatttcatacccatttagatgaacaaagtaaaataaatggaaagaaaatcagaagtttgaggacaccagtgctggccaggaaatagagaaccacaaacccaggcacactgaagggtgagaggtcagttgctccaggtgtttggaaagcaatttggcagcttccaataaagtccaagacgtagctggtccaatgatgccaccgcagacatttagagaacttctgtagaggggcacagggagacagcgctagaaagctcaatgaatcactgtaactgcacaaaacaaaacaaagccgaccgccctaaatgttcctcattgacagtgggtgtatgaggaggtgactgtcctcctggctgctggtactctggggagggagctttggtgcccaaggcaagagactgaggttgaactctgggactcccaggaggggctgatttttctgagagccccgtgagccaagagtggggaccatcctgattctctcggacaggggaagatctgagcagggctcctggctgattggaggctccgaatcgcacctcttctcctgtcctaatctcaggctccaggcctggcttgcagtttctggctcaccgcgctgcggtcaccggcccacactcccaggagcgaggaccctgggcagcctccacacccccatcagcccactgcaccggtctgctgccatttcccgcacgcatttcaggagggctggggacgccggcttctgcctgaggatttatggtccaggaaatgcattttaaatggatcccaggatgctcggatccaagaatcagactctctcttgtgcgtgggaagaggggcggagggtgagagtatgtctggagagagacctagaaacgcccgaatggcggtcccactttgctccccaaaagcgcgaccgttccccgagtgggggggcgctacctgttggccagggcgcagggcgcacggaattcgggtgactttgctccaagatacacgcgtgtgtcccgactctcactcaatttataggggagagggactcgccaaatccctgttttctggggtaagcccccctccccccactcttggacccaagctgcccggaaggaagaaggaagcattgtttgtcaccggagaaaaccacctgtggtttgcaaagggcctcagtcgagtcaggggcaggcggggcagatccgagcccggcgggaggggcgaggcgcgggggcgggcaggggcgagggtaggggcgctcagctggcaggtcctgctctgcaggcctcaccgcccagctcccgggagggggccgagggcgccctgagtgctgcgcgccttcccatgacgcagttcctgtgcctttaaatcccactcccggagggggcgggggcgccccggctggaccccggtttccagtccggcgggggccccggggaagcccagggcggggagcgcggggctgggggcgcggagggcggggcgcccggggtccccgcccgcgcgccgcgccctagcctgctgggccgcgcccctcttgggaccgccgcgctccgggggcgggggcgggggcgggggcggggggcggggggcggggggcgggcgggggcgcgcgggcgggcggggtgcgggcgcgcgccgcgcggcccgagcgcgcgagccgggcccggagcgcacgccgccgccgccaccgccgccgccgccgcccgagccgccgcattgctgctgctgctgccgccgccgccccgcgcccggcccgcggcccccaatatggtgcagccgccagcgccgccgcccgtgccgccgccgccgcccgcgggccccgccgccgccctcgggcgcccgcagcgcggcagccgcaggtggggggccgcggcccgggcctgagctgccccccgcccggcctcggcgcggcgccctccccgcggggctgccggcgaggggccctctcgccgctgaggtggagccgcgggccccgccgccgccgctcctgccccctccctccctcctcccctccccctcccctccggtcctgtctccagcgggagcgcgagacgctggtcaggctccgcggcgcagctcgaaaaggaataatcgcccccgattgactgaaattcctccggagccggcgccgcggccgcccgcgcccgagaccgcgctccggggccgcgtcctcctctcctccggaaaacgctcgcgacccagggccgccggcggccgcgactctgctgtgt

SEQ ID NO: 16708 - DNA, 2300 bp, Homo sapien
gacaggggaagatctgagcagggctcctggctgattggaggctccgaatcgcacctcttctcctgtcctaatctcaggctccaggcctggcttgcagtttctggctcaccgcgctgcggtcaccggcccacactcccaggagcgaggaccctgggcagcctccacacccccatcagcccactgcaccggtctgctgccatttcccgcacgcatttcaggagggctggggacgccggcttctgcctgaggatttatggtccaggaaatgcattttaaatggatcccaggatgctcggatccaagaatcagactctctcttgtgcgtgggaagaggggcggagggtgagagtatgtctggagagagacctagaaacgcccgaatggcggtcccactttgctccccaaaagcgcgaccgttccccgagtgggggggcgctacctgttggccagggcgcagggcgcacggaattcgggtgactttgctccaagatacacgcgtgtgtcccgactctcactcaatttataggggagagggactcgccaaatccctgttttctggggtaagcccccctccccccactcttggacccaagctgcccggaaggaagaaggaagcattgtttgtcaccggagaaaaccacctgtggtttgcaaagggcctcagtcgagtcaggggcaggcggggcagatccgagcccggcgggaggggcgaggcgcgggggcgggcaggggcgagggtaggggcgctcagctggcaggtcctgctctgcaggcctcaccgcccagctcccgggagggggccgagggcgccctgagtgctgcgcgccttcccatgacgcagttcctgtgcctttaaatcccactcccggagggggcgggggcgccccggctggaccccggtttccagtccggcgggggccccggggaagcccagggcggggagcgcggggctgggggcgcggagggcggggcgcccggggtccccgcccgcgcgccgcgccctagcctgctgggccgcgcccctcttgggaccgccgcgctccgggggcgggggcgggggcgggggcggggggcggggggcggggggcgggcgggggcgcgcgggcgggcggggtgcgggcgcgcgccgcgcggcccgagcgcgcgagccgggcccggagcgcacgccgccgccgccaccgccgccgccgccgcccgagccgccgcattgctgctgctgctgccgccgccgccccgcgcccggcccgcggcccccaatatggtgcagccgccagcgccgccgcccgtgccgccgccgccgcccgcgggccccgccgccgccctcgggcgcccgcagcgcggcagccgcaggtggggggccgcggcccgggcctgagctgccccccgcccggcctcggcgcggcgccctccccgcggggctgccggcgaggggccctctcgccgctgaggtggagccgcgggccccgccgccgccgctcctgccccctccctccctcctcccctccccctcccctccggtcctgtctccagcgggagcgcgagacgctggtcaggctccgcggcgcagctcgaaaaggaataatcgcccccgattgactgaaattcctccggagccggcgccgcggccgcccgcgcccgagaccgcgctccggggccgcgtcctcctctcctccggaaaacgctcgcgacccagggccgccggcggccgcgactctgctgtgtcgatcgcctgagtccgttttcaccgtttgcgggatctggaaccgagttacatgcatgtccagtgggggcaggtttaattttgacgacggagggtcctactgtggaggctgggaggacggcaaggcgcacggccatggcgtctgcaccggccccaagggccaaggcgaatacaccggctcgtggagccacggcttcgaggtgctgggcgtctacacctggcccagcggcaacacgtaccagggcacctgggcgcagggcaagcgccacggcatcggcctggagagcaaggggaagtgggtgtacaagggcgagtggacgcacggattcaaggggcgctacggggtgcgggagtgcgcgggcaacggggccaaatacgaagggacctggagcaacgggctgcaggacggctacgggaccgagacctactcggacggaggtaggtgccgcgggccgggccgggccggggcgggagggacgtgcttccgatcgcgccccttctgtggatctctggggaagttgagctgcgtcctccggttgggccgtgggcaccaggggcctttcccgggcttccctggaag

SEQ ID NO: 16709 - DNA, 2300 bp, Homo sapien
ccgcgttgggcgtcgtgctgaggcccagccgtcctcacggtgacctttggcatgaggagtcctggttccactctacagacgaggacactgagggccagcggggcccagaaacttccctgagtcacagctcacagagcaagacatgggcccaggtctgctgaccgggtttcctttttattttattgtggtaagagaaatacagaatgtaccacgttagctacttttaagtatacaattcagtggtattaattaccttcacggtgttaggtagctgtcatcactgtttacctccaaggctttcccatcatcctactgcaaaactctgtccctattcaacactgaccccacaaccctccccagcccctgcacccaccgcgctttctgcatctctgagcgtgactactctaaggaccccgtgtacatggaatcatccgatatgtggccttttgtgcccagctcagttcactctgtgtaatgtcttcagcgttcatccacattgcagcctgtgtgagaatgttctaccttttcaaggctgaatgatgttccatcgtatggacggaccgcatggcgtctgtccatttaccaggtgatggacttgtgggttgcctttccctttccagccatggaaacagtgctgctgagaacccaggtgcacaggcagctgctgcagtccccaccctcccttcttctggggatatcaggtctgctgattttatgtctgaaggtcatgggccactgtcccttccctatgcccttgaatctcttccatggtgtgtccactgtgtggtcttcctggatacctccagcaatggggagctcactgtctcccagagcagcccattcagggcttagtgtgtagcccacacctgtgtccctgtagctgccactcattagcctcctaacccaggacgcgtttccttgtgcccttggcaggggctccgtattcactctgggttctgtggtcctcactctgcaccacagactctgatgcctcccttctccctccccgatttccaagagagaacaagatctagccatgagaagcaggatggaggtgtcttcaaaaacagccactggtgatagaagttgtaggaaggtaccatggtctgtctgcctccacgcaaacctcaccaggtttcatcaagatagcacaccaggagtggtgtggctcatgactgtaatcacagcacttctggaggctgaggcaggatcacttgagcccatgagttagaaaccagcctggccaacataatgagactgccatctctacaaataatttacaaagtagtggagcatggtggtgcacgcctgtagtcccagctgcgcaggaggctgaggcaggaggatcgcctgagcccaggggttcctggctgtcgtgagctgtgatggtctcactgcactccagcctgggcaacacagcgagaacctgtctcaaaaaacacaaaacaacaggaagctcagacaggactgtggctgcttcaaccctgtccgtggccaggctgtgccccctcctctgtcgctgggcactcacccctctctcattttctccccagggacctaccagggccagtgggtcggtggcatgcgccagggctacggcgtccggcagagcgtcccgtatggcatggccgcggtcatccgctcacccctgaggacgtccatcaactccctgcgcagcgagcacaccaacggcacggcgctgcatcccgacgcctctccggcggtggccggcagcccggccgtgtcccgcgggggcttcgtgctcgtggcccacagtgactccgagatcctcaagagcaagaagaaggggctgtttcggcgctcgctgctgagtgggctgaagctgcgcaagtcggagtccaagagcagcctggccagccaacgcagcaagcagagctcctttcgcagcgaggcgggcatgagcaccgtcagctccacggccagcgacatccactccaccatcagcctgggcgaggctgaggccgagctggcggtcatcgaggacgacatcgacgccaccaccaccgagacctacgtgggcgagtggaagaacgacaaacgctccggcttcggcgtgagccagcgctcggacgggctcaagtacgagggcgagtgggccagcaaccggcgccatggctacggctgcatgaccttcccggacggcaccaaggaggagggcaagtacaagcagaacatcctcgtcggcggcaagcgcaagaacctcatccccctgcgggccagcaagatccgcgagaaggtggaccgcgccgttgaggccgctgagcgggccgccaccatcg

SEQ ID NO: 16710 - DNA, 2300 bp, Homo sapien
attcaccattctagatcccattaagaacattcgtgattcaaggttggaggtcaaaacatccacattaacaagaatttagaagaagttgattccagccctcatggacggctttaggggctcaagacttcagtggaggaaggactgcagatgtggtggaaatagcaagagaactggaattagaagcggagcctgccgatgggactgcattgctgcaagctcacgaccacactcgaaagactgaggagttgctgcttaggggtgaaacgagaaaatggtttcttgcgatggaatctactcctggcgaagatgctgcagacattgttgaagtgacagcaaagatttagaatgttccttcaatttagttgataaaacagcagcagagtttgaggggattgactccagtttccaatgaagctctaccgtgagtcaaatgctatcaaatagcatcacatgctacagagaaatcttttgtgaaaggaagagttcattgatgcagccaacattgttgtcgttttttttttgttttgttttgagatggagtctcgctctgttgcccaggctggagtgcagtggcacgatcttggctcactgcaagctccgcctcccaggttcacgccattctcctgcctcagcctcccaagtagctgggactacaggcgcccaccaccgtgcccagctaatttttttgtatttttagtagagatggggtttcaccgtattagctaggatggtctcgatctcctgacctcgagatccgcccacctcggcctcccaaaatgctgggattacaggcgtgagccaccgcgcccagcctgttagaagttgccgcctcagccttcggcactcaccacgctgatcacccacagccaagccaagatcctccattgaaggctcagattattgttcacattttttagcaacaaagtattttaaaattaagatttgcaattttttaagatataatgctatagcacgcttaatagactacaatatagtagaaacataacttttttctttttcgtgacagggtcttactctgccgtccaggccggagcgcagtggtgccatcacgactcactgcaaccttcacgtcccgggctcaagtgatcctcctgcttccgccttccgagtagcgtgtggggagggtgcacgcagctgggctaggatggcctggctggggtcagcccccgtctgtcctggaggccaggcaggtgcggagcttacggaggtggccacctagatgatggtgcctactctcgtgagttgaggcccttggatctctggcagtcagcaggactgtggtggcagccggtgtgctggttgtcagctgatgtccctgtctgtgatttttccgtgtgaatgcagccttgactgggcatgtagatcagaggtgacaagtcctgggcacctctgccactcttcttcctgccctgcacccactacagacacagctaattggtggctgcgttgagaatcttgtcaccaggcaggctcttctgtcggctcaggactgtcctgcgggcatagcaggaagtgaactgcagggggaagttggggcctggttgctgaggagggcagtgcgtggtctccaagccagtcagtgcctgcgggggggactagaattctcacccaggcctctgctctcagtcctgttcctcctctcacattcttcacacccaggctgggctcagggatccttgttgatgatggccttgaaatgtcctctgaacagtgtggctctgggggtgtgtaaaacccagggtgatgcctgctctgaaaggggcttccagatccctttgtgtctccagcacctgccgtgtgcctgccccaagctggggtctgtgagctgtgccttggggcccctgcctgtccccgctctgctctctgctgtggcttgctggctgcagggttctccagtgagtgagggatccctgctggccatgcctggagctgagggtggagggaggcccagcaggaagccccacaggtaggccccagtgagggtgcattatctacaggaaagttgcctgggacactctagtgggccgtctaggaaatgcagcctttaaggacctgaaatggagggggatatttttagtttttaaaatttatttctcattaaaattataacacagcctcgtaaaaatattaaaacagcgagacagatgtgtcaggggttatgtatatgaaggaggtagcacagttctcatcacgggtgtgcttagtgtccccctaaagttcatgccagttaatgtgatcgtgactgtaattggaaatagggtcgttgcagatataattaa

SEQ ID NO: 16711 - DNA, 2300 bp, Homo sapien
cactggtgtcccgaggcacacaagcagtccctgccggaagctgacacactgtcatggccaagggccacagtgcaggtaccacggtgacccggcttccctgagtccagctcacgcccgttttccttgtctcaaccttcagagcccttccaagcccccactggctgcagcccacccaggggacccacctttagaggctggactcaggcttcactgaggggtgagaagcgcaggtttacaaagctctggctgggaagaaattgagtaaccactccctgagaaacaaacggagacgtttaattacatgaacgcacacattttaaaaaccgcctgtgcactcccggagggcagagcctgcctctctggttatttttgtgtcctccattcacttacaggctgtgacaaaccctgtgcccacgctgcctccactgccgggagactcagggctgggggagacatgccctggtcaccactgcggagactcagggctgggggagacatgccctggccaccagtggtgagccagcgagacaggaccccacgcgcgctgacccggggacgccatggaactcactcgcgattcctgcacgcgcgctgacccggggacgccatggaactcactcgcgattcctgctcacagcacgtttcctgctcgaaaaccaggagagcctccacgtgccgactagctctgtccacacatccattgcgcagctctgcagcggaaggaccttcagtaaagacgctggtttgtaacgagagaagcgttccaaagtgtcacacgacattgtttattactaaaaggagcagaatttctttttaatcttgacagtgttgttttcgtaacagtatgatttaaactgttacattcatttaggaaaactttttttcatttcataagtaatcaagctatctttccagcttaaaagcaaagaaaaaaggctcagggtaactttttaaaccacttcatcaataagaaaagttctctctgtcattgcacggcgtgattgtacacagtattagcaagcagttcacatgcgccagggccgacttggaaggaaacacaggttaacactgtttcctgtccgagttcacagagatgtttgcagcaggctcagttgctttggcagctggagcgagggtgcctcttccgcgtggctcccctgagcagagaggcccctgtggtttttttctccgccgggctctggggacagggtttctgtggaaatggcaaatggtgcagatgagcagagtcctgctagagaggtcagctcagcgtccaggagggggcgcctgcccccgaggaggccacggacatgcctgggaagttgctgccggagaagtgtgctctgatgtggctacatttggggacgcgggctccccagaggcccaagcgagaaagccgggggttcccaggctgggggtgcaggacgggccaggcactgccctgcagggcccgcccccctgcccctgcaccctcacacccatcttcctctctcagcctgaccccagggcctgggagcccccggcagaccggccctccttgccaaacagtggctgccctttatggactcggcgcctggcagagccactgtggaggaggagttggctgtcatggtcaggggaggcagcccttgggttgtcaaggttggtggtcaacgttgaacccatatctgctggaatctcccggtctgttccacacacgatcatgcgggaagctctgggacccgaaggctgttctgatctcgggggtcacaagttctcacagcagcctggggtcaccagggaccagacccggcgttagcctctgtaaggagctgcctggctgctgggctgagctttgttgcaggcccaggaagatgaccaagaaggacagagcagagccccatctaccactgctgggagggcccgagggagcacgtgcacagcagagccccatcctccactccctgggctcgaagaggcttcctcggtgtggatggcagctgttaacgagcagtggtggtgcagctggaggcctctgtcccatggggcacagacgggagaaggatggcggacgggtgtgcacgcttgggaggacgggcgggcggcataggcctgagcaggtggcatgggcgcacgagaagggtgtgtctgagacaggatgtttatcccaaatgccaggagtggacgaggcggacgagtggcagtgaggtaggcatgtgaggttgttgcctggcccactctgccgaccccagaaacccagcggcctgggcccagcacccggctacacatggggtgagctcacgcccacactgtggcctgtg

SEQ ID NO: 16712 - DNA, 2300 bp, Homo sapien
gtgtctagcgtgtgtgctgcttctgcccaatccctgcctttccactgcggcttgtagctgcccctagtttagaggtgcttgggggtgtgtggaaagctgttgaatgccagctctcttaaggaaaagggtggaactcgaggggagttgaatggtgtctgtttttctgcagagggagcagagtttttgcccacagtctcacggttttcatttaccccattctggggggcacctggggtcctgagcgtgtcctgggctggctctcagggtccttccttgtgttcttatcccacttccttgttctcttttgacagacaagtgggtttggactcggatgaacccttcgggggtcaagcccaccccacggtctggcttttccgtggccatggccccgaatcaccagacactgttcttcgggggtgtctgtgacgaggaagaggaggagagcctgtcgggcgagttcttcaacgatctgtacttctacgacgccaccaggaaccgttggtttgagggacagctgaaggtagtgcaacctctgagtagcatgcgccgtggtgcgcagccctaacttgggtccctgccaccactgccttcctccagcaccttttggtattggggcccccaaagcccatgagctctctcaagaggggcgagggttccgtctctgactgtcctgggtgactaggcttggagagcccttggtcacggtccccttagtctgtcctggatgctggcggggctgctacctcagaagccagttgccctgggctgaggtgcccgggacctccccggccctctgtgtgagaagggtttgctggaggtcctggtgtggaccagcctgtgttatgacccttgagcttccctggtttccgacaccatctttactgtccacgtgagcatagctgctgtccagggccagcccagcacaggcacagcagtgggtgacagtcccagaaggggatcccccagttggcctcagggtctctgagtgtaccaggtcagccggacccagaaagggccaaggagggctggtcgctgttggttgcaaactcctgaagctgcttttgacgtgtggtggcacctgggctggaaattggaaaaacacgcgggttcgtttctggacccacagtccgcctcgctcttttactttagaaggaattgctccaagcagagtctacacaggtttcccctgtggcttttcttcagagagcgtgttgaccccagctagtgtcacggttctcacactgtgatctcagggccgttgacattccccaggattacggaggacctcagagagctttcccttttgaaactcactgttgcagagtccagacacaaagtggatcttagaagtctagaatgtgaagctgactttgggttgatctggaggtagtgatccttggaaaatttggaaataacctggcaaatgtcacctcgtgagctggcagcgttttgtgacaaaatgacaaaggctgtgacagaagggtccagactgacccctgcgacgcagccagggaagtgggacagagagggatggacagctgtcctgcaggaggcagcctgacctgagagctcccctttaaaaacgtttggtgaggaagggcccctctctggctcgccgtttgtagtaaatgagctgggcttgtgggcctgaccgtctgtcttgcttgggaaaggggaggaagcccctcagcctggcttccccagcccttctgggagccagcactgtgggtgattgggttttcccagggtgagcgtcggagcctgtggggctggtgccctgtgtgtggggtctggtgggcctgtccacctctcagtggaggtgtggagcggcccctcagtgaggacacgcagtggggggttttctgccccagcccaggagtgaacggcgaggctagtgggagacaggagcgtgctcctgcagcccagtgcctgcacccagggcagtcagggatggcgccttcctgggtcacacactccccacgcttgtgggtggtccccgcaaacccttgcctggccttgtgggcatagcaggaatgacccctgcctcgctgaagctgctgctctctgcttcctcggtctattaatagggacccaagtctgaaaagaagaaacgcaggcggggcagaaaagaggagcccgaaggtggtagcaggccggcgtgtgggggagctggcacccaggggcctgtgcagctggtcaaggaggtggtggccgaggatggcaccgtggtcaccattaagcaggtgctcaccgcgccaggctcggcggggcagccccggtctgaggacgaagacagcctt

SEQ ID NO: 16713 - DNA, 2300 bp, Homo sapien
gcacagatcaagggtgtttgccgtggagtttagcgtccccagtgccgttaggaaaccaggggacagctctcttatgggaggctgtggcttgggaccagagggctgggctagacccaggagacccaatgcctaggccaggtctgcttttgtgacccacagcaagttctccagcctccccaggagaggggaccattgtgcaaagtgtttttacctccttcttgcactaaaattcctcatgctgaggcctcagaaatacccgaagggttaatctgagtccacacccatttgcctgtcaaaaggcccaggtgcctctcccagggccctgccttactgcaccctggctgataggacagacgccttctttcagtcactttccagcctacaccccagtgaacttgaacctggatgctggactgtttcccgcagggcggccctgagcctgtgtgctctgctcgtcagcccccaggaggaaagcatcgtggtgaggagcgacacaccttgtgtgtgtgggtttctgtcaccggagagggtcctgccctgtgtggcgagttcttgtggtggtcttccctgttccttcacacagtcatgtgctggtgggaatgaggcgggggccccagagccacgcccacactgggcatgggcgggtgacgtctagcaccacacagaatacgtccatttgctgcttctgtttttttttttaaatgttcattggaggaaaaaaatctccattctgtctcctagaagtggtggggagacatctgcacattgggctctgtttgagggttggcacatcacataggcgcgtgccaagagagaacatagacccttcctgaagtagagctggccacactgcagcccaaggtggggctggtgcaggcactcagaccccaggcgaaggctcctcgctggccacactgcagcccccgggcgaagggtccctgtgcagggcggagggtccccgtgcaggcccaagggcggctggcacaggcattcagccccctgggcgaagggtccccttgcagggcggagggtccccgtgcaggcccaaggggggctggcacaggcattcagccccctgggtgaaggttccccgtgcagggtggagggtccccgtgcaggcccaaggggggctggtgcaggccactcagccccctgggcgaagggtccccgtgccgggcggagggtccctgtgcagggcagcctccccacagaagcccctctgtgtgtctagcgtgtgtgctgcttctgcccaatccctgcctttccactgcggcttgtagctgcccctagtttagaggtgcttgggggtgtgtggaaagctgttgaatgccagctctcttaaggaaaagggtggaactcgaggggagttgaatggtgtctgtttttctgcagagggagcagagtttttgcccacagtctcacggttttcatttaccccattctggggggcacctggggtcctgagcgtgtcctgggctggctctcagggtccttccttgtgttcttatcccacttccttgttctcttttgacagacaagtgggtttggactcggatgaacccttcgggggtcaagcccaccccacggtctggcttttccgtggccatggccccgaatcaccagacactgttcttcgggggtgtctgtgacgaggaagaggaggagagcctgtcgggcgagttcttcaacgatctgtacttctacgacgccaccaggaaccgttggtttgagggacagctgaaggtagtgcaacctctgagtagcatgcgccgtggtgcgcagccctaacttgggtccctgccaccactgccttcctccagcaccttttggtattggggcccccaaagcccatgagctctctcaagaggggcgagggttccgtctctgactgtcctgggtgactaggcttggagagcccttggtcacggtccccttagtctgtcctggatgctggcggggctgctacctcagaagccagttgccctgggctgaggtgcccgggacctccccggccctctgtgtgagaagggtttgctggaggtcctggtgtggaccagcctgtgttatgacccttgagcttccctggtttccgacaccatctttactgtccacgtgagcatagctgctgtccagggccagcccagcacaggcacagcagtgggtgacagtcccagaaggggatcccccagttggcctcagggtctctgagtgtaccaggtcagccggacccagaaagggccaaggagggctggtcgctgttggttgcaaactcctgaagctgcttttgacgtgtggtggca

SEQ ID NO: 16714 - DNA, 2300 bp, Homo sapien
ggaattttaaatgtgcgtgtcccctgacccccaagtttaaggattataccctaaagaaatgcttcctcttatttcgtacaaaaatatatacaaaaaacaggatgcagaacaacatatgcttggaaaaaagcctgcatgtgtacacgtgtgtgcaccgcgtgtgtgcagatgattgcatgtgtgcacgtgtgagcatatgtgagtgcatgtgcctgtctatgcctgtgtatgcatgtgtgtgactgcatgcgtgtgagcgtgtgtgtgctcgtgtgtgtgcacttgcaagtgtgtgctgacgcagtgatctggagaacctggtgcgtgcacactgtacgtgcacaggagaagggagaaggtctgtattgtttctgaggttttttctgattcattgatcttttcttggtatcattttttatgctattttaattactgtagctttatggtatattttgataggttggaggatttttctcatttacttaaagtctttgcttttttcatgtattttgtttttatgagctttaccatcagtttttcaaattctattttttttttttttctgagacagtctagctctgttgcccaggctggagtgcagtagcacaatcttggttcactacaacctccacctcgctggttcaagccattcttgtgcctcagtgtcccgagtagctgggattacaggtgtctgccatcatgcctggctaatttttttttttttttttggagacggagtctcattctcgtcgcccaggctggagtgcagtggcgggatctcggctcactgccacctccacctcagaggttcaagcaattctcctgcctcagcttcctgagtagcagggattacagatgcccgccaccatgcccggctaattttgtacttttagtagagatggggtttcttcacgttggtcaggctggtcttgaactcctgacctcaggtgatccccccacctcggtctcacaaagtgctgggattacaggcatgagccactgtacccagccttaatttttgtatttttagtagagacagggtttcaccgtgttggccaggctggtcttgaactcctgacctcaagtgatctgcccccctcggcctcccaaattgctgggattacaggcatgagccaccacgcctggccctcaaattctaatgttaaaagtccagaaggattttgactggattgcgtttgctgataaatcgcatttaggcagtgacagcatcatacccctcattcctccccatcgggagcattgtgtatgtctccatttggtttttttatttatttaagaatttaaacctgggctatggtggtaagagtgtcaaatcctgacctctaaacaccctgggaagttaggtttatttatttatttatttacttttatttttattttttttgaggcggtgtcgcgctctgtctcccaggctggagtgcagtggtttgatctcggctcactgcaagctccgcctcctgggttcacgccattatcttgcctcagcctcccgagtagctgggactacaggcgcccgccaccacgcctggctaatattttgtattttaagtagagacggggtttcactgtgttagccaggatggtctcgatctcctgaccctcatgatccacccacctcggcctcccaaagtgctgagattacaggcatgagccacggcgcctggccaggtttattttttttaatattcagtcaagtttaaaatggcctgaagtagaattgtagagtccaggccgggtgcagtggctcatgcctgtaatcccagcactttaggaaacggaggtgggagcatcacttgagcccaggagtttgagaccagccgggacaacatagtaagaccccatctctaaagaagttagctaggtgtgctggtgtgtgtgtaatcccagctacttgggaggctggggtgggaggatcacttgagctcaggagttcaaggtggcagtgagctgtgattgcatcactgtactgcaacctgggccacaagtgaggccctgtgacttaacgaaacatcagaatgcaaggcatacacatttataaagtctttgacctcatgtctgatggttctcccaaaagcctccagttggtgccggtgctggcgtgtggagggctgactcttggcgtgatgcctgtgcaggtgctcctgtttcacagttttcctcaagtgttctccgtgctcgtcgtcacttcatacctgtggcagacactggactacagctgcggcgccttgcagaatgagtcttcccttccctgataggaaggcgttagggcaactcgtctg

SEQ ID NO: 16715 - DNA, 2300 bp, Homo sapien
ctccagggaaggagctgcctgcaggggctggagtcatgggtcagggctgcgtggcgtgtttcctggctctcaggttcacagtcctgcacttcccgcttcctgttgtctggaggttgttgcttcctagatttcgtctggttttttccttgttgatggtgcggagctaacgtggtacaggttgctccatcgtgggcaggagtagaagttttatctgtgggtctccgtagttttaatcttcccttgagtcatatttatttttttccctggtgttcattatctttggggcgtaggctatacgaagctcttagactgctgatcagcctgcctttgggtggtcctctgggtcggactgggtcaagcctgggattgtaactaagatggaggaaaggatgttgaaacagtgctgtgggctgggcatggtggctcatgcctgtaatcccagcactttgggaggccgggatgggcgaatcacaaggtcaggagatcgagaccatcctggccaacatggtgaaaccccgtctctactaaaactacaaaaattacctgggcgtcgtggcgcgtgcctgtaatcccagctactcaggaggctgaggcaggagaatcgcttgaaccaggggcgttggaggttgcagtgagccaagatcacgccactgcactccagcctggtgacagagcgagactctgtctccaaaaaaaaaaaaaaagaaaaaacagtgctgtggatcggattgtggattacactcttgcctggagtttgacttcatttttttctttttggtcttttttttttttcttttttgtggagaacgggtctcgctatattgcccaggcaagtgttgaactcctgggctcaaacgatcctcctgcctctgcttccctgagagctgggattacaggcgtgagccactgtgcctggccatttggcttctttttttttttttttttttttttttgagacaaagtctcactctgttgcccaggctggagtgcagtggcgcgatctcggctcactgcaacctccgcctcccgggttcatgcctcccgggttcatgccattctcctgcctcagcttcctgagtagctgggactacaggcacctgccaccgtgcctggctaatttttttagtatttttagtagaaatagggtttcaccatgttagccaggatggtcttaatctcctggcctcgtgatccgcccgcctcggcctcccaaagtgctgggattacaggcgtgagccaccgtgcccggccgacttcattttttaagaatggctttattttttatattttagaaatagggtcttgcttgttgtgaaggctggtgtcaaagtactgggctcaagcaatcctcccacatgagcctcccacagtgttggggttacaggcatgagccactgcacctggccaggaatggctttagggactgattatgtaaggtgtaaatattcattctgaaaaaaatgaaaagaattaaaaggcaagtccattgtctattctccctaaactgaatttgtattttctgcatgttttctctgcacataaagttcattttttttttcttttttttttgagatgaagtcttgctctgttgcccgggctggagtgcagtggtgcgacctcagctcactgcaacttctgcctcccaggctcaagcgattctcctgcctcagcctcccaagtagctgggtttacaggcgcatgccaccacgtctggctaatttttatatttttagtacagacagggtttcaccatgttggtcaggctggtctcaaactcctgacctcatgatctacctccctcggcctcccaaagcactggaattagaggcgtgagccaccacgcccagccagttcatatttctatgcatctatttcacgctaactggagcgtgcatgtatgtgttctttctatagtgttttttaccgttgatgtattattgtaggattattctgtggcattgaatagtcttcccgagatgatagtttaaaactctatttactgtgtggcatggttgtgccacctaacttcctctagactcaaaacatttgttaggtttcggccttgagccagtcatcatgtctgctgtaaaggtgtaaattggtcagtttctccctatggaactactgggcttttagaatgataggaaacctggcctgtccctttacaggtaagtcctctgtgctgagatgacagatgcaaagaacaactggaagtgggtggggtggagagggacacgccaccccctgtgtgctgctaccacctgcgcccgctgtctggcccaggaaggaaccgcatcggt

SEQ ID NO: 16716 - DNA, 2300 bp, Homo sapien
tttcacagtcctggcaattattgggggaaggattggggacagtttggaattctgctcccacagaactcatgtatcaggtcacctggttcgcaccttcacttagtcctggcctctgcctgtctttccagctgtctccctgggctcactccagccacagtgtcttttagtgtctcaaacatggcaagttgtgtctgtggtcttacctataccccaaccatactccgtctgagtcgtcttttcagcattcagcttattgtcactttggagaggctgtcactggctaggccactggcgtcacccagaccctaccaccttgctctccttcagtcacccaatgatgatgaggttcagccaaggtcaaagaccgctctaagtagcagcagcaaagctttcgcggtacatagacgttagtatttgaactgtttgtttaacctcgttgagcaaaaaaagcaagttgaaagaatatacagtatgataccatttaatgacattttattttttattttttttgagatggagtcctgctctgtcacccagagcaagtgtcgcagtggcatgatctcagctcattgcaacctctgcctcccaggctcaagcaattctcctgcctcagcctcccgagtagtttgggactacaggtgtgcgccactgtggccggctaatttttgtattttttagtagagacggggtttcaccgtgttggtcaggctggtctcgaactcctgacctcaaattatccacctgcctcggcctcccaaagttcggggattacaggcgtgagccactgtgcccagtccatttaatgacatttaaaaatgtaaaacaatactatatgttgcttagggatacacatgtgtaataaaagattgaagaaaagcgtgagactaataagcatcgagttccagatagtggttacttgagggaatgtgtgggtgggtacatgtgggtgacactttattccttaccctgggaaccgtatacaggaatgtcttggataaagttctgttaacttgtgtgttttaaatattgcatcgtttagaatactaagcagtgtaccctgctgacattcaccctgagatgagaggtagactgaaggaagcacgaggtggggcgtggcaggctgagggaacctggcgttttcattgaaggaacggagaggacgctggtgtatcttggagagtgaggccaggtgggaggtgaggttggagaggtgggtgtgggggagggaagatggtctgcaggtgtgtgtagttgcaagcaggacactgaaggctagaaggaacttgaaatgccaggctcgggtgtgcatgggagtgtctcgtaaatgttgggaaatgggcactgggactgaggcgggaacactgggttccagtgctgccctctgtgctggcacatcagtaccttgagtcactctcgatggtagtaaaagttgagaccttcttacttggatagactgcagctggtatttgctgagctcttgctgtgcaggcagtgttttaactagacacaagtcttgctctggtggagctcatattttattattttgttggggtggaggaaacaaataagcaagagaaatatatcagacactgctcagcagacaggaaggcaggcaggcgtgacggcccaggcctgggctctgagaggtgctgagggtgtctgcagtgaagtcacgatgggcttgtctaagtggaagttcttgtcagacactgctctgcagacaggaaggctggcaggtgcgacggctcgagtctgggttatgagaggtgctgagagtgtctgcagtgaagtcacaacgggcttgtctaagtggaaggtcttgcagagggagcgttaagggtgtggagataatacttggtgcacacatctaccctttaagcagactgcctttgaggtcaagctctggttactttcgaatgtgtcaaactctgcatttcaaacaggcacagtatgttgcaattcacagatgtgactgagcccagtcgaatcacactgattggaggaaagctgagcgggctgtggctccgcggcgggtcctgggaataagtctcacgtgtgcctgcttgcttgccctaggaagacctggaagcgctcatagcccatttccagacactcgatgccaagaggactcagactgtggaacttccgtgccccccaccctcaccaaggtgagcaagtagcatttttcatattgtatgtttccttttcttctatacattgaaaaactgctttaaatagcaccaggtttcgtaaatgaccaggcacttgggacattttcattattaaaacctgttcttggt

SEQ ID NO: 16717 - DNA, 2300 bp, Homo sapien
ttagtggagatggggtttcaccatgttgatcaggctggtctcaaactcctgacctcaggtgatctgcctgcctctgcctctcaaagtgctaggattacaggcgtgagccatcacacctggctggatctaagataacatctttttttttttttttttttgagatggagtcttgctttgtcgcccaggctggagtgcagtggtgcaatctccgctcactgcaacctctgccgcctaggttcaaatgattcttttgcctcagcctcctgaatagttgggactacaggtgggtgccaccacacctggctaatttttttttttttttttgtatttttagtggagacagggtttcaccatattggccaggctggtcttgaactcctgacctcgtgatcagcccgcttcagcctcccaaagtgctgggattacaggaatgaaccaccacgcctggcctaagagaacttttaaaggctgactcacacacaaagtaataaactagattatttcctgatttatgctttccctttgccaaattttggcttgtccttgtccttaatttgccttattccttgattacccatccaaagatgacatcttctaagtagtgataagcatttttactctgctctttcaaatcataacattccatgcactgcagatgattttgccatttcttacgtaatttgaggcaaatcctagagtacaatttcctagcaggcatttggatattacctatctttatttctcaggctccacaaattgagtaccctttcagggtgctatcattagctctagcctacctatgaagaaacaaaagtcctccatgttaggacatttgaggacatgcccttagtacctaacagtgtctggcacattttaaatgggaaggtggaagggcccccccatttttttttttttttaagatggaattttgctcttttgcccaagctggagtgaagtggcttgatctcagctcattgcaacctctgccccctgggttcaagcaattctcctgcctcagcctcccaagtagctgggattacaggtgcccaccaccacgcctggctaatttttgtagttttagtagagacgggggtttcaccatgttggctaggctggtctcgaactcctgacctcgtgatccactcacctcggcctcccaaagtgctgggattacaggcgtgagccaccgcgcccggcagggactgtcttactcaggatctgcaaaatcttataactgtgtgaaattttttttctgggaaaaaagcactcatttgtttggtctgaggggaaaaaatggggctagcccaagagtcgcccacttagttctacccagggcgaagcaatgtgccttaacggggggcacgtgcaccccggaaaactcaagagaaaatgagccgggcgtggtgggctcctgtggtcccagctactccagaggcggaggttacagcgagccgagatcgcgctaccgcactccagcctgggcgacagagcaagaccctgcctcaaaaaaatagaaataaaaaataaaactcagagggcacgtctcctaggacacggggacaggctaggtgggggcacagggcgtgagaattggcgagcatggccggggtatgtcaggccggggctgccatcttttttgttttttgaaacaggatctcgctctgtcgcccaggttggggtgcaggggcgcattgctgcctggaactccttgactcaagcgatcttcccgcctcaccttcccgaggagctaggaccactgggcgcgagacaccacgcccggttaatttttttttttttcttctgtagcgactgggggtggggggtggtgtctcgctttgttgcccaggctgatctcgaactcctggactcaagcgatccgcccgccaaggcctcccaaagctccagggttacaggcatgagccaccgcgcccagcccggggccggtcatcttttccggggccttatgcagagtccgaggcccccgagcccgctgccgaagacggagctccaagaccgaacctcgtaaagggcccagccgcacctctacccggaagcggctcgaactcggggccggaagtgactccatttctgtgcgccgagctccgccccacgagcacctgtttccgagcggagagcgcgggccgttttctttcctggtgtcccgtcgcggcttgggacccggcaagatgggcaagaagggcaagaaggagaagaagggccgcggcgcggagaagacggccgccaagatggagaagaaggtgtctaagcgctcgcggaaggaggaggtgagcgggtcagac

SEQ ID NO: 16718 - DNA, 2300 bp, Homo sapien
attttttaaatttatttttattttattttatctttgagatggagttttgctcttacccaggctggagtacaatggcacgatcttggctcactacaacctccgcatcccgggttcaagcgactctcctgcctcagcctcccgagtagctgggactacaggtgcccaccatgcccagctaattttttgtatttttagcagagacggggcttcaccatgttggccaggcttgtcttgaactcctgacctcaggtgatccacccgcctctgcctcccaaagtgctgggattacaggcttgagccaccacacctggcctaaaatagctttccaagcagtccttttggtcccagtaggtaaagcttcaaggcaggccctagagtgccaaccctctctgacccagaggtgagggttaatgttaatagggtccctttcagcgaaagttagggccacacttctcatgtccctaagccatttgtacttgttttttttctctgacccacctgtgtgtgtggtgagtatgtgtgtatgtgttgcttttttttttggaaagtgattttcagtaacagaaagggatgtactctctgcaagagtgaatctattcttgcccctgtgtgtaaggcaagaaagagaagctgtgttctctgaacaggcagaccctgctgagagagggaggtgtgttggggttcaatcattctggtgggaaagatattagagatagttatagaaatagacacaaatcttggaaggccgagaagttggcataacttcggtaattagctctggctgaaggcggcctgatccctttacctttaattaaacaaataaaaatagtgataaaagaaaggcagcgtagtttacctagctagcttgtttactcgcataatcttaagaccgtgggtgtttaagtgctttttacttgggaagtccacaatgtctgttacattctaatggtgttgactcaagcttttgttagttaatcatactgaataaatgcacgtctgactagctgatcagggccaagtagcaactgtttacaggactcagcagggagcctataagcggctgggaccctcagctggactggcagagcagaatatctgtgtgtctgtactttattcatctgtcaccgggtcaggggtctgcaaggagtgctgtcgcagaggtgggctttgctgaggctggtagaactccaagctgattctcaggtcattctgacttcagctcggagaagggcagtggatgtcccgggaagggagaccctgcccttataggggggcttctgacaggtgcagggggcagcctggagcccggaccagtgggcaggatgggcgctccagggtgtgaaggagaggccgggcgtttgatctgtggacattgctcctggagcagtgaaaagccatagaaagtgatttattttacttatttattatttatttatttatttattttgaggtggagtttcgctctttttgtccaggctggagtgcaatggcacgatctcggctcactgcaacctctgcctcctgggttcaagcgactgtcctgcctcagcctcccgagtagctgggattacaggcatgcaccaccatgcctggctgattttgtattttttagtagagacagggtttctccacgttggccaggctggtctcgaactcctgacctcaggtgatccgcccacctcggcctcccaaagtgctgggattacaggcgtgagtcagcctactcggctgatatatatatatatatatatatttttaaatgatcacacataaggttgggttctggaattttctgcttaggaagggaaagggcaccttttacccccttattccttgagcctgatcctacagaaggtacagtggctttcgggtctggatcctcagccctcgggcctctgaggctgccttgggagagggtatagatttgagaacaaggttctcagttttgctggctgtcttttcagtcgcccaggcacgtcccacagaaggtttctttttgtgaaataatcgtgtgaaatgggttggcctcggtgcttagaaccatcccactgacggtgagtgaaaaaaatcccttgcttgtcagtctgggtaggagatgaggtcctttcacgcgtgtcttcgtgttggtgcgcttttcactggtcataaaggtgagaggaaccagctccatgtgtctctttctggatggccatatggaacttggcatgacagtagggttgtgtggttatttattgcttaacgaagacttggcagcgtgtactggaaattcaagcgatgctgggttttatcagaaggcgcaa

SEQ ID NO: 16719 - DNA, 2300 bp, Homo sapien
gacttgaacacgctcatggctgttgtcacccttcctgcttaagggctccagcacttgccaggagcctggctctgggggcaccaaccatgacttgcaccaactgtgcagggccccctctgtgccggtggggacccctgcacctcccttattaattctcactcaccctgggctctcagctccaggtaccacctcagaaaagtctatctggacctgcctggtccctgtcgctgtcgctggctcaccctgtcatgtccttggcttatcatggttgtaattttatgctttggggtatgactgttggttgcctttcttgttactcaaagaagaatggtggaatgattaaaagtaccatataagttcagagtcaaaaggacagctcccaggctacttgctggccggacaagcgaggtaaccctaccaagcctcagcttccttatttgcaaaatggctctaactggcacctaccctattgcataagaagctgtctaggggaggactcagtgagcactcggtgagtttgcccagccatggtggtactgtctccttccctctgcaggcacagcgggaagaatagggcagatggaggggtctctgcaccttccacagccagcaatgtggacggcagattacaagttagtatctgtgtgacctccgcactcccccgcctgtggctgcctgggctgctgagatttcgctcggttttatcaccgcagaggaatgcccgacataccggggggcgagcaaggtccagaatgacaagccctggcattcctcagccgccccctccctggggtggggcctggacattcctggctgcagctagaggtcccagcacgacagggattctgacccccctccaccacggctattgttcagaattctgtggattccagaggcatctgcccagcagactgtcttgctgtgaacacccagctctgcaaccggtgtttgcgtgtttgccctgggaggctgaacgctcacccagaacaaaggcctccccacatgcctgctgtgagcttccaaggactcgtttgcacacacgccaaggaaccccggggtggggtgatactgaggagcttcctccctgacccacacacaccctttgaacaggtctttggccgctcaccagtctggtcaatctcggggcagtatttatattccttcccatttccaggcctaggagccttggcatcctgctctcgcctctaactgaaattacctctcaaccctttttagctaagatgcctctcgcattccctaggaataacaagctttaaagccccttcacactgaagcctgcctttgaattccccaggtagatttgggggtgggggtcttatggctcccagcgaacccccggttctgttgattaaattgagctcaggcagattgctggcttcccaaagcctgtgttattactgcttctcaaagctacgggcaccggatcgccgtctttggcaagattcttttgggatacaatgggaattactgggtggcctcggttcggttcttccctcgtcccagttcgcggctcaccagccccactgatgcagcccccaggctggaaggaggctgcaggagcttcccctcaggtcatcctctcatccctcccccgtgccccaggagctggttgtgggggcggttccatcccctcggcccatccgggacaggagcctaggttcccttcggggggtaccccaaactccatccttggcctcaggccagccctggtgcactgcccgctcccaggcttgacgagaggctgcgggccagtgggtgaaggggcgcgccctgactgccaggccccgcccaggcgcatccgggaggacgggctgggatgacgcgggcgccgggaggggggaggtcgcgaggccggggtctccatggcgcaggaggactggggccttcgaggaccacgcgggcctgggaatagcccgccaggctgggccggacgacgcacgtgctccgagctgggccgagggggcggggctgagggacggggccgggccacggggcggggaggagccgcggacggtgggcggggccggcgggccggggcctaaaaggcggcgcgggcggggttcctgacgcagctgcgggcggcgggcggcgcgcacactgctcgctgggccgcggctcccgggtgtcccaggcccggccggtgcgcagagcatggcgggtgcgggcccgaagcggcgcgcgctagcggcgccggcggccgaggagaaggaagaggcgcgggagaagatgctggccgccaagagcgcggacggctcggcgccggcaggcgagggcgaggg

SEQ ID NO: 16720 - DNA, 2300 bp, Homo sapien
caagagtgggtgcatttccaccatgactgtgtgggaaggagagaacatatcatccagacttggtttttgttgctcaaaacaaatgcaagcaaactcttgggcccaccagagcagtggccgaaagccgcagaccctatccattgtgtgggggatttcagtgggattcttgggctttcaggagcctacaagtggactcgcatttcaacacctgtgttctgtagggttttctagatctaagattccaggattctatgaaaagttatgatagccctgccccctaaaagattgtaagtttaaacaacaacaagaagtcacaaactggtgcatcccaatcccatgggttccatttcacaggtaaaaggtgtctgggtgaataaactgctgtgccgctcaaaggacccaaaggaaggttctttgtgggttggcgtctgcaaatatcaccagctgcctggctagagtgaccagctaacatacccatgtggaccctgggcatgaagggaggtaccaggccaggggcagtggctcatgcctgtaatccgagcactttgggaggccactctgggaggattgcttgagcccaggagttcaagaccagcctgggcaacatggcgagaacctgcctctacaaataatttttaaaattagctggacataatggcatgcacctatagtcccagctacttgggaggctgaggagggaggatcacttgagcctgggtgattgagactgcagtgagccatgatggcaccaccgcactccaccttgggtgacagagcaagacctcacctcaaaaaaaaaaaaaaaaagaaagaaagaaagaaagaaagaaagaaagaaaagaaaagaggctggacgcagtggctcatgcctgtaatcctagcactttaggaggccgaggtgggtggattgcctgagctcaggagttcgagaccagcttggggaacacagtgaaaccccgtctctactaaaaatacaaaaaattggccgttgtggtggtgtgtgcctataatcccagctactcaggaggctgagacaggagaattgcttaaacctgggaggcaaaggttgcagtgaggcaggatcacgccattgcactccagcctgggcaacagagcgagactccatctcaaaaaaagaaagaaagaaaagaaaagaaacgaagaaaagaggctgggcgtagtggctcacacttgtaatcccagcactttgggaggccgaggcaggcagatcacctgaggtcaggagttcaacaccagcctggccaacgtggtgaaaccccatctctactaaaaatacaaaaaattagctgggcatggtggtgggcgcctgtaatcccagctactcaggaggctgaggcaggagaattgcttgaacctgggaggcagaggtagcagtgagccgagatcacgccattgcactctagcctgggcaacagaagtgaaactctgtctaaaaaaaaaaagaaaaggaaagaaagaaaggtggccctgttaatgtttatgccaagacagcaggcatgacctggaagtgtccgaagccacagggcatcttgcttccggggaggatgaatgaatcaaatcgcacctattttaaggcaagcaaggactccatgacttcaggagccctggtgggtggacagaagctccctgctcccctggcctgtctacccagcagcgctttggccagtcccattcctgtacttctgagcctgcctgccagtccctcctcacatgcacaccatggctttgtgcctggtattgagtgtcccggagccccaaaccacacggtcaaccccatgaaagaaacagggactctgctctcatccactcgcccccgcctcccgcgtaatcccctggtgctcacgcagccccaccgtacagtttttctagctccctggcagacttgtgctcctgtttgccagatcaaagcccagtgacctgagtggcctgtccccagcagaggccactaatccctgtggacccaccctgttgggaaaggcatgggttgaactttaaccattaggctcaggggttgggatgagtttctacaaaaagaggtgggtacacgccagtccacagtggtcctgatcaaagtgagaacagacagcagggaacatcaccctcttcagactggagtcagtgggaacagacccaagatgttggggaggaacacttggaagacctcagctttctccttcttggttgagcagatgtgggcccctctctggagtcgttcgatgaggccagggcgatggtgttctcagcgttcctgtgcatggcaaaccagcaataacacttgt

SEQ ID NO: 16721 - DNA, 2300 bp, Homo sapien
aagcgaaccttcactacagacagctgtctttgctgatgactagctacttcatttttaaaattacggtgaatcaactatatgccaatattgaacaatgccttccttttttagcttcctgagcagcaaaataaaaactaaatcaaaaccatcaaaaataaaaaagtgtagtagctcatgcctgtaaccctaacactttttgggaggctaaggcggtaggaccgcttgagtccaggagttcaagaccagcttggacaacatattgagacctctgactctacaaaaaataaaaaaaaatcaggcaatggtggtggtgcatgcctgcagtcccagctactctggaggctcaagcgagaagatcacttaagcccgagaggtagaggctgcagtgagctctgattgtaccatcgcactccagcctggatggcagagcaagaccctgatgcaaacaaaacaaaacaaaacaaaacaaaacaaaacaaaacaaaacaaaacaatcactaactgcagcacaatcatagttttgattggcttaatttctgataatgcctagtcagcagtggccttcaacaaacctcactgtagcttgttggatggtcacagatggattcacctttgcccacaagttcctcctcttgtccactcacacctgttcatgacgccgagcccagcattgcacaaggcctggggataggggaagtgcagctccagacacggacttgggaatgttttgaaacaacaggaacgacatcaccctaggtttgtgttttcaagccagatattccggcgtggatgctaagaattcttacatgggcaagtattaatatttgaatgcagccgtgattgaggtggaggtggagacaaaaggcgtgcgtccctagaacatgttttgtccccactgccggagggaatattctgtgtcagctatcgcacgcaccctttccctccatgtgagtggactccacactctaagcaaggcgctctggactgcaaactcagcttgtgcctctctccagccctgtggcctcgctggacaatttttctaatctctttggagctgatcttcatgttgaaaaaggacaagtcccatcttcagatcaacacctgtcccagcgctgccattttgccaaggctcctccttggagtgtttgtaaggcacttttgccacgaagtaacccagccaccagcctcagtggaacctccaagcctaattctggaggagactttaactcggtaaggttgcccaaggtcgcatagcccatgactgcgctgaatcctgtttttattattggcaaaagggagttgggcaggaaattcaaggtaaagcattttgtttttctttctttctttttttttttttttttcttgagacggagtctcgttctgctgcccaggctggagtccagtggcgccatctcggctcactgcaagctccgcctcccgggttcacgccattctcccgcctcagcctcccgagtagctgggactacaggcgcctgccaccgcgccgggctaattttttgtatttttagtagagacggggtttcaccgtgttagccaggatggtctcgatctcctgacctcgtgatccacccgcctcggcctcccaaagtgctgggattacaggcgtgagccgccgcgcccggccagcattttctttttcccagtgaaaatagctgcctcgccctgtgtttgggagctcaaaggcattcttgctcattgcaaataattgaggaaacagaggcgagtataaagaagaaaatgaaaggcaaggtaatcctagattagcagagggagataaccaggaatgacatttctgggaactgcgctatggtttgggaattttttcctgtgattacccacaaacgcacatttgcacatttattctacgtgtgcacattcacgtcatcactttttttttttttgagacagagtctcgctctgtcgccaggctggagtgcagtggcgcgatctcggctcactgcaacctctgactcgcgggctcaagcgattctcctgcctcagcctcccgagtagttgggattacaaggcgcccgccaccacgcccggcataattttgtatttttagtagagacagggtttcgccatgttggccaggctggtcgcgaaccctttacctcaggtgttccgcccgccttggcctcccacagggctgagattacaggcgtgatccaccgtgcccggccgccatcacttatttatattatgtgttacctataggacttatctaagaccataatcactgccgcgtgtgctaagtcccgcgcgcgtgcactcaggcc

SEQ ID NO: 16722 - DNA, 2300 bp, Homo sapien
tcttacatgggcaagtattaatatttgaatgcagccgtgattgaggtggaggtggagacaaaaggcgtgcgtccctagaacatgttttgtccccactgccggagggaatattctgtgtcagctatcgcacgcaccctttccctccatgtgagtggactccacactctaagcaaggcgctctggactgcaaactcagcttgtgcctctctccagccctgtggcctcgctggacaatttttctaatctctttggagctgatcttcatgttgaaaaaggacaagtcccatcttcagatcaacacctgtcccagcgctgccattttgccaaggctcctccttggagtgtttgtaaggcacttttgccacgaagtaacccagccaccagcctcagtggaacctccaagcctaattctggaggagactttaactcggtaaggttgcccaaggtcgcatagcccatgactgcgctgaatcctgtttttattattggcaaaagggagttgggcaggaaattcaaggtaaagcattttgtttttctttctttctttttttttttttttttcttgagacggagtctcgttctgctgcccaggctggagtccagtggcgccatctcggctcactgcaagctccgcctcccgggttcacgccattctcccgcctcagcctcccgagtagctgggactacaggcgcctgccaccgcgccgggctaattttttgtatttttagtagagacggggtttcaccgtgttagccaggatggtctcgatctcctgacctcgtgatccacccgcctcggcctcccaaagtgctgggattacaggcgtgagccgccgcgcccggccagcattttctttttcccagtgaaaatagctgcctcgccctgtgtttgggagctcaaaggcattcttgctcattgcaaataattgaggaaacagaggcgagtataaagaagaaaatgaaaggcaaggtaatcctagattagcagagggagataaccaggaatgacatttctgggaactgcgctatggtttgggaattttttcctgtgattacccacaaacgcacatttgcacatttattctacgtgtgcacattcacgtcatcactttttttttttttgagacagagtctcgctctgtcgccaggctggagtgcagtggcgcgatctcggctcactgcaacctctgactcgcgggctcaagcgattctcctgcctcagcctcccgagtagttgggattacaaggcgcccgccaccacgcccggcataattttgtatttttagtagagacagggtttcgccatgttggccaggctggtcgcgaaccctttacctcaggtgttccgcccgccttggcctcccacagggctgagattacaggcgtgatccaccgtgcccggccgccatcacttatttatattatgtgttacctataggacttatctaagaccataatcactgccgcgtgtgctaagtcccgcgcgcgtgcactcaggcccctctggatagacactggggacccctgaccacttatgtcagggaaaacgccaccaagcgctccggaacctcagggcaggacccgccgcagcagcaggtaggacccgctgggggcgcacagcccacctgagacatcgtaactacaagtcccagcaacccttggtgcggggacaggacgggccaccggagtccggagagactacaagtcccggcaggcatggcccagacgcagggactacgagtccccgaatgcatggctcccagcttgcgcagggcaccctgggaggtgtagtagttgagggagctaatgcgtattcattccgtctcaaagaagatgcaaattcctcagaccgtccactgaggtgattgttctcacgcaggccatgggcgtgggcgaaaaacggggggaaaaaagccctgggaagccggtaccgtcgcggaagaaggccgcctgcgcatgctcaccaggaggccgagcgggaaaagcgcgcgcagctggcctcactgccacaggggtgccccgcccccgggcccgcgcgcccagtgagcctgcgcggagggcgggggccgagcgtcgcggggaggggctcgcggcgcctgcgcagagcggcggcttctctcgcgaggacggacgccattatcgcatctccccgacaaacaccacgagaattccgcagcccacacggtaattgcagctcccgcagccggtcgcgcctccgcctcccccttcccgcggggcgagagcgagagcgagatctccctcctccctcctcctcccgcccgccgggccgcccgcgccgc

SEQ ID NO: 16723 - DNA, 2300 bp, Homo sapien
gcctttttttggtatttttagtaagacaggttcaccgtgttggtcaggctggtctcgaactcccgacctcaggtgatccacccgccttggcctcccaaagtgctgggattacaggcgtgagccaccacgcctggccagaaaaggttctacaggtttttttgcctttttttttttaaaggttctgaaagcaatctgtgaccccaaaacgttttaaatgcaccaatgccaaggttggctgggtggcttttgactgaagactactggtttcattaggaaatttagttggctgggtgcagtggctcacccctataatcccagcactttgggagaccgaggtgggtggatcacctgaggccgggagttcgagaccagcctgacccaacatggtgaaaccccatctctactaaaaatacaaaattagccgggcatggtggtgtgcacctgtagtcttagctactcaggagactgaggcaggaggatcacttgaacccaggaggcagaggttgcggtgagctgagatcgtgccattgcactccagcctgggcaacaagagtgaaactctgtctcaaaaaaaaaaaaaataagtttagtttatccctttaataatctttgcttctggttcttactctggaaaaaagaaggctgtattgatgacatgtagctttgatcttcaagctgactactgacgactctgagctgaaagatcctcttcagaggacgcaggtttagtgtcaccacataagtttcatgctagttgcgcctgacagggcccctcagtcaggctatgtggtttctgcttccctggagcagctccgaaggctgagcaagatcccagtgttgatcctagcaccagtgtttgaagaacatgagcgtgcgtaggtggagttggaatggaccctccccccacagcttagatctgcatattttcctgtccgatcattttttaaaagtatacttctttttctttttgaaaaagtgataaatgcacaggataaaaatggaaatattattagaggatgaaaagtgaaaaataatttccttttcacccatgccccaggctgttgtaggtcttctgtatcttaacctggaaatattctgtgcatatctgacatacttcttaaaaataaagcatgtcgtctgcactgccctcgtccacactgccctgcccagttgatattcacgggatcctgcaccttgggagccgcttttcgggggctcttgttgactcctgaagctgcgtggtatattccattcttagctatgcaatgctgacatccattcttttgctgctaaaaacaatgccttacgttgttttgttgttgttgttgttgttgttgttgtttgtatgtaggtctttgcacacatatgtgaatgtctgtgctggctgaatgttgtgtggggcatggccaggttaagggctgtggccatttagcattttgatagctattgcccttcaaagaggttgtacccatttacacccccagcaaaagcgcaacagccatgttttctgatatcttctggcgaagtgtgtcatattttgtgatttttgccaatctgattggtgaaaaatgttgtcttgtttaaattgttttaaaaagattacacatcgagattgacttttttttttttttttgagacagagtctccccctgtcacccagtgtggagtgcaatggcgtgatctcagctcactgcaacctctgcctccccatttcaagcgattctcctgcctcagcctcctcagtagctgggattacaggcacgcgccgccatccccgtctaattttttgtatctttagtagagacgggctttcaccatgttggctaggctggtctcgaacacctgacctcttgatccacccaccttagcctcccaaagtgctggattacaggcatgagccaccacgcctggcctgactatctttacataacttgtttttctgtgaattcattttcatttccttatgctcatttttgattaggttgattggtcttttttttttttttttttgacagagtcttgctctgtcactcaggctggagtgcagtggcacggtctcagttcactgcaacctccgcctcccgggtttaagcgattctcctttctcagcctccttagtagctgggattacaggcatgtgccaccataccctgctaattttcgtatttttagtagagatggggttttgccacattggccaggctgacaggtgatccacccgccttggccttccaaagtgctgggatgacagatgtgagtttcctagtcttgattttgattttcctatttgcatttctgtg

SEQ ID NO: 16724 - DNA, 2300 bp, Homo sapien
cctcaaaatcaaagaccaaaatcggtcgacagtggtccttggctttggatgatttcccaccaggtagatcggatttgactgcttttgcctaggacctgtgagaggttcctgttagaactgcaggacgattcagcatctttaagtttcagagttttgagaggaatcatctagtgtgtacaggcttaaaggcatggacagtcttttttgttttcctgttaagatcttcggaatgtcaatgtatgtaacacgtctgaggggagttgctttggtggaggtggaggcagggaccagagaggcctgtgcacttggctttcctctagcacctggagaatctgaatgccagccaggagtgcttcacccacatcggtgggcagccttgtgtgtaaggtgctgggagggtggtctgctgtggggtgggtgctgtgaccttgttggtgtcacagtataaaccggtgtgagttgaggcccttccaggaacggcttcccgaactaggcggcatttgagtggggctggacagaaggttgttagatttccctggtggaggtggctggagggttggcagtatgggaagggctggggcacagcaccagcagagcggggcaggtgtcatctggccacagtgaggtcatcctgcttggctgtggtgttggtgcccttgaaagcagatggtgtgccaaggtgtgcatgtgctgaagggcattcccagcggccagcattcagatttctgatttttttctatcagaagtgttacaatacgcatgctcatatgtatgcacgtatataatatctattcttatatactggcattcatttttgtaaatagtcacacactggtattactgttaaaaacttaaacctattaacctggatagtcccagctacttgggctgaggtggggggtcccttgagtacaggaatttgagtccagcctgggtgacatagcaagacctcatctcttaaaaaacaaaaacaaaaaccaaacaaaacgattaatattaacccagagtccatatttgttgctcagtgaagaggaaggctgcagacaaacctgttgatgaggcagatggtctcgcacctcccacatgtatgccgtttgtttatctcaatgtgtgagcatgtagagtagagcacggtaggagtgcactagacagttcacactgtcatttcaggcaaggaaatgagaagaaaaaacactcatgacacaatgtacaatctttaacaagaactgttgaccttgaacttctatctataactgcaaatgtgtaaattttaaaaaattgactaggtctaaggaaaaggactagaagggtcacagacagatagaaatgtgatttgcagagatgaggcaattgtggccgattttggtctttgattttgaggttatctttgacgttgtttttgtaatcagttttagagaaaaggaaggaggttgggaccacactgtggctgccctgagctggggccgagttgcttatcctgcgggaagccgtgacgatcacctgacgcttgctgtgtgatgggggcagctggtctcagctgtgcctgggagggtcggggttctgtcacttagtgtgttaagattgacactgttttgattatcagcacctatggcaatgtgatattcagtgtattttttccccttttagttctggacctgcagatagggtggctttgattttggaatgaggtgaccaacagataaaactttattttaaagttgggaagaaatcattattattgattgggttttatcgtgggttttctcaaaccaaacagggcagccccgcagagcatggagtcagaagtcagaagcttgcaggtttggagttaggactgactcagtggcacattaattgcccagtgtctgggcttttcttgggattaaggagttatcctgtttttctgcctgactgagaataagtttaaaaaggtgaaatatgagataggttctgctgtttctccttcaaccttaaggtgtcagcactgtttactatcttaatgttaaaataattctgtaaaacttttcatgttaaacattttttttctctgtcactgatttcagttgttttggagaatcatgtagtgacagatgaagacgaacctgctttgaaacgccagcgactagaaatcaattgccaggatccatctataaaggtaaaaatctgactctgttctgtggtgtgtagtgcgttgcagatttcaagggctgctataacaaatcaccatcaatgggatggcttcaaaatgtagcctctcagctgtggaggccagagatccaaaatcaagatgcaggcagggt

SEQ ID NO: 16725 - DNA, 2300 bp, Homo sapien
gcccagccccctgcccctgcacccagcccagcccagccccctgtccctgcacccagcccagctccagccccaggcccagatggagggcgctccagtgggcttgccccgtctcgtgaaacagtccagaagcctcagtgttctcatcgtcaggctgggttctgaatggcgcgctgtcgctgcgggacctcggggcctgtaaagatcatgggaaggggcagctgtgccggcagctcctcctcctcggtgcagcaactcctctccgagtttatttcatgtcagcaaaaagatggaattcttgccagccagacattcagctcattgacctgcctttttcttttttcttttccactgacaaattcattgttaaaaaaatataaggcatttgctcatcaaaaactagaattctgctttaaaaccacaggctgtatcttctaaggactttgagaggcctacgcccgagccctcccctcacagagtccccgccttctctctctgctccctctcgaagaacccaggctggagggagccggagggtaatcgtgctgctccgctatggacggtggtggcccaggagagtgcctcggggacccaggtgcttcctgtatggacgctgcccccacctgctgtgtgatggaagcccagcccctaaactgctcctaaccccacccaggtctcagttcctcatctgtaaatggcacctgcaccccagggccagcagcccctttgtcagcactctgatgtcaatgcacgcacttcacaacgctctgctccttctgtccgtcaccaaaaaacgaacgtttgttccttggaaaagactacagttgacccttgaacaacacaggtttgaactatgaggatccacttatacgtgcattttttttttcagtaaaaattatactgagtgtgcctgcctcctcttccacctcctctgtctcttctgcctctgctgccctgagacagcaaggccagcctctcctgttcctcctcttccccccagccccagtcagcatgcggacggtgaggacgaaggccaggatgacgatccacttccgcttaataaagatccacttccgcttcatgaatagcagccatatttcctctcgcctgtgcctttctgaataccacgttttccctcgcttactctattagaggaatacaggtgatggtacacacagcacacaaaatacctgctcattgaccactatcagtagggccattggtcaacaggctattagtaaagttttggggagtcagaggctgtacatgacttcagctgcacaagggttcagtgcctctaacccttgtggtgttcaagggccagctgcacaatgaattaatccctgggaccatgtcgggctggcatctgacacctggactcagagggcctctgcagtaggggccgtcgggtaaagaaaccccagagtccagcagaacatctgactctggccatattccttcttgtatagcatctgtttgagacaacaaaatcccgaggcagaaggtcgaccgctccttaggttcattctgatggctcagctattcgcccgaggctggtccccgaggctggtgtgctcgcaagtcgtggctggcagggttgccaggcttgtctgcaaaggaccaggggggatgggttttcagctttggggggcacacctggtctcatcacagctgctcaccacggcccttgggtcatgacaggccagcacgtggggggcctgcaggcctgtagatgctcactgaagatggaggttcctagatttgtcatgtggcacaaaatatttttttgcatttttttctgtcattaaaaatcatttaaaagccattctcagttcacagctgtacaaaagcagccagcaggtttgctctgggcgccgtactttgctaacctcaatgtagagtgaattatacttcgtatctttaaaaggcttgtcttctagcattgcaggtgaactttgcttagaaacataactatttttaaaagcacatgtaggtgaagtctagtctttaaaagcacttgcaggtgaaagccctggtccggcgctgtctctgcagtgtgtttgcgggggccaagtttgctctgtgcagtgctgctgttgtccagggcaggtcccacggaggggatgctgcggccaggctccgtggggtggggcaccctgcgacgggctgctcctcttcccagggccaccggtgagactctcagtgcacagagtgcggttctgtgtggaggtgtgggatgcatctcctggccctcccgtagtggggtgcaaccccaagtgaagaccccgtggctcatgtcaagt

SEQ ID NO: 16726 - DNA, 2300 bp, Homo sapien
ttggtgttaaagaatcgcattaccatcaggcaccacgtaaaacacgagaacaaaactatccacgtctaaagagttggaggagagcgattcctgtccttgaagagtctttgaacaccctcatcttgggacaccctttccagaggaaccaaagccatgagcacatgcattctgccacgtgtcaccacagaggctgcacagacacgaggccaaggggccaggtcccggcggatggaggcggggaggcggcgatcaggggccctgcggtggacgccttggtagcaagtgacccaccacccccacctaccccagggagggtttctcctctttcacagcccaatccaagtacggcgtctgcaaagaaacactccttgaagtctgggaggacgatgagggctgtcggtaccttgtgatttagcccctggaccgctgtgaggacggatgggaccagagccgaagggtggccaggaagctctgcatccctaagccatcacactgggcaagaagccctgcccatgttcttttgtttgtttgtttttgtttgttttgttttgttttttgagacgaagtctcactcttgtcccccaggctggagtgcaatggtgcaatctcggctcactgcaacctccacctcccaggttcagcctcctgagtagctgggattacaggtgcctgccaccacacccagctaaattttgtatttttttagtagagatggggtttcaccatgttggccaggctgctctacgaacttctgacctcaggtgatccacccgccttggcctcccaaagtgctgggattacaggcgtgagccaccaagcctggcctggcatggccctgcctgtttttatccaaaaagccaccgacgccctctgtcccgttcctgctcaggacactggaaggtgtgataaatcaccagcacatgggaattctgcaccaatatcttagatcacgccagatttctgcacaaagcgtaaggacactgggcggggggcgggggtgggggggtgaatgtcacttctgaggccggcctgtcgctaagctcagccacttttcttccctgttccgtcgcttaagtcccctcctggagtttacaatcctgacctgccaccctcaccaggatcctgacggagccaagacgcacccgcggccgacctcccagcgtgacggctttctggttatgtctacacgtcatggaggaaccttctaaaggagtttcaggaagtttatgtttggaagctgcgattgtcactttcattcatggcccagctttataatgggaaacagacacctcaccgaagtgccaggaaggggtctgctctgaaacgtgttcaaatgaaaggattgaggagagcctagttcttataaatatcgtaaaggcactttgttattgacggtgcctgcctcagattcgctgtggacttgcaagccccaaactcgtcctgcccctgggtggccggggcacccagcccttctgcctccacactttgtttttcttttctcaaaaaaaaaaaaaagcgtaatgagatgcacgtttaacaacatgtttagctaattgagtctgtccacagcatatcccaacccgggcgctgagagataagccggtcacctggagcgtgccacaaaaaggagagaagacaaagccagcagctaatagaaatcattaattggggaggacgcccctaaccacatcagatcaaagatgcaggcggactcttcccaccaaacgaattcgcctttgagctcttggcattgggttcagcactccctatcatcaactggaaagcaaaatgctttgttttgcctgaaagatgttcccggatggcacgttcccctgcgtgcaccccctcggttgcgagcctgaaggcatcgcgatcgtcaccatcgtcaatccggatggcccaatcgcatcgaatccagcctgcgtgaaaacacttcacttctgacctccttaacaccagagccaccccagacgccacacactgcacttaccctggagcgagcaggcgtgtctgccggcgcccatcccctgtggtgtgtggctgcagagggacagctgccccgtgccccggctccacgccccaggtgtccgcagcagcagcagcgcgttggggctgcgtctctgcgcactggctggctctgggctgggaagtttcaagttccaggcggtctgcattcccttctcccccttcacacacttaaccctaccttgtctggtcaagagagatccagacaaaatcaaccttctgcgtcaacagccgcgtccggctgcctcagaggcacagagtctgttcctggcttc

SEQ ID NO: 16727 - DNA, 2300 bp, Homo sapien
tggaggcagggcagcaggctgtggtctggacctgccgcctgcccccttcgctggcttccctgggcatgtccctccatgttttcatctatatatgggctcatagaaataaatcagatcaggcaaagcagcagccaaaatgatccccatcgtctcctcctgcagcctagacagacatcaatcatggatgatcatggctgtctcctgttgaccctcggaatccacctcaacacagatctccgcccgttccagcagcgccagcctgggtgccacttgctgtgcgtggagcttcagacccagcccaggtgccagcccatggccacctcctccaggaactcccctaactcacaggtccacatactctaaagtggacttctttggggaaggaggcgaggcctggtgggaaacccagacaggtaggtgctccatccagttgacaagcactgggtgggggcgggagggtgggggggaggtcctaggttgagtgaaccaatcagacatgggccccaccccctccagagagcagctgtgggaaggctgtgcccactggaccctggcagagagcaggaagggctggaggacccgtatgcccctgggcagctctcttggcctcctggtctcagtgttcctgtctgtccatggcagtggggagggacggcgcatatccagtgttgtacccctgcctctcctacccacccgccactctcctgtaccaggctctgagggtaagcccccacttctccccttccttggagccagggaataggtcacagaagttggcacgagatggggtcttaggagctcccagcaggctggcgggtggtgtgacagtcctgctgtgcgatgatctcatcatcaggtgggaggggtccttcctgtctgcccctgggcccactgacgcccgtttcttatgagtacgggggatgggggagcaggtagcaagtgtagaccgagaacattaaaaggagatgatacaactcagctgggagtgggggacagccccccaatgcgtgaccttgagcaagtccccgagcctccgtgaagtggggctcttgaacacaccccagagggcaacagttctccatttccaggcctgagctgacagcaccgcgcccacaaacctcgctgacctctgactgctccgagagggggctgtggcccgggcgctgtgggcaactccttcgtgggtctcctgcggggcgccctggagaggctcggtgaggaaagaggccccaagtggcaacgcccagggctgccggctcccgcgccccctcctcgatttccagcctggtctgagctcacaggggaagacccgagatcctgctctcagttggcggaccccaccgcagtctgggacggaagccccctccctggcccgaatccgctccacaccccaagtctggcccaagagaaacgtgggcgtcaaggcctcgggcttcctgagccggttgtcactgcccccaccgcgcacgtggagcgtgcggcagagcccaggggtctagggagggaccaagggctgggggcggagttacagtgcgggggcggagcctcggcgtctcaggacccaaccaggtcgggtcaggtttggaggcggagctggcgccgagaggcggggcgcaggatgcggtgccgcggggcagcagaacagaaccgaataggtctcagactcccagcgcggcctggggacatgacctccgggccaaagaggagtgggggaggctagaggtctccccggggcgcgggcggggccgaaccaggaaggggcggggcatcgagcggggcggggacagtgccttgaaggcccagacggacaggggcggggccgcagcgctggggtcggagccagcgccgtaaagagcgaggcgggcgggggcgcggtcgcggctctgggggcggagccagagcaacgaagagccgggctggcgggggcgtggccgcggcgctgggggcggagccggagaggtgcagggcccggcaggaggcacggggcggggccggagcgccgggggcggggcgggaggtgcggcggccgacgacgctcaggcccggccccgccccgtgcctccagcccgccaggagcgccctcgcagtggccgcctgctccgccgctcgccgcccgcgggttccattgagaaaagccgagcggccgcggcggcggcggcgagtgcgcgggagcggaggagccggcacccgcccgtcgggcagtccgcgcgcccgcaacgcaggaccgtggcctctcgggcctccgcggcagctccagcggctccggggctgggcgcgcgggctgggggcgcgggccgggg

SEQ ID NO: 16728 - DNA, 2300 bp, Homo sapien
gagacggagtctcgctctgttgcccaggctggagtgcagtggcatgatctgggctcactgcaaactccgcctcccgggttcatgccattctcctgcctcagcctcccgagtagctgggactacaggcgcccgccaccacgcccggctaattttttgtatttttagtagagacggggtttcactgtgttagccagcatggtctcgatctcctgacctcgcgatctgcccgcctcgacctcccaaagtgctgggattacaggcatgagccaccgtgcccggctcctttgttcttttagttatgactactaacagacctgctatgtccttgttcatgtctcatgcccacgggcagatgacaccccagtccggtggcccacctgtaccactgggcatcagaatcccctgagagctcttcatggaccacagggccctgggacctcactcccagtcactggtgcggccactctggggcagagcccaggaaggcacattgctaacaacccctagtgatactgaggctgcttgcccgggtcccacttggagaaccctgtcgagggtggcactgctggtcacagggcacttcttttaactaacattgttttccaaagaggctgtgaccaacagagtttactgttcatgaaactcagatcgcagacaggcacgtgtctgtcacagccggtgccggccgctcctttccatggacagtaacgtccatgcaggcttatgttcatcagctgagaaaagggcacttgctgggtgggaccttgtcttatcgacacatagagtctgcagaaggtgccaactggtgtcgcagggctgctcctgacacgacccaaaatcaccagggttgaattcacattcctcttacgtaaccataacaagttgctgggactacaggcacgcaccacggtgccctgttaatttttttgtagagacaggggtcttgctttgttgcccaggctggtctcaaactcctggaggaggtggtcctcccaccttggactcccaaagtgctaggattacaggtgtgagccacagtgccaggcctgtggtacctcttccaaggacactaatcctatcagatcaggaccccacccttataatctcatttaaccttaattacttctctaaaggccctttctgcaaacacagtcacattggggattaaggcttcacatacaaatgttagggggacagaactcggtccatagcatggagtcgcacaggttttgtccttttgcgattggcttgctttacttagtatgtttccaaggttcacccatgttgtggcatgggtctgaacttcactcttcttgatgactgactcacactccactgcatggacagccagcattttgtctgttcctcagtttgtggacatctcgcccccttgtttccaccttggggatatggaggaagatgggatgagcgaagccctgtgatccccaggaccagccacgtcgttggcaagggtcagcgcaggatgaaaccgccggcccctggtctccggccgggccctccgtctctagagcagctcgcaccgctgcagcccctggacgccccgggctgtggacgcgcccgtgggacaccgcgctgagcaggacacgcgacaggtcccctcactggcgctgctcgcgttgaaccgcgcggggagccaggcagcccacgggaaaggtaagaattgttaggcttttaatctaaagtcgatacctcaaaaaataattccggaggtaagcatttaatatcaacattcaataaagcaggaagtatcagcccgacgaagaccgccttaagttttccactttgatgaactcgatcatccccggggatgaagaacccgccggcccagccggagccccgtcacgtgacccggcggccgcggggagctctgtgcgcaggcgcggatccgcacgcccgccgcctgagaagcgaactccccgtggcgcctgcgctgtagcgggggttcggctggctcgcgcgggtccgggcgcgcgctgcgggggcggaaccgcgcggaggccggaaggaagctggagggggcggggcgagggagggaagcccgccggccgtaggactaccgtcgcggcctgatgacgtcgcacaatggccggcccccgcgggtagtggagcccgtttgttccgcccgtgtcgagcctggagccagaacctgtgaagagcggaagggccaagggacgtcttctccacgccgctccgactccaggggagccgtggcctcctctccgccctagcgctgaggttagctggggccgggagggcggcgggaggccgggccggcggcg

SEQ ID NO: 16729 - DNA, 2300 bp, Homo sapien
cactgctgaaatgcagagcgtttggggaccttctcattgcgaatgaccttccaagcctaaagaagtcttctggtattcttagtggtggcaaatcttcctcctctcaagctagtcactttgataaagtgctgcaagtcagagtctcacctgataaggtgagctaccaaccacgtaagtaaacttttggtcaaacctggagggtgactattgaataagactgattttcccatatgactacatttttactaccacaacaggagttctaaagagattctggcaaagaagcaccgatgaaatacaagcacattttgggacaattactttcaacagagcagtacctatttgaatgcctaagttctggtacatctggttaaaattctgactcataacctcatggacttaaaatatctaaatgaacgttatcaaggttggtgacagaccccacgtgcaaagtgaccaagcgtgaccactaaactccttgataaagaggtactcaccttgagatgctctgtagctgtgacaaaatacaaatctctgtaaacacgatgtaggccataggttaacttacctgtttgctttctggagtgactccacaaagctttcttacaatatttcagcatgtcccacctacaacgggagaggagtttccggctttgggacacatttgactggttccagggctggctgggctccatactgcccttagatagtaaaattatcaggaaaagactctcctcccaaagctgggaagcgggattcagccgaggtcaaacctcacccggataatcccaactactgaacgggaaaggactactctacagacaacaggctggaggtgagtctaacaggagacatgatgagcaccttgctacaccccaaacggtacttcagatgccaaacactctcttcttccattttcccaaatgggtctgaagaatgacctactcttgcaaatgagttagcgttgttcgaacaaagctcatttaaaacggccactctacccggcaaactcagttgtcataaagtattcaggaaaaatgtttggcaggagtaaggctgttaagtttcagttcttccagcattatagctgcagttggtctatataaaggacccagcacctctgatctcctaatccaaggggcaaggaagttacatactcctaagagaccggcgcgcgtcttggggcaatcactgcgcccaacctgtgcacactttgaagctgcggagcaagttccaggaggttcataaagagctcaaagttctccgaagagcccagcagcagcccgggatgacctactctggaggtgaatctgggcgcctctcaccgccccttagccggcggcacacatgtgccacgcgagtggcccggaagagaaatgacagcttcaggaaaataaactctgccgcggggcgcggaggcagcgcgcgaggagctcgggcgcccagggcgccccaggaccgcggggccggcttacggacggaactcggggtggtgcctgtctcaaggtccccttccctgggcccgagggccacgcttcggccggtgggtccgcacggccggaggcgcgccgggctcccgggcctccctcccgcggccgccgccgccgcctcggcggcctcctcctcccgccgccgccggcccggcctcccgccgccctcccggccccagctaacctcagcgctagggcggagaggaggccacggctcccctggagtcggagcggcgtggagaagacgtcccttggcccttccgctcttcacaggttctggctccaggctcgacacgggcggaacaaacgggctccactacccgcgggggccggccattgtgcgacgtcatcaggccgcgacggtagtcctacggccggcgggcttccctccctcgccccgccccctccagcttccttccggcctccgcgcggttccgcccccgcagcgcgcgcccggacccgcgcgagccagccgaacccccgctacagcgcaggcgccacggggagttcgcttctcaggcggcgggcgtgcggatccgcgcctgcgcacagagctccccgcggccgccgggtcacgtgacggggctccggctgggccggcgggttcttcatccccggggatgatcgagttcatcaaagtggaaaacttaaggcggtcttcgtcgggctgatacttcctgctttattgaatgttgatattaaatgcttacctccggaattattttttgaggtatcgactttagattaaaagcctaacaattcttacctttcccgtgggctgcctggctccccgcgcggttcaacgcgagc

SEQ ID NO: 16730 - DNA, 2300 bp, Homo sapien
tcccgagagctgaacactgtcacccactagtgtctggtctctagtggcagccccacgctcgccttctcagcttgctctttggcgctcactggtttgttctcttctgccttgttcctcttttctccccatgccaatatcagtgagaaaggatcttttttgatagtaggttcgtaggtgatgtcctaaaaattttcataaatacagaaaagaacgataacatttagccaccacccagatacatattttagatgaaaaagaagtacagaggccgagtgtggtggttcacgcctgtaatcccagcactttgggaggccgaggctggcagatcacaaggtcaggagttcgagaccagcctgaccaagttggtgaagtcccgtctctactaaaaatacaaaaattagcctggcatggtggtacccgcctgtaatcccagctactcaggaggctgaggcaggagaatcactgacacccaggaggtggaggttgcagtgagccgagattgcatcattgcactccagcctgggactgtctcactcagtcagagtgagactccatctgaaaaaaaaaggaaaaggagtacagaaaagctgtggtttctattgtcagcacttttctgtacttggacattttttacaatgagcttttgttacttgtttagttacacacgtgattttgaatactgcatgagtattttcagaggcaaaccatgaagagctctgtagtgtgttgagtctcagatggatgactgcatagtcagtttttctttaaatctctctgaggctctggatttttgaaccccctatagaataacatttcccaacctcttttgttttttgttgttgtttttgagagagactcgctctgttgcccaggctggagtgcagtggcacgatctcggctcactgcaagctccacctcctgggttcacgccattctcctgcttcagcctcccaagtagctgggactacaggcacctgccaccacgtccggctaattttttgtattttttagtagagacggggtttcaccatgttagccaggatggtcttgatctcttgacgtcgtgagccaccacgcctggcctcccaacttcgtttgacttatgtgtgatctctgaaatgcttttagaaattttaaaaattacttgtcatttttgcatttccagagaagcagttttaagttttctttcgtgtttaatttggatcgatattgttattatgttgtattgagttggttttaatgcaggcttaagtgttcctgatgtttaaggttaaaattttaaatgatttaaaatctaactgcatgttaacccattgaaaaaaatttttaaaccgcttagatactatatgccatatttggttttaaacaatgtgtacacattatctattcccaaaaaagtacattttaaaaaagtgattcactcagtaattgagttagacacttagatgtcttatattctacacttgaaagtcgaggtctcctttactaacccggatattctgttgaagatgaaggtttgtgattgttatttatgagcaaagtgtaaaagcccgtttcagttccagaaatatcttgaaatgccctgtgagagttttctctgtgagagaaatgcagacgtacagaggtggccaaggggaccctgagcacacctgcaggcttctgatcattgttaatgcttctcattgatgtctgtttcggcacaaatacaattaacatccagttgtacctagatgagcctgggccagggctggaagcaaagctctggggcttttctggtttaaggggaaaattaatactcagacagttgatacgcgtgaactctccacaaagtgactttgtggtcactctgaccgaggtgcctggcagcctctggggaactgccgtgcctgggcaggtgcagctgtctggctcagcctctccaggctcatcccgcccacctccccgttcagttcccactactgtgtggctcgccatcaggcctgggtaaacatggcctctgccccctcccaccccccaccccagcagctgcccttgtgcaattaggctcttgtggaccctttctgatctcacttttgtttccatagggaactgtacctggggaatgaattgtaggtttatacaccctggagtgaacgacaaggggaactactccctaatcaccaaagccgaccccttcccgcctaatggtgccccgcctctcggacctcacccgctgatgcccgccaacccttgggtgcgtgatgcctcttctttcattgttagcacatcagccaactgagctgtgtctgaatctcaagctt

SEQ ID NO: 16731 - DNA, 2300 bp, Homo sapien
tgagcacacctgcaggcttctgatcattgttaatgcttctcattgatgtctgtttcggcacaaatacaattaacatccagttgtacctagatgagcctgggccagggctggaagcaaagctctggggcttttctggtttaaggggaaaattaatactcagacagttgatacgcgtgaactctccacaaagtgactttgtggtcactctgaccgaggtgcctggcagcctctggggaactgccgtgcctgggcaggtgcagctgtctggctcagcctctccaggctcatcccgcccacctccccgttcagttcccactactgtgtggctcgccatcaggcctgggtaaacatggcctctgccccctcccaccccccaccccagcagctgcccttgtgcaattaggctcttgtggaccctttctgatctcacttttgtttccatagggaactgtacctggggaatgaattgtaggtttatacaccctggagtgaacgacaaggggaactactccctaatcaccaaagccgaccccttcccgcctaatggtgccccgcctctcggacctcacccgctgatgcccgccaacccttgggtgcgtgatgcctcttctttcattgttagcacatcagccaactgagctgtgtctgaatctcaagcttaagacaagtcactgtgccttagcacaggctcagtgccccctttcggctgcttctgtcgtcccgagtggaagcaggcctcggctttccgaggacggagtgaggcttggtggaaggagagcggccacacacggccggcttgtgttgtagttgatgtttttactgtctggtttctctgtacacttgaaagttttactttctcaccttctcccttctcgtttttcaatagggtgggccggtagttgatgaaattttgcctccaccccctccagagcccccaacagagagtgcctgggaacgaggactccggcatgcaaaggaggtaaacacaattcagcagaaatcccgacaagaaagatgctattacaggagtggttcttgacaaaactgggatttcctcggtccagagagagccccagaaatctctgaagttaggcgtctgtttctgtggtgtctttctttattttttatttatttatttttttggagacagagtttcactcttgttgcccaggctggagtgcaatggcccaaactcgactcactgcagcctccgcctcccaggttcatgtgattctcctgctcggcctcccaagtagctgggattacaggcatgcgccaccaggcccggaaggatggagagttatatctaactgtctcaggcagcagcccagtaggccagggagttcagtccagggcatacccactgtcttcatggggctggatcagcactgggccacaccccagctggcactgcccaggagcacagggtgcagtctccagccactcacagaaagcctggcgaggctgcccgagccgcacccccaggatctgcaccccacactcctgagactcagtgtctgctcttcctggagaaaacttggagctttctggtcctatcactgcacacttcctccctctaggcccacgttggccccagtgtgtgagcttcagctctggggaccactctgctggcacccagccccacttcctcattttcctggtcagcctccctgctgggaaatgacggacaagatgttccttctcactccctcggcatgtcacttccttccctctgagactccagccactccacctgctgcttgtcactgagtgactgaaccctggatctagttccaagggtagttgaaggaagtgatgaacacctcatgtgggcacacggaggccgggggcagctgtttgtgcagagacgggcacagactgccctccccagaaggacaactgtgctgtgtccgcccctcaccccttgagcacttgcagcgtgcagctcctgctcctgcagggctgctgcggtcgggtgggacggctccctttgtgtttcctaacagcgacgcccggtattctgttccatgttgacttctttcttcttacaatggtaggttttaaaaaaagcaactattcgaaaagaacaggagcctgattttgaagagaaaaggtttacggtgaccattggcgaagacgaacgggaatttgacaaagaaaatgaagtttttcgagattggaattctcggatcccgagagatgtcagagacacagtgtaaggaatggccctgcctgcccctccgtttccttcctgcatgcggccacgctccggagagagcagccatgtgcagggccccagg

SEQ ID NO: 16732 - DNA, 2300 bp, Homo sapien
cttccagaaagcctgcaggaaagaggccttttcattttgcttaagtacagtttcccaaaaacaaatttgccggcacagtcctcttgtcagagaacacacgcctcacacattttgggaaaggcttttctaccctattgggcttacgcaatcagcctcagcccaccgagtagttgggggccacagccatgcaccaccagacctggctgctgatgtgttttttgtagagacggtgtctcgcgtgctgtccaggcttcctcttcgtttttatgtagcctgatgtcatattgccacaggtctctacaaatgtttcctgagtgttataattcagtgtgatttgagtagtgtgcacattagattgaacggtgtccgactgatgggaacggactgaagctgtgtcctttgggagagccagttctaggccatgtggagagttgaggaggcctcgagggtgttcgtagccacccatcgctggagccacctcaagccatgatgcctcaggttcccacccagtctacccgaagcagagggttggcttgtggctgagacataccctggaggggcgtccagggacctcctattgctagtgtacactttgtttcctctgctccacaggaaaggagatgcagagttgtgggccccgccaggagtttagagcaggccccccccaaccctgtgcgcagtggggaagagagcctgaccttcccagcagctggacagtcgtcccctccctgttcaatgaagaatcccctctgtccctgagatgccacctctctgggcgtgcctgggtctgcctctggacctcctgcctcctccttctggccgccggttttcatgtgctgcgatggcactggcttaattatacaggctttttaggatgtttaatgtctcagagggcgtgtctggcgtgtcttttcatttccagggttttcttggctgttcttggggtgcgatttttcatgtgaacttgggtgtcagcttgtctggctccttaaagaagctcattggtgtttttgctgggattgtgttaaatttatcagtcagtgtaggaaggactgacttgtgggcgattccgagctgcgctctcccagtgcaagaggcgtctccccattattcatgcacgctttgtgtcaggtttcaaaacccccatttattcatgcacactttgtatcaggcgtctccccatttattcacacgcttcatgtctctcaggcgtctccccatttattcacaggcttcatgtcacgtgtctccccatttattcacacacgcttcatgtctctcaggcgtctccccatttattcacacacacttcatgtctctcaggcatctccccatttattcacacacacttcatgtctctcaggcatctccccattcacatgcttcatgtcaggcgtctccccatttattcacgcacgcttcatgtctctcaggcgtctccccacttattcacacacactttgtgtctctcaggaatcagctctgcacatttctggtgaaatgtgttgatattttattcctaagtacttttttcttctttcttgctattgtaaatgcggttttctccactctgcctcctaactggttataatctgtgtctgtgaagacactgatttctatgttaatttttttatcctctgcctttccaagtttcttcattgtttgtttgaattggctttatcaagtctctgggtttttcatgtatagtatcatatcattttgcaaatctgagctcgttttgctccttgttttcgtgttcttgtgcctctagtgggctccccttgtccagtcagggggtgcctccacacagggacaggtggttgcggagactcctgggggagctcctcctattccccagtgagtaaggtgctgacttttgttccaaagtgtgtcagtatatttttatcatgctaaagtatcacttcctattttctttccttttttttttttcttatttaattttcaagacggagtttcactcttgttgcccaggccggagtgcaatggcacagtctcggctcatggcaacctccacctcctgggttcaagtgattctcctgcctcagcctcctgagtagctgggattacaggcatgtgccaccacgcccaactaattttgtatttttagtagagaaggggtttctccatgttggtcaggctgctctcaaactcctgacctcaggtgatccacctgcctcggcctcccacggtgctgggattacaggcatgagccaccacacctggccctcacttcctattttcttgagtattttttatcaaaaaggctattgaatttttgt

SEQ ID NO: 16733 - DNA, 2300 bp, Homo sapien
cacggagcacaggccttcccgccatggccccgtctgcactggaaggtgctgcccccgagagactgtactttttatcttgacaaaacactgagcctaaaggaagacaggcccaggccctgttccaaggtggtagcaaggccagtctggaggctcacctcacagggctgctggtggggaggggaggccgcgaggggctgtggaggccacgccccctgagccccgctgttgcttgtattacaggcggacgctaagcggcagcggcagtggcagtggtagcagctatagtggttccagctcccgatccaggtcatccccatcaccctgtgcctctgtttctccctccccgtcggggccaggaagtcccagaagcagccagtgtgggttgggctgtctcccacaggtgggctggggcccttctggatctgagtcaccctggggctgtggaaggctgcggttgaagctttgacacaggagaaaatgggccaggactcgtgataggaagaccccctccccccaccaaaaaaagattcacaaactcgggggcactcaggtcaggaggaggtgcctctgccctgctgacttgatgcccagcaccctgagagagcacctgcacctggggaggagccggcagcttccagcccagcagggcagaggctgggcctgcgtgacctatcacacctgtcgagggaaccggcctgagggggtggggaagccgataaaaacatctgagaagagaatacatggaaaagctttgtgggccaggtgcggcggctcacacctgtgatcccagcaccgtgggaggccaaggcaggaggattgcttgagcccaggacttgaccagcctgagcaacatagaccccatctccacagaaaaagatttttttttttttttttttttttgagacagtttcattcttgttgcccaggctggagtgcaatggcgcgatctcgctacctccgcctcccggattcaacctcagccccctgagtagctgagactacaggcgcacactgccacgcccagctaattttctgtattttagtagagatggggtttcaccatgttgcccaggttggtctcaaactcctgagctcaggcattccacccaccttggcctcccaaagtgctgggattacatgcgtgagccgccgcacgcagcctaattttgtatttttagtagagactgggttttaccacgtttctgatcttgaactcctgacctcaggtgatccatccgcctcggcttcccaaagtgctgggattacaggtgtgagccactgcacccagcccagaaattttttttaattagctgggtatagtggtgtgtgcctatgatcccagctacttgggaggtcaaggttgaatgagctgtgatcacgacattgcattccagcctggacaacagagatcctgtctcaaaacaaaaaaaaaggatttttgctatttagttgttttaaaagaaagtattaaatcagtccttagattccttgcatagaactctttcatttccaggcagcaggtcgtttatatatttgtcacagttctttgtttcttttgtttgttttgtttctggagagacatggtcttgctgtgttgcccaggctggtctcaaactcctgggctcaagtgatcctcccaccgtggtctcccaaactcgtgggattataggcatgagccaccgcgcctggcctaaatgtttcttaataagtctgaaatgttttaaagacctgacttttgaaaaaaaaaaatggttctcttacattcccccgttccttgctccggtacccaatgtacctggaagacgtggttggtgttttctcgagcagcatatgggcagggcagactcaggtgccagtcctgtgtgctttgtgtccgtgttgagtgcacgccagtgaagctacagacctgctgtttccagtctgtctgccgtgtgttcctcaggcattccctgagactgcggaattgctccttgtgtttttaatttccctgtgggctgaggctatctcccttttgtctaagccagggactctgcttaaattccatccttgccgctgttgagtcagctcagtcctgtttcccttcccaaaaagcaacctgacattcgttttgttttttgtttgttttgagacggagtttcactcttgtcgcccaggctggagtgcgatggcatggtctcggctcactgcaacctccacctcccgggttcaagcgatttttttgcctcagcctccccagtagctgggattacaggcgcctgcgaccacgcccggctaatttttgtatttttagtagagatggg

SEQ ID NO: 16734 - DNA, 2300 bp, Homo sapien
ccacagaaaaagatttttttttttttttttttttttgagacagtttcattcttgttgcccaggctggagtgcaatggcgcgatctcgctacctccgcctcccggattcaacctcagccccctgagtagctgagactacaggcgcacactgccacgcccagctaattttctgtattttagtagagatggggtttcaccatgttgcccaggttggtctcaaactcctgagctcaggcattccacccaccttggcctcccaaagtgctgggattacatgcgtgagccgccgcacgcagcctaattttgtatttttagtagagactgggttttaccacgtttctgatcttgaactcctgacctcaggtgatccatccgcctcggcttcccaaagtgctgggattacaggtgtgagccactgcacccagcccagaaattttttttaattagctgggtatagtggtgtgtgcctatgatcccagctacttgggaggtcaaggttgaatgagctgtgatcacgacattgcattccagcctggacaacagagatcctgtctcaaaacaaaaaaaaaggatttttgctatttagttgttttaaaagaaagtattaaatcagtccttagattccttgcatagaactctttcatttccaggcagcaggtcgtttatatatttgtcacagttctttgtttcttttgtttgttttgtttctggagagacatggtcttgctgtgttgcccaggctggtctcaaactcctgggctcaagtgatcctcccaccgtggtctcccaaactcgtgggattataggcatgagccaccgcgcctggcctaaatgtttcttaataagtctgaaatgttttaaagacctgacttttgaaaaaaaaaaatggttctcttacattcccccgttccttgctccggtacccaatgtacctggaagacgtggttggtgttttctcgagcagcatatgggcagggcagactcaggtgccagtcctgtgtgctttgtgtccgtgttgagtgcacgccagtgaagctacagacctgctgtttccagtctgtctgccgtgtgttcctcaggcattccctgagactgcggaattgctccttgtgtttttaatttccctgtgggctgaggctatctcccttttgtctaagccagggactctgcttaaattccatccttgccgctgttgagtcagctcagtcctgtttcccttcccaaaaagcaacctgacattcgttttgttttttgtttgttttgagacggagtttcactcttgtcgcccaggctggagtgcgatggcatggtctcggctcactgcaacctccacctcccgggttcaagcgatttttttgcctcagcctccccagtagctgggattacaggcgcctgcgaccacgcccggctaatttttgtatttttagtagagatggggttttaccatgttggccaagctggtcccgaactcctgacatcagttcagctgggtctcagaccccattgctcgtgacgagatctgcccatctcagtctcccagagtgctgggattacaggcgtgagcagccgtgcctggctgcaacctgacattgattagtgaaatggggccctggcctagccatggggacgtcccttactttgtaaccctgaaactgcccagtgtccccccaaaatcacacattccgtgggtacatgatccataaatggacactgcgtaaaagtggaccatggagcaccccctgctggcccctccctccagtctggctggggtgtggtgagatgtgcttgtgtgtccaggtccctgagcgtgagcagcgtctcctcagtgtccagtgctacgtcgagcagcagctctgcacacagcgtggactcggaggacatgtacgcagacctggctagccccgtgtcctcagccagctctcggtccccggccccagcccagaccaggaaggagaaaggtactcaggagccctggtacctttggggagcagctcccgggggaggagggcggcatcagcacagactttgcctggctgttggtgtggccatgggaaaatcaccagtacccccatgactgcggatttatcattggtaggaaaatctaagaaagaagacggtgttaaagaggaaaagcggaaaagggattcgtccacacaaccacccaaatctgcaaaacctccagcaggggggaagtcctcccagcagccctcgacaccccagcaggcaccccccgggcagccccagcagggcacatttgtggcccacaaggagatcaagttgacactgttgaataaggtgagg

SEQ ID NO: 16735 - DNA, 2300 bp, Homo sapien
agaagaggaaaaggcgggtgcagcagagaggccacgggaggagccgccagcccgggaaactgagggctggaagagcctccaggaggacccagccctgaacacgcccagctccacggcctcgtggaataaacttctcccatttcacaccccccagtttgtggtgcatggttagcacagccctaggaaaccagcacggatagtgagctccccgtcacaggaggtatgcaagcagagggtgggtgggcaggggcactgtcgggaggagcagccctggggactccagcaatctgtctttgattcctcccagactgttaaccctggggcacagcctccttcacccccagaggcccacagcagacaagctgagagccacacagcggccaagaggaggtgctggagggcccaggggtcccagtgctgcctcagccccacccgacttgggagcttttgtgttcagagagactgaggttttcagcttagaggacacctccgtggaacacatctgcaccgcggcaggggaggaaaggctgggggcacacaagcaccctccctcccgccctcaccccgaagctgaggggaccagggcggacagattcccccacctctgatgtggccaggggccctggggactccaggacaaccctcctcaggatgacgtcaaacccccggcattcaaaccttcccaagttctggctgcagctgtccctttccggggaaacaaaggcacctccagcgcccccacccccagccagcctcaccgatcaaggaggccaaaggcagctcccggccccgcttacataaagcttcctgtgtgtgctggtcacacctcacacctcacgcctcacgcctcatgcctcattcacacctcacacctcactcctcacacctccaactcagactttttagcttgaacttttttctcaataaaaccacagaagcccaggccgggtgcagtgactcatgcctgtgatcccagcactttgcgaggccgaggtgggcagatcacgaggtcaggagatcgagaccatcctggctaacatggtgaaaccccgtctctactaaaaatacaaaaaaattagccaggtgtggtggcgggcgcctgtagtcccagctacccggcaggctgaggcaggagaatggcgtgaacccaggaagctgagcttgtagtgagccgagatcgcaccactgtactccccgcctgggcgacagagtcagactccgcctcaaaaaaacaacaaaaaaaaaaacaacacagaaacccaacagagacctgaagacgtgcctgcctcccccatctccgggacctctcccacctgggtgaagggggcacgtgagcctcacctgatcttgaccatctcagctaaaacactgaaccacccttggcacccaccagcagcagacggagaagaactgtatagggtgcaaaagcgccccgccaccatcaggtccagatgaaaacctacaagttgaatcagcaaggtgctgacggatacgcaagcagaaaccctcttataggaggttcaaggctgggcgcagtggctcactcctgtaatcccagcactttgggaggccaaggcgagcagatcacttgaggtcaggagcctcagaccagcctggccgatatggcaaaaccctgtctgtactaaaaatacaaaaattagccaggcatggtggggggtgcctgtaatcccagctactcggaagcctgaggcaggagaatcgcttgaacctgggatgtggaggttgcagtgagctgggacagcaccatttccctccagctcgggtgacagcaagaccctgtctcaaaaaaaaaaaaaaagtttgagaatgtcagacaaggcagcaccctgtgtaggtgctcaggttgggcggagtctctctcgggggaggggggtaacaggacagcgcctcccggggcctccttgcatgtctgtgtcctgatgcacagcaggcgggggctgcggggaccagagaaggaagaagcgccccagctgggcacttcccgaggaggaagtggtgccggaatttcccccaggtgtggcctcaggtataagagcggctgctgccaggtgcatggccaggtgcacctgtgggattgccgccaggtgtgcaggccgctccaagcccagcctgccccgctgccgccaccatgacggtgagcctctccacatgccgctcggatggatgctgcttggatgtgcagcctggcatggaagggctggggttctctgagcctgggaggagggtgttgggatggggtctgggaaacccctcagtctgggggtaggggaggcagctgc

SEQ ID NO: 16736 - DNA, 2300 bp, Homo sapien
tggacattacaggccactggtgatgctcagagcagcagggctgcgctgagggtgggagggtgagtctgacacaggctcccagggagacaggtggggagtatcagacccttgaatagggagcgcctggggtgggggctgctggggtccctgggacccccccaccccaaccaccccagcagaccggagttcctgccctctgacctgctccgagggccaagcttgcatccagtgatcacggccgcccaagccattgccgccaccttcctctcaggggctgcctgttcccaggctctgtggttctctgtcccccctgtgacagaagcagtgcccagggcagggggctcgcagctggcaggggcggctgtgcctgcaggagctgcgtgtgggtgtcaccactcaggcgctttaccttctgaccaggacccacaggaagggcgggggcacaccgctaccctcctgtgtccggccctacagatgctgggcacaggatgaggcgctgccattcctggtgacctgacatggatttctatccccaggtggggccagggcctcaaatcctggatgacccctgcgcccacctcctgggtcctgacggcctgccgaagccagctgcctgactgcctcagcagggaccgcatgccgcttggagaaggggtggcctcgccggagctagggagcggatgtggtgggctggccggactcctgggacatgtgggtggtggcttgaccccgggcccatgggcagcttgctgtggggcagtgcagggagtcctgcggccgcccaggtgtcaggagaggtccccgccgagtgcttcagctgccctaagctgcaccagcgctttgccaagatgggatggggagggggtatgagaactggcagagcctcggtgcagcagggctgaagggctttctcaccccagctctggctatgcccagttctctgagaaaggagctcagtggggaggtggtccctccagcggaccagggaaggggtcaccgtgctgggagcagcctccttgggcctcaggaaaccaccaagtgcctcggatggtggctgcccacggcgcttctgctgagaccctgcccccggcccaggtgtctcggagggtggctgcccacggcctgggtgtggctggaatggtggcaggagtgggcaccagtgcggccccggtggccatggggaataaaccagcattgctgcctccggcctccgccgtttttctgtttcgtaaaccagcatcccggggttcctgctctgagtgaccctggcacctgtcagggagtccaggtgtgccccatgagggcctgggggaggggcaggctgggcagagccacagaggggctcccctcaaaccccacattggctcaggtgggaccctcaggagcaaccccaggtctaaagtcttcccatgggcgctgggctcaccacccccacgccagcccctgcctcccgtacccaggccggacgtgacggggccgtccctgcattctgtgctttcccagttgtacacatcctgtcccctccctcgagtctcagtcacagttcagtgacctggtgacgggaggccccctgcagtgtctgacccaggccacgcctgtgccagcccagagccagggggaggaaatgggggctgggcctctggtccccatggggaggccacccttgtccttggtagcatcagggtgcagaggtgttcccgggctgtaggggtgactcccccaccccccaaggctctggagaggccgatttgctcaggaagccgaccttcacaccttgtcctgctattaatagacgcctggttgacacgggaccctcggttgggtccggagcattgggcaggggcacttgtcagtgtttgagagctgaagtttgggaagccctggggaagcgcaggaactccccgcctgggctggggctgccgggcagggcccctcctatgcctcggcgtggctagagagggcgggggcagaaggctccgggacagccctgcaccctacagatgcgggtctccgcccagccgcggtcacctggggggctgggggcggggcctgggcggggcggggttcggccgggagcgcaggggcggcagtgcgcgcctagcagtgtcccagccgggttcgtgtcgccatggggcagatcgagtgggccatgtgggccaacgaacaggcgctggcgtccggcctgagtgagtgcacgtcagggacggtggaggctgcagcctggaggggtgtcccaagaccccagccgggacctcgggctacttacagggtggggaagtggggcgccaggcgggccaggc

SEQ ID NO: 16737 - DNA, 2300 bp, Homo sapien
catcaacattgatacactgaacttctttaaaatgaaaaactggctctttgttaagaggacaaaaagattagctagtttgggagacaatacctgcaaaccacatgtccaacaggagactaatatctagaatacatattttattttttttcagtagagacgggggtttcaccatgttggccaagctggtctcaaactcctgacctcaggtgatccgcccacctcagcctccccaagtgctgggattacaggcttgagccagcgtgcccagcctagaatgtgtaatgaactctccaaacttatagtaaaaaagcaaaccatccagttcgagcgtggacacagaatatgaagagagatttcaccaagaaaacccacagatggcaaataagcacaaagaaagatgctccacgtcactggccaacagggaaacgcgaatgaggaccacagcaccctgccagcacatccctaccaggacgcggctaaaatgaaaaacagcaactccaccaaatgctggtgaggatgcggaaaatctgcatcaccgtagggatgcaaaatggcccagccactctgaaaaacaattagacagtttctttaaaaaaaaaaagtatatatataatatatatatgtatatatacacacacatacatctatataggtgtatacatatacacacacatatatctatacaggtgtatatatatatacacacacacaaacatacatatatacatagaaagagagagagagacagagaggcatatatatatatctaccatctgacccagcaaccgcactcctgggcatttatcccagaagaatggaaatgtatgttcacacaaaaacctgtatacaacattttatggcagctttattggtaagggaaacacaaaaaaattagccagtcgtggtggcggcttctggaaagaaaagaaagaaagaaagaaaacgttagatgctctttgcggggtgaggccttggctagagagagggtggtccatggattccacggactggctcagcaacagaggggcaaagcactgatacaatcccggggcacgtccacattctatgctgaatgaaataagccaaactcaaaagatactgggtgggccacataactgcgattccagtttcagaacattttgaaatgacgttacagaaatgagtggtcagtggcggccaggtaaccccggcgcgaggggaggggcggggctgtgaacgcacaggtgcggaccggcctccccggcacggatgtgggcctgcgggccccccattaccgctccttggaggttaccgctgggagaaacggggcgagggagggacacagggtctcgggctgggggagcagtggcgcgatttccgctcactgcagcctcgacctcccgggctctggccatcctcccgcctcagcctcccgagtagctggagccacaaacgcgcaccaccacggcggattcttacgattcatgggaatcgatgattgatgatttcgatagttcggtaatcgctaatgggcaggcgccgggcgaccctgcaggggcggcagccgtcgcgggggaacgggtggcgccgagcttgtcacgcgaaggagcgcgcggccccgcccgaccaccgccgcgcccctccctgagcctcagtttccccgtctgtcgaggccctgggagggcaggacggagcgcgccgccgaatcagcgcgcgacccccgcgtacccggcctcgctcccggccatccccgtcccaggccggcccgcggcactcacagtacttgatgaccgcgatgttgaccggcgctgtacaagtgactgccgccagcggcttctccgaggccatggtcccaccgcgcagtgaccccagctccacagccacttacggcccgcgatcccaccccagaggcctctgcctcctcacgcgctaccacaggattggcccgtgcgagcccggctgctcgcgcgccgaccaatcagcggcgagtcgggcgcacgcattacctctcagccaatggacgggatcggacgatgggttgctgacgtaggtccgccccacccgcagggtgcgctcgccaggcctggggcgtggtgttgtctgcgcaggcgccgtgtgcccaggcgcctggcgtccgcgtcggcgatccggggtctgggcgcggcgaggtgggcgctgttgcctgtgggggctacctgtctgctggtgctgtgcgggcttgtgcggggctgtgcggcagctgtgtggggcccgtgaggagctgtgcggggggctgtgcgaagggctgtgtgaggcgctgtgctgggggctgtgcggagacc

SEQ ID NO: 16738 - DNA, 2300 bp, Homo sapien
caacgtaggaaagcactgtttatagtaacaacccaactaggacagaccaggtatatttagacaacaaacaaggaagctttttactaaattgggatgatctctaagaagaaggtacgtagaaaaagcaaggtgggagaacacgctatgtgcttgtactatgcacgtcaatgaaaaaatacacaaagaattgacaggccaggtggagtggctcacacctaatcccagtactttggaagactgagatgggagggttccctgaggccaggacttcaaatcagcctgggcaacatagcaagacccccccacatctctacaaaaaaattaagaaaaaaattagccgggcatggtggtgtgtacctgtagtcccaactactgaggaaactgaggtgggaagatcccttgagccaggaggtcgaggctgcatggagctttgatcgtaccactgccctccagcctgagcaacagagtgagaaaaaaaacagactttttttctatttctggaaaaaaataaagaatttataagtatgatggttctggtaatagaagtaggtggctaggcagagtggacacttcacactgcatactcccctattttccgaaatctgagttttttttttttttttttttttttttgagatggagtcttgctctgtcaccctggctggagtacagcagcaccatctcggctcactgcaacttccgcctcctgagttcaagcaattgtcctgcctcagcctccccagtagctgggattacaggcgtgcaccacacgcccacctaattattgtatttttagtagagacagggtttcaccatgttggccaggctggtctcaaactcctgacctcgtgatccgcccacctcggcctcccaaagtgctgggattacaggtgtgagccaccatgcccagccaatctgagctatttaaaaactaaaggtaaaattttaaaaggggaaggggaaaatgggaagtcattgttttaaggggacagagtttctgtttggggtgagaaaactctagaaatagtgggggcgtggcacatgattggaatgaatggcagggaacggcacgcttaaatgttcctgtacgtttcacaggagaagtcaatgcacacacaagcgccgcaacccagtccaaggctttgctcctacagggccttacagggggtatttgagacgcccaccttaatgcaggttggacccagctccgggctgcggggcttccccgccccggggtctttcgtgtgagccccgtggcgggggatcctggcccaggacatggcgcggagaaggctgtgggcggcgggacagggtgccttcggctgccgggttaagagtggatcccgggatacatcctccagcgcctgccctcgggcctgtgtgcacccccatacccagcggggccgtccaagagcttcaaggagggcacagcgcgacccgccctcccctcagccccgcacaccgtcccacggccccgcacagcctccctcccacacagcgccccacggcacccgcacagcgccccacggccccttcatggtccccgcacagcgcctcacaacccgcacacagcgcctcacggaccctttacggcccccgcagagtctcccacacggcgccccacacagagcctcacggaccccgcacagcgcctcaaggtctccgcacagcccccagcacagcgcctcacacagcccttcgcacagccccccgcacagctcctcacgggccccacacagctgccgcacagccccgcacaagcccgcacagcaccagcagacaggtagcccccacaggcaacagcgcccacctcgccgcgcccagaccccggatcgccgacgcggacgccaggcgcctgggcacacggcgcctgcgcagacaacaccacgccccaggcctggcgagcgcaccctgcgggtggggcggacctacgtcagcaacccatcgtccgatcccgtccattggctgagaggtaatgcgtgcgcccgactcgccgctgattggtcggcgcgcgagcagccgggctcgcacgggccaatcctgtggtagcgcgtgaggaggcagaggcctctggggtgggatcgcgggccgtaagtggctgtggagctggggtcactgcgcggtgggaccatggcctcggagaagccgctggcggcagtcacttgtacagcgccggtcaacatcgcggtcatcaagtactgtgagtgccgcgggccggcctgggacggggatggccgggagcgaggccgggtacgcgggggtcgcgcgctgattcggcggcgcgctccgtcctgccctcc

SEQ ID NO: 16739 - DNA, 2300 bp, Homo sapien
ccagcctggacaccgccctgtgcatcacagctgaagagtgagtctgcagccgacttgagtgtccctggggggcaagttgttgcggcagccctgggaccccaccccaaaggtgctcgcaggccctctagggcgttcccgggatgagatcagccattctcctcgggagggctacagcagccctgagtaacaccaggctctagctgggattaggagataagcttgctggggcttggcgggtggccacacaacgggtaggtgggcggggagggacggtgtgggtggaggcttggctcaggtatctgcaagcgttatctgtgtctgcgagggagagagagaaggaagggaggctataaatagaaacctttccaggcgaggaacaggtgaataagcagaaggcaggcatgtgtcctctgaaatctacactcccggcgtggtggtgccaggccatgcttgcaggagaggcgggcaccttcttccaggggcacctccacctgtccttccactccccctcaccaagtggcagacaagctggagtgtggctgggtcccaatcccactgtgtcctaacctctcacagccttggtcttcttttttgtttttttttaattttttgagacagggtcttgctctgttgtccagactggagtgcagtggggtcatcatagctcacagcagcctccacctcctggaggctactgcaacaagcaatcctccctcctcagcgtcctgagtagctgggactgaagatgggtgttgccacgcctggctaattaaaataatttttttttttttttttgtagagacggggtctcatgttgtttttcaggctggtctcaaactcctgggctcaagcagtcctcttgtctcagcctcccacagtgctgggattacaggcgtgagctgctgagcccagactcacagcctagttttttttcattggcaaagtggggctgatactagcccagcttttcacaccctggacgtgtgatgtgggacgtgggatgctggtgtggcacggccctcctccctgctgtctgtccctcagagcttccatggactcaccaccccccaccttctccacccccggcccacagggggcaaaggccacccagctctgaggtggaagccctgctggggaggcaggccggcggcacagccagggacaccctgtgtgcacgccagcccagagacggccccacctggcccccaacgttatgaaatgtccatgtcaaaagagacccagacactggacacagcggctcccagctttttatgaccctgagggctctacaggaccacaaaggagggaaacggattgcccaggtcacacgtgcagctgttgcagaattcacgtgattcaccggttttattaaacttcccataaccatgtctgaccccctgggaattccagaattccaggccaagtcctccgtcccccaaaaaacagctttctggaggcactggacaaactcctaaagggctgactccagtgggggaagccttcggagactgcagcccatccagaaaggaccactgtctccaggccaccggtcccgggcctgttccagagccgccagtagggctggtcactagggtcagcttcgtttcgcctgggctctccccatcaatcctgtcctgtgagtttgcagaagggatggggaggcgaggccaggccgcagagtgagcgtcattctccgcagcaagggttctccaaggaccgcgctcggccgacgcttccacattctgtggaagagattctcgctcggtttccacacagctttgaactctgcccttcactcacggcgagtgggtggccaggcccgacgggtcggtgtgtgactcggcggcgcgcacgccagagaattcccgtggggaggacaccggcggccacgcgctccccgccccgtcccgcccgcgcacctgtcctgggcgtgttgcccgagaccccgcctcgccctcagttccgcccccgtggccccgccccactcgcgccgggcgctggttggcggaggcggcgcgctatgctaatgagcctgaccccttcaagcgccggcggacgcagcagtccggacccaggcgcgcccctcccgccccagcccaccccggcctgccgcccgggaggggaacatgccgcgctccttcctggtgaaaacgcactccagccacagggtccccaactaccggcggctggagacgcagagaggtactgactacccgatccccgagcccctgccgggactcgaccctgaggggcgggagagagagagaggcccctgggagcgggggctggggagacacctg

SEQ ID NO: 16740 - DNA, 2300 bp, Homo sapien
tcccgctttctctcacacgaagtttcatgtgggagccaccagccaggtggtggctctgtgggaatccagtggtggcaaagagggcctgggggacagcaggagggacttaagatgcctgcttggccacctttgcctgaggccctcagacttcctccttgcagaaagggccttttcttgagggatgtggaaatctcttgacagcaaagaggactctggccctgaattcagctgagtcgtttgtgaacccagggcctgcccacagcccctctgtccagtggggctcctgtaccagccctgtggccttgccagggagaagggaagctacacccccgggtgctgtagccttcctgggactggggggctctgcctcagttccagctcctcgccgcagctcagctgtccccacagtgctcctcacaaggccagatgtggctgccccagtattaagctccttctctgtgtttgcactgggggctctcgcgcctggtgctcccactggctggtggtgcacccctccaagggctgtgtgcgtctgcagagcgggagggtgtgcgagcccaaggaagcccctgctgctggagcccggagtgcgcacggggctgtgggacgctcagtctgtcctcacgatgtggtgtccccaggggcagtgccaagagccagggcccatgggtgcccaggacccgagcctccgcccagatggagcaggaccccctcctgcctgcgaagctgtcccaagcctggtgactgccacccagcctcaggatgtgctgccacttggctagctttggcccttccctgtccagtgcatctggagcccctggggcctggccgtttcctttcccacgattgtttgaggttttatcccccagagtgtggagccgggagagtttccagagtccccgggctgtccctgcgccccacagcccacccaggtgttgtcgccacgtgaacgtgaacctggtagcccgagctggggcctcctgcctatgggagctcctctggcccactcgcggggacagccatagtgacggctctgccgctagccagaaaccacaggggcctactgtcaggagggaccggggccaccctttagccagatggggcccatccagctggtgggccccggacataggagtgaccatctccagagacggcgacagcggtagggggagctgcccctgtggaccccacaaatgctgggtcctaagaagggccccgagcaaggcctgcggttcgggagacccgaggggcgggctggcactcaggcccctgtgccctgcaggttctgcggggagtgtctccagccctgcctgcaggtgccatccccgctgtgcccactctgccgcctgcccttcgaccccaagaaggtggacaaggccacccacgtggagaagcagctctcatcctacaaagcgccctgtcgaggctgcaacaaaaaggtacccgcctgcttgggccgccctggagccggggtcacttgatgggcagcctcagcccacgggttctgcagagggtgggggccggggccctctctctttcctgttgagtaatcgcggtctctgctcctgcaccaggaagccagccccggcgcctccctcccctcccgtcttcatctctcacttcctgtggtgacggctgacgggggggccagcccggtgggggtagcactgtcagagccgcctagcccgggccaggggaacccacgtgggttgtggccagggtaaggaccagggggctgagctgaaaccttcccaatgcagccttcccctgccagccgataccggggacggcgctgggggctccaaggtcacaagggccgcgggcacagtcaaggacatctaagggccgagcaccctccagctgccaggagggccagagccgggctgatgggcactgccacacccacatcagagcagcgtaagggcctgcagcttgtcatgggcctcattggcccccatgtccatcctgtcctggtgcctggcccgtgccccgtggccctccctggcacatccgcttcagggtggagaggccccagccagcgccccgttctttcagtggcttccggaggactgagcagctagaggtgattttgcatttgcgtttcccgacgttgccacatctcaggtgaataagttctatgaagcgctcacactagtacgtggcccctcggtggtttgtcctcgaggtcgaaggtccagatgtccaggggctgccctggactccagagtggtgcggctgagcaggctgtggtcttgggtgcttgggcacctcccgtctctccctgctcagagttcttctct

SEQ ID NO: 16741 - DNA, 2300 bp, Homo sapien
cagaggaaaggagttccctaaagtttagaggggcttgtttggagtctgatgttcttagttttgtttgaaggagaacttgagtcacaccgatcactgagtagccaggcaggctggtccacagaggagcagacactgaccaccttgctggggtttccagctgcaccagggctcacagccggctcctccagggtgtttcaggaacagaaactggaggacgtggctctcctggcggggagctgtgctcaagtattctggagctgccagccccgttgggaggaagcctagatcagtgtctgctccctcctaagtgctgaataatacagctcttgagcaaaatcagcagtggcaggggagagagagagcaggagggcttccccgcagacatccaagctgctgaggtggtggagtggaggggggtgcacccagactggtaggaggctctagaacattttgcaagcaaagtcagctgacttcaggggctcctggtacagagggagctgggactgctaggtggatgtgtgctggtcacccacggaggtggcagggccagtgtcaggatgcagagctgccttcattacctgtgtcaggcagcacaggcgcctgcccacgctgggacagctctacctacttctcttgtgaggctgctacaggctctgcccctgctcctccatctcacttagccgtgacattttgggggggcagcctctgaacgggaatatttttttttgagacagagtcttgctcttgtcacccagcctggagtgcagtggcgccatctcggctcaccgcaacctccatctcctgggttcaagtgatcctcctgcctcagcctccagagtagctgggattacaggcacccgccaccacgcccggctaattgctgtatttttagtagacaaggggtttcaccatgttggccaggctggtctcgaactcctgacctccggtgacctgcccgtctcagcctcccaaagtgctgggatgacaggcgtgagccaccgcgcctggcaggacttccttcttgtgagcaggtagcgggtgtttgaaggtgtgttccgcaccttctcatctgttactgagcgctgtgaggcttgacttaggccttgttttagaaaagcctcccgtaggctttgggtgccaacaccttcaccgtgtggtcggccacagcatctccactttcctaacctgcacaaattggtctttgcccttctttttcaaatatgtcttttcctaaaatgtagtttccataacacagaatgcagaaccacatggaattgtggagcatctttcctataaaactcccctctgccatgcttttcttggtagaatgacgaccatcctagtctcaccgcgggtcctgcaagagcttttcacacagcctttgcctttcaaagatttttctccccgacttttcctgctggcttttgttttctggctgttctctctctgcttctaactttgtttcttgttggtgttgctaaggcatgcatgcaaatgaccacagaaagtttaaaggctcttcaggttcccttcggaagtttgttgctggtctggttctgtcccctccgcaagctccccaaccagagcaacttcctcctccagggtagatctctcatggcaagagtatcccagtgtgggggcatgcaccctgctctagccctcgcgcaggaggccccctgggggcccagcaggagctgttctcagccaggggacagtctgagcagtgagccacctctgtaaccagaagcctgtgggccaggacacgcgtgatcacgaacctgcctggaagggctgtgtgagcagcctccactcgtgcaggacagctgtggggcttgctgagggtgctggcctgccagccaggcagatccctgaggcacgggccgtcccagcttctcagcttgtgcagcggccagtgtgggagacacattggcagtcccgggtgcctgctgggagggccagtgcgcgatcgcccctccctttgtaaggctgtcgacgcccccacacccatcgccctcagccacttccttcagctgagaagctgctcagcaccagcccctgggtgggcgcagacaggaacttcctgtgggggaagcgggcactactcccggctgctggctctctgaacaccaggctggcagtcactggaaactaggccgatagagcacccaccctgtgggtgcctcgttctgcctcctgctcctcgggcccagccgccctgccagtcgggctgggttccctcttgtgtctttcctgagtccttccggggaggacgaggctgtcttcctcccagccaaccttct

SEQ ID NO: 16742 - DNA, 2300 bp, Homo sapien
gtcgtcattctaccaagaaaagcatggcagaggggagttttataggaaagatgctccacaattccatgtggttctgcattctgtgttatggaaactacattttaggaaaagacatatttgaaaaagaagggcaaagaccaatttgtgcaggttaggaaagtggagatgctgtggccgaccacacggtgaaggtgttggcacccaaagcctacgggaggcttttctaaaacaaggcctaagtcaagcctcacagcgctcagtaacagatgagaaggtgcggaacacaccttcaaacacccgctacctgctcacaagaaggaagtcctgccaggcgcggtggctcacgcctgtcatcccagcactttgggaggctgagacgggcaggtcaccggaggtcaggagttcgagaccagcctggccaacatggtgaaaccccttgtctactaaaaatacagcaattagccgggcgtggtggcgggtgcctgtaatcccagctactctggaggctgaggcaggaggatcacttgaacccaggagatggaggttgcggtgagccgagatggcgccactgcactccaggctgggtgacaagagcaagactctgtctcaaaaaaaaatattcccgttcagaggctgcccccccaaaatgtcacggctaagtgagatggaggagcaggggcagagcctgtagcagcctcacaagagaagtaggtagagctgtcccagcgtgggcaggcgcctgtgctgcctgacacaggtaatgaaggcagctctgcatcctgacactggccctgccacctccgtgggtgaccagcacacatccacctagcagtcccagctccctctgtaccaggagcccctgaagtcagctgactttgcttgcaaaatgttctagagcctcctaccagtctgggtgcacccccctccactccaccacctcagcagcttggatgtctgcggggaagccctcctgctctctctctcccctgccactgctgattttgctcaagagctgtattattcagcacttaggagggagcagacactgatctaggcttcctcccaacggggctggcagctccagaatacttgagcacagctccccgccaggagagccacgtcctccagtttctgttcctgaaacaccctggaggagccggctgtgagccctggtgcagctggaaaccccagcaaggtggtcagtgtctgctcctctgtggaccagcctgcctggctactcagtgatcggtgtgactcaagttctccttcaaacaaaactaagaacatcagactccaaacaagcccctctaaactttagggaactcctttcctctgtagtcaaaacaggcagacagcgggtccgaacaagagttgatagcaaaaactacaagttatttatttacaactgcccattccagccgcacaagcccaaatccaccaccactggcggagcggtggcacctgctgccctctgagtaccggagcgcccgccgcagccgccggggaccccgagcttgggcagggccgcaggtcgcccggtgaaccgaagcagcagtcggaccgggcgcctgcggctggcgcgaaggaggctgggcgggggatgaacgcgcccagagggcagaggcggcgcggcacagggaaacccggaccccacgcgccccgaggccccggcgccccgagtccccgcgcgcccagtccggagctgcaccggggcggccgccggcctcgcgacccctcccgcggcggggcacggccccctccccgcggcccctgggcgggcgcgctcacgtgtggccgcagctgccgatggccacgggccggtgatagacctccaggcagatggggcaggtgtactgcgcctccaggccgctgtcgccgcccgccggcccggccggcggctgccgctgctgagccgaggccaccaggctgcggaacatagccatcccggggccaggcccgcgccgcccgccgcccgctgtcctggcccgggccggcccgctagtcacagccgctactgcgccgcgctgacgtcatcgtagggcgccgcccccagccgggcttcgcggccgtcacggcgccactccgacgtcatcggggcgcgccctcgcgctgtcgccgccacagtctgcgacgggacccggcgtgcccatgtgtcaggtgggcgaggactacggggagccggcgcctgaggagccgcccccggcgccgcggcccaggtaagagctggcggccggacccgccaggccgcccctcgccttcccgccgcactcctgccccgaagggtcccggccgggcttgct

SEQ ID NO: 16743 - DNA, 2300 bp, Homo sapien
agtaggtagagctgtcccagcgtgggcaggcgcctgtgctgcctgacacaggtaatgaaggcagctctgcatcctgacactggccctgccacctccgtgggtgaccagcacacatccacctagcagtcccagctccctctgtaccaggagcccctgaagtcagctgactttgcttgcaaaatgttctagagcctcctaccagtctgggtgcacccccctccactccaccacctcagcagcttggatgtctgcggggaagccctcctgctctctctctcccctgccactgctgattttgctcaagagctgtattattcagcacttaggagggagcagacactgatctaggcttcctcccaacggggctggcagctccagaatacttgagcacagctccccgccaggagagccacgtcctccagtttctgttcctgaaacaccctggaggagccggctgtgagccctggtgcagctggaaaccccagcaaggtggtcagtgtctgctcctctgtggaccagcctgcctggctactcagtgatcggtgtgactcaagttctccttcaaacaaaactaagaacatcagactccaaacaagcccctctaaactttagggaactcctttcctctgtagtcaaaacaggcagacagcgggtccgaacaagagttgatagcaaaaactacaagttatttatttacaactgcccattccagccgcacaagcccaaatccaccaccactggcggagcggtggcacctgctgccctctgagtaccggagcgcccgccgcagccgccggggaccccgagcttgggcagggccgcaggtcgcccggtgaaccgaagcagcagtcggaccgggcgcctgcggctggcgcgaaggaggctgggcgggggatgaacgcgcccagagggcagaggcggcgcggcacagggaaacccggaccccacgcgccccgaggccccggcgccccgagtccccgcgcgcccagtccggagctgcaccggggcggccgccggcctcgcgacccctcccgcggcggggcacggccccctccccgcggcccctgggcgggcgcgctcacgtgtggccgcagctgccgatggccacgggccggtgatagacctccaggcagatggggcaggtgtactgcgcctccaggccgctgtcgccgcccgccggcccggccggcggctgccgctgctgagccgaggccaccaggctgcggaacatagccatcccggggccaggcccgcgccgcccgccgcccgctgtcctggcccgggccggcccgctagtcacagccgctactgcgccgcgctgacgtcatcgtagggcgccgcccccagccgggcttcgcggccgtcacggcgccactccgacgtcatcggggcgcgccctcgcgctgtcgccgccacagtctgcgacgggacccggcgtgcccatgtgtcaggtgggcgaggactacggggagccggcgcctgaggagccgcccccggcgccgcggcccaggtaagagctggcggccggacccgccaggccgcccctcgccttcccgccgcactcctgccccgaagggtcccggccgggcttgctccgggaagccccgcgtggagagcgggacctcgctccctagcactcggggaatgcctgtcaagcggtgacggccacctagaaggggacttactccactggctcgcgcctctcatcctagcagccactggggacggctctgccgctgacagtgctgtccttattcggagagaactggtgccgtgaagctgtctcgcctccccgtgtcagccttgggagactgaaaagcggcctttatgtgccccctgagccggcttttctaggctaaacatccccccagagcctttgtttttcttgaagtttggacagaacacaagcctgggtttgtgtgtgtaccgaggtgcctttctctgacccaactcagggtgagaaacaggagctgtctccccaaagcccactaggcgtggggaagatgtgatctgtgtttctctcttctcccccctcccatctccaaagccgtgagcagaagtgtgtgaagtgcaaggaagcgcagcccgttgtggtgatacgagccggagatgccttctgcaggtgaggcctggaggtggctgagaccctggcaaacatggcctcgctagcagacaggatagccgcaacttgtgatgctttgttaattctttttaaaaacatgtacttactttattcctgctcctgatggggtccctcgtgcccctggtgttgaagtggaggcgaaagcattggtttcctg

SEQ ID NO: 16744 - DNA, 2300 bp, Homo sapien
acctccgcactgtggaccaggagagcctctgcgccctacaccaccagctgggattcaagcgtggtgggtccacgtgtacatgctgcgtctgggctcctgaaaccacgctgtcccctgtgggtcagggaaggccaaggtttctcccacgtgctgacctgaatgatccctggggatcccagctcgatgtagattcctaaggccttcccctagagagccggctccccactgttccttgggaccagcaagcacagcaaaagcccttctggccacaagggcctagcatacagccacagcagcctctcctcagtgaattctgccggcagcctggtgttcttggcaatttcagatgctcctgggtggttaaagaagtacctatcttggccaggtgtggtggctcatgcctgtaatcccagcactttgggaggccgaggcaggtggatcacttgaggtcaggagttcgaaaccagcctggccaacatggtgaaaccctgtctctactaaaaatacaaaaacaattggccgggcatgatggcaggcacctgtaatcccagctactcaggaggctgaggcaggagaatcacttgaacccaggaggtaaaggttgcagtgagctgggatcatgcactccagctgttgcactccagcctgggtgacagagggagactccatctcaaaaaaaacaacaacaacaacaaaaaaaccacgcaccaccactgggaattaagagggctaaaaggagagagacctggtcctcccttcagggagctatgagtctagtggaaacaactgaacaatacaatggctacaagccaagaaagacatgacaagcgcctgggggaaagctagaggtcttccaagcctctatcctgccacagatgaaacaagcatctcacacgagattaaaaactttcacccagaccatctgccaagttcccaagatgctctgatccgcccctagatgtattccagctgcccccaaacgcctggtcctcctacagcttatcccagtctagacaccacggccccacttccaactgtccccataagttccatcagaaacctcatcaggggatctgtggctagctcatgggaaactttcccaagcaggaaaccaatgctttcgcctccacttcaacaccaggggcacgagggaccccatcaggagcaggaataaagtaagtacatgtttttaaaaagaattaacaaagcatcacaagttgcggctatcctgtctgctagcgaggccatgtttgccagggtctcagccacctccaggcctcacctgcagaaggcatctccggctcgtatcaccacaacgggctgcgcttccttgcacttcacacacttctgctcacggctttggagatgggaggggggagaagagagaaacacagatcacatcttccccacgcctagtgggctttggggagacagctcctgtttctcaccctgagttgggtcagagaaaggcacctcggtacacacacaaacccaggcttgtgttctgtccaaacttcaagaaaaacaaaggctctggggggatgtttagcctagaaaagccggctcagggggcacataaaggccgcttttcagtctcccaaggctgacacggggaggcgagacagcttcacggcaccagttctctccgaataaggacagcactgtcagcggcagagccgtccccagtggctgctaggatgagaggcgcgagccagtggagtaagtccccttctaggtggccgtcaccgcttgacaggcattccccgagtgctagggagcgaggtcccgctctccacgcggggcttcccggagcaagcccggccgggacccttcggggcaggagtgcggcgggaaggcgaggggcggcctggcgggtccggccgccagctcttacctgggccgcggcgccgggggcggctcctcaggcgccggctccccgtagtcctcgcccacctgacacatgggcacgccgggtcccgtcgcagactgtggcggcgacagcgcgagggcgcgccccgatgacgtcggagtggcgccgtgacggccgcgaagcccggctgggggcggcgccctacgatgacgtcagcgcggcgcagtagcggctgtgactagcgggccggcccgggccaggacagcgggcggcgggcggcgcgggcctggccccgggatggctatgttccgcagcctggtggcctcggctcagcagcggcagccgccggccgggccggcgggcggcgacagcggcctggaggcgcagtacacctgccccatctgcctggaggtctatcaccggcccgtgg

SEQ ID NO: 16745 - DNA, 2300 bp, Homo sapien
acagctggagtgcatgatcccagctcactgcaacctttacctcctgggttcaagtgattctcctgcctcagcctcctgagtagctgggattacaggtgcctgccatcatgcccggccaattgtttttgtatttttagtagagacagggtttcaccatgttggccaggctggtttcgaactcctgacctcaagtgatccacctgcctcggcctcccaaagtgctgggattacaggcatgagccaccacacctggccaagataggtacttctttaaccacccaggagcatctgaaattgccaagaacaccaggctgccggcagaattcactgaggagaggctgctgtggctgtatgctaggcccttgtggccagaagggcttttgctgtgcttgctggtcccaaggaacagtggggagccggctctctaggggaaggccttaggaatctacatcgagctgggatccccagggatcattcaggtcagcacgtgggagaaaccttggccttccctgacccacaggggacagcgtggtttcaggagcccagacgcagcatgtacacgtggacccaccacgcttgaatcccagctggtggtgtagggcgcagaggctctcctggtccacagtgcggaggtgaagcccagcacctgtgtctccttgtatgagactccccacgcccaaagctgggtcctgggggtcacttcccatgtcccagccttgatacttgccagttacctgcagtccctcacctggcatcttgctgttaaacacagacttgctttactgtctgtaaaggaaccacaggggggtcattcggcctcttgtacgtggtatccattcaacgtagggagggactgctgtgcacatcaagtgtgtctgacaggaaggaagagacttagagccccaggtgcagggtgactcttgcagtggcattgtccgctctgtaccgggtgctgctcttcaccctgcctgccaggattgcaggagagctttaaaatgcagactcctaggcctcacccctagacaatttgacttaattggtttgtgcaattctaacatacagccagggccaagaacccctgacgtagtgagccagagtcagatggctggaaagtttattatgaacaaagattacagctgggcgcagtggctcatacctggaatctcagcactctgggaggcccaggcaggagggtcacttaaggccaggagtttgagaccagtctgggcaacaaagtgagaccttgtctctacaaaaaatacaacaattagctaggcatggtggcatatatctgtaacctgtagtcctatctacctgggtggctgaggcagaaggatcacatgaatcgaggagtttgaggctgcagtgagctataactgtggcactgcactccaacctgggtgacacatcgagaccctgtctcttaaaaatgcagttcccaggcctggaagttctgattctgtggggttaggggaggagcccaggccactctgtgagtgagcctcttagccattcctggcccagttgagcccagcacactaaagatgccagctctggggccccaggatactgagccctcgctgtggcccaccccatttccgcacttcaccccaaagaggtggtgtctctgcatggtgggtcctcgctgtggcccgctccatttccacgtttcacctccaagaggtggtgtctgtatgtggtgggtctttttttatggggtctgggttggccttgccctgtacgtgcctaagtctgtccactccaccagctgggcccttctgagcgcctgtggggaggggtgccggggctctgccctcgtttgctggatgcagcctccgtggctgtgcagtttgtacctggtcgtgggaggggccggtgagcctcgtgttcaccctgaggaagccactgccagaggggccaaccccgcccctttcaccagtctctggacagagcctggatgtgaagatgctgcttttaaagatggagattggcaaaggacgtcgtcacctggcagcgcctcaggacgctgctcactgtgcgggtagcaggcggttccctcatctcaggtctgtgttgcagggactgtttcaaggccttctacgtccacaagttcagagccatgctgggcaagaaccggctcatctttccaggcgagaaggtagcgtctgggtcctgggggtctgactgagcagcctggcccctcgaggtccctgcttgtccctcccacaggcagcctggcctgctgcagcccgccagctcctccttggcctttgaggacagactcgatgtcctagatgtcc

SEQ ID NO: 16746 - DNA, 2300 bp, Homo sapien
acagggagaatgccagcctcttagggtggtcaggagccatgagccaggcccagtccccagggggcccaggcagaagtcagcttttccctacagaagctgaggacagggaggaagaagagggggaggaagagaaagaggcccccacggggagagagaagaggccaagccgctctggaggaagagtaagggcggccgggcggcggctgcagggcttctgcctgtccctgtgagtgatggcggccgggggcagctggggagtgggggtggggaggcgggtactgggcccaggctgagcgcccccttccgcagggcccagggcacatatcggccgctacggcgcttcttccacgacatcctgcacaccaagtaccgcgcagccaccgacgtctatgccctcatgttcctggctgatgttgtcgacttcatcatcatcatttttggcttctgggcctttggggtgagccaggcccgggacccaaacccagtgtacgcagagctcagcagccacccacatcccctgggcttggctccccctgacctgtgctctcctggccacagaagcactcggcggccacagacatcacgtcctccctatcagacgaccaggtacccgaggctttcctggtcatgctgctgatccagttcagtaccatggtggttgaccgcgccctctacctgcgcaagaccgtgctgggcaagctggccttccaggtggcgctggtgctggccatccacctatggatgttcttcatcctgcccgccgtcactgagaggtgggcccacgcgtgggggcgctcggtctccaggggcggggcagtgcaggctgggggccctgcggggctgtttctgatggggtccttgacctggccatcccgccccaggatgttcaaccagaatgtggtggcccagctctggtacttcgtgaagtgcatctacttcgccctgtccgcctaccagatccgctgcggctaccccacccgcatcctcggcaacttcctcaccaagaagtacaatcatctcaacctcttcctcttccaggggtgagtgcaggtccgccggggtgggggtcacggcccgggcatgagggagcccacctgacgggaaccctggctgtgggcaggttccggctggtgccgttcctggtggagctgcgggcagtgatggactgggtgtggacggacaccacgctgtccctgtccagctggatgtgtgtggaggacatctatgccaacatcttcatcatcaaatgcagccgagagacagagaaggtgcctgggcccagggcgggggccgggacaagggccagggatatgccctctccctaagacagaggcactgctgccacgagaacccgtggtgctggaggccctcccagggctcggagcccatggggacatgaggcgagcccacccactagctgatcacgaggccagtgatcttggcagctgcgagtgagtgctgggcgcagaagtgggcagcggagttggtcctgttccaggcaggctggcagcagagcagggcctggtgcagggaggaccggacagccactgtttgctgcattcttgtttaatggcctttctcagagagaattcgtgcgtcagaccactcccccacgtaaaaagtacaactcaggggtttctagtggattcacagttgagcatctgccttctcaccacttcaaaaagaaaccccgggccgggcacagcggctcacccctatcatcccagcactgtaagagacccaggagggaggtactgctcaaggccaggagttcaagatctgcacggccacaagcgagaccctgcctcagcaaatgtaaaaataaaacaattagctggcaatggcagctcatgcctatggtcccagcactttgggaggccaaaggaggaggatcagttgaggccaggagttttaagaccagcctgggcaacatagtgagtgagactctctctacaaaaaaataaacgttagctgggtgtgatggtgcacacttgtgctcccagctactctggaggctgaggtgggaggatggcttgaggccaggagtacagggctgcattaagcctgatcacaccactgcactccagcttgggcaacagagtgagaccctgtctctaaaaaagtaaaaagaagaaacccagtgcccattggctgtcactcggtttcccctcccctggcccctagtaaccccttgtctaggtcctggttctatgagatttgcctacagtggatatttcatgaaaacaggctcagacagcgtttgtccttttgtaatcagctttccttgctcagcatggtgt

SEQ ID NO: 16747 - DNA, 2300 bp, Homo sapien
gccgtgtaccagtgtgtggccgcccactcggagctgctctgctacttcatcatcatcctcaaccacatggtcacggcctccgccggctcgctggtgctgcccgtgctcgtcttcctgtgggccatgctgtcgatcccgaggcccagcaagcgcttctggatgacggccatcgtcttcaccgaggtgggccgaggccgcgggggagggggcgcccggcccaccgcgccgtgaccctccccgcgtgctgagccccctcccccacagatcgcggtggtcgtcaagtacctgttccagtttgggttcttcccctggaacagccacgtggtgctgcggcgctacgagaacaagccctacttcccgccccgcatcctgggcctggagaagactgacggctacatcaagtacgacctggtgcagctcatggcccttttcttccaccgctcccagctgctggtgagtgtgagccttggctggcaatgcggggctgggcaggccctctgggcacctgtgctctccaccagggaggcaaggccccctcaccacaccctcccgcccctcagtgctatggcctctgggaccatgaggaggactcaccatccaaggagcatgacaagagcggcgaggaggagcagggagccgaggaggggccaggggtgcctgcggccaccaccgaagaccacattcaggtggaagccagggtcggacccacggacgggaccccagaaccccaagtggagctcaggccccgtgatacgaggcgcatcagtctacgttttagaagaaggaagaaggagggcccagcacggaaaggagcggcagccatcggtataagcgccctgcctcacaacctcctgcctacccagttttctgagtggggctactgcagggagggtctttctcagatgagacggccaagcccagtgcgaggcccacctggatcccaggaaggtgccacttctgagccacagctcccggctctgcctacagagccgtccctgactgctgcccccggggatgctccccacgtgtagggtgactgttggcctgggctggcccctcacagttgccccagacagaggacacagccccagctgtctccttgccagtgacactgggagctttcctgtgctccgtctgcttgtctgtcaaacagggagaatgccagcctcttagggtggtcaggagccatgagccaggcccagtccccagggggcccaggcagaagtcagcttttccctacagaagctgaggacagggaggaagaagagggggaggaagagaaagaggcccccacggggagagagaagaggccaagccgctctggaggaagagtaagggcggccgggcggcggctgcagggcttctgcctgtccctgtgagtgatggcggccgggggcagctggggagtgggggtggggaggcgggtactgggcccaggctgagcgcccccttccgcagggcccagggcacatatcggccgctacggcgcttcttccacgacatcctgcacaccaagtaccgcgcagccaccgacgtctatgccctcatgttcctggctgatgttgtcgacttcatcatcatcatttttggcttctgggcctttggggtgagccaggcccgggacccaaacccagtgtacgcagagctcagcagccacccacatcccctgggcttggctccccctgacctgtgctctcctggccacagaagcactcggcggccacagacatcacgtcctccctatcagacgaccaggtacccgaggctttcctggtcatgctgctgatccagttcagtaccatggtggttgaccgcgccctctacctgcgcaagaccgtgctgggcaagctggccttccaggtggcgctggtgctggccatccacctatggatgttcttcatcctgcccgccgtcactgagaggtgggcccacgcgtgggggcgctcggtctccaggggcggggcagtgcaggctgggggccctgcggggctgtttctgatggggtccttgacctggccatcccgccccaggatgttcaaccagaatgtggtggcccagctctggtacttcgtgaagtgcatctacttcgccctgtccgcctaccagatccgctgcggctaccccacccgcatcctcggcaacttcctcaccaagaagtacaatcatctcaacctcttcctcttccaggggtgagtgcaggtccgccggggtgggggtcacggcccgggcatgagggagcccacctgacgggaaccctggctgtgggcaggttccggctggtgccgttcctggtggagctg

SEQ ID NO: 16748 - DNA, 2300 bp, Homo sapien
gaactggaaggtgtagacggcgatgaggaccagcatggtgtaggccaccacgagccaccagaaggccttgagcagcttccgccacaggctgtagtagacctgccgggtgaggtgggggtggtgaggaccgcggggagggtccgtgccccagcccccatcccggccccccagccacctggaagagggtgaggcagagcaggaagaggaacatgtagacaatcttgtagaccacgaggcggccggcgaagctgaccacgatgaacatgccagcacacacatagatccagtacttggcgtacacgcccttcaccagctcccccaggctctgcaacagcgtctgcgtccgcgtgggctctgtgggccaagccaggggcaggcgatggcatcagggcgggcaggcaggagggcaacccccgcctctggcccaccactcacctgtgtctgccacggtgacctccgtcagcgcagctggagactctgcccacttcagcagcttctctttcacaaactggcgcagcaggagccagaaggtcagggtgtagagcaactgtgacaagcgcagggtgtcacagtcagccggggggcccagcacccctcccacagccgggggacccagcaccctcctatagcagggggcaagagctctcaggcggctggcaccagcccatccaccgcagcctccccacaggcaccgaacaccctctcgctcacacccactcagaggcacacgagcacacactctcacatccatggatgagtgcatgggttcacttgcgctcacacgcagagtcacacacgggttcactagttcacgtgggcacagatccatgcacgcacctgcacacatgtccacatgctggagtgcatgtttgcccacatgcgtgctcacatatgcacacaagctcacaggtgcatatgttggcacacaggctcacaagtttcacaagatgagacccactggcctgcaaacaggtgtccagacacgatgctggcacccgtttcacatggacacgcaggcaccctgtgaacacatggcctgcacagcttgtcactgagacccagggctgtgcatggtgccaatgggcagagcccacgctcacacacactgtcaggggcgcaggggtggtgcctgtgccaatgggcatagcccatgctcacacacagtgtcggggcacaggggtggtgcccgtgccaacagagcccacgctcacacagtgtcagggcacaggggtggtgcccgtgccaacacaaggttgtctgtttattcagtcaacaaacgctcactgagaagctactctgggctggctctgggtgggcagaaggggacagacagacacatctgccttcttggcgctgccactcccccgggcaagtggacattgaacaggacgacaaccctgatgggtctgcgcacccaggcacccccggatgtggtggtgcacactcaccatggcaccaaggtccagacaggggtagcgggtgtgctccagccccagctggcgcaggctgacggggcccagggtggtgggcagctcagggcgcaggtccatggcccacacgtagcgtaggcagcacagcgtcatcccatacagcaggatgcagggcgagcacagcatggccagttggtggcggctgcgcaccgtccagatgaggcaggcccagagcagcagtacgaaggtcagccagctgtggtaggtgatgctccatacctgcgcggcagagagggctgcacagctgcccagcgcaccccacccaggcgatgccccacacctgcgcggcagagggggctgcacagctgcccagcgcaccccacccaggcgatgccccacacctgcgcggcagagggggctgcacagctgcccagcgcaccccacccaggcgatgccccacacctgcgcggcagagggggccgcccaccccaacccccacagccgcctaccatcatggcaatgagcgcgcacacatagctctggtccatgatgaggtggcccaggctgtggagcggagacgcctccctgggctcagcccgcttgggccgcactgcaggtggggacagcggtcagcttcggcaggttgatctgcaggcctccccaccctgactatgccctaaaatctgggccctgggcaagcacacagcaggagagacaggcccccggtgggctatgggcagaacacgagggctccggcaattgggctgacaccgtccctgagcgtcagggatggccctgccagcacctgccgttctctgggcctcactttccttgaaagggtgggaaaggtggccctgaccccctttccag

SEQ ID NO: 16749 - DNA, 2300 bp, Homo sapien
actcggggcttcagcagactctgcgtcgcggtggggtgcttcggcgccggccatctcatctgcctctactgctaccagatgcccttggcacaggctctgctcccgcctgccggcatctgggctaggtaacggcttgccacacagcccctttttcctgccaccctggtcccgcccacctggctcgtctagcccctgtggccccactgcctctggggtggtaggctgtgacgggtcttctctggacagggtgctgggtctcaaggacttcgtgggtcccaccaactgctccagcccccacgcgctggtcctcaacaccggcctggactggcctgtgtatgccagccccggcgtcctcctgctgctgtgctacgccacggcctctctgcgcaagctccgcgcgtaccgcccctccggccaggtgagcacctgccacccatggtgggtgggctgaggccaggccatggggctggtctcaggacctcctgcctctgggtggggtgtggagctggtttgggctcaagacgctggtctctgcagaggaaggaggcggcaaaggggtatgaggctcgggagctggagctagcagagctggaccagtggccccaggaacgggagtctgaccaggtgagcagccaggcaggtggagacgccagcgtggggggcgcccggccagcccgtgcatggctcagcgctgcttgcccacagcacgtggtgcccacagcacccgacaccgaggctgataactgcatcgtgcacgagctgaccggccagagctccgtcctgcggcggcctggtgagtaccgcacactgcaaggtatggctgggtgcggggggcggggcggaggccggtgctgccccctggtggccgcctggcgctctcgcatgctcgcgccgcacctctgcctgccgccccctcgggggcccaggacatccacgggtcggtgtcagtgacccccgagacccccagggcagccgagtggccatgtcactgaccaacccccaagacccccagggcagctgagtggccgcgtcgttgatccccaagaccccatggggggcctccaggtcccccaacccctccccagagaatgtggctatgctgtcttgtgctgttagctctgggagctgctccaggtggcccagtggccccaggaggccgctcgtccagggcaggggctggcctgggaactctgtgttggccacgtcgccttgggagggcctgggggctctttctggctactttctttctttaccctaacccttgattttccattttgcaatgtgtttctgaatgaagcaaatgaagccacggccctggggtgggggtcctgagagtcttcaggtgcgcagagctggaaagggggtcagggccacctttcccaccctttcaaggaaagtgaggcccagagaacggcaggtgctggcagggccatccctgacgctcagggacggtgtcagcccaattgccggagccctcgtgttctgcccatagcccaccgggggcctgtctctcctgctgtgtgcttgcccagggcccagattttagggcatagtcagggtggggaggcctgcagatcaacctgccgaagctgaccgctgtccccacctgcagtgcggcccaagcgggctgagcccagggaggcgtctccgctccacagcctgggccacctcatcatggaccagagctatgtgtgcgcgctcattgccatgatggtaggcggctgtgggggttggggtgggcggccccctctgccgcgcaggtgtggggcatcgcctgggtggggtgcgctgggcagctgtgcagccccctctgccgcgcaggtgtggggcatcgcctgggtggggtgcgctgggcagctgtgcagccccctctgccgcgcaggtgtggggcatcgcctgggtggggtgcgctgggcagctgtgcagccctctctgccgcgcaggtatggagcatcacctaccacagctggctgaccttcgtactgctgctctgggcctgcctcatctggacggtgcgcagccgccaccaactggccatgctgtgctcgccctgcatcctgctgtatgggatgacgctgtgctgcctacgctacgtgtgggccatggacctgcgccctgagctgcccaccaccctgggccccgtcagcctgcgccagctggggctggagcacacccgctacccctgtctggaccttggtgccatggtgagtgtgcaccaccacatccgggggtgcctgggtgcgcagacccatcagggttgtcgtcctgttcaatgtccacttgcccgggggagtggcagc

SEQ ID NO: 16750 - DNA, 2300 bp, Homo sapien
gggaacccctttccctctcgggactcctctagaagttgaggcccatgtgcgtggcgagcatcagctatctgacgagtgggcactgggagggtgaggtgggaggaggctgggtgcccggggcagggagttcgtgggccaggacacccaggtggccataaatcctggctgagcctggggatggcaagtgtgggcccaggcagggacgagagggtctgagcagtcaacgttgggtgtcgcaggccccagctcatgccctgtccgtgtgagggggccatagctcagagattcccggggccggacctccaagtcttgtagcagctaaagttcactctgcctcccactccgaggacagaggccctgcttcaggcccgtcgctcctggggtccaggcccctgctggggctctgggccgacagcctgtttgcctgtaagtgcatggggcctgctggggccgccccttctcagcccttctgcagtggctctccagccagacccactgcccagcactgcaggtttccaccaccgcgtggccccaaataattcccctgtgaagagttcctaagggcacagatgccatgtcggggcgtggaggtttctgactagaggcagagcccgagtagaaacaggtctgaacggatggaactgcaggctgggccccggggtgggatttggaacttcctcctctctttaacaccaacttacaaccaaaacgtctacatctgttttaaaaagattaaaataaccctcaaaatggctgagaccacagctctcgaatgacctccctgacacacgggtgacgcagctgccctcaccagctcccgtggatgtgggctctgccgggtgttccttgcaaggcgcccgcagatgccgaggcagacagaggagaccaccaagatgcccaggtcaggggccaccagccggatggcgttggggatgtccttcaggtccagcctgcggagagcagggagcagccgcggtcagaccaagaggacaggtgtgggtgtgagtgtggatgggtctccaggtgcgggtgggagtgtggatgggtctccaggtgcgggtgggagtgtggatgggtctccaggtgcgggtgggagtgtggatgggtctccaggtgcgggtgagagtgtggatgggtctgcaggtgcgggtgggagtgtggatgggtctccaggtgcgggtgggagtgtggatgggtctccaggtgcgggtgagagtgtggatgggtctccaggtgtgggtgggagcgtggatgggtctccaggtgtgggtgggagtgtggatgagtctccaggtccccctctgtccctcctgggtccccccacttcctggggcctgaaatccccaagggaggcttgctggttgggggtgggaggaatggtcttaccttgtgacccctatgtgtcgcgagagggtctcccagcggctgcctgcagagaaagacgggggaacccaggtcaggctctgcccagccagcaccgtggcctggtcatccctggagcgtttcacctggaccatccaggccagacataaatcaggctgagtcaacccccccaggagactcggggtcactgcagggccctctccctgacccccaggatggctatccctaccccgccccctcagcgactcacagctgggtcccaggagctggtccaggcggggcacaatatgcaggcagatctggagggcgagatgggccaccaggaagagcaggctgaggcccagcaatgcccgcaggaggcggcctgtgtgacctgcggcagagcgagtgggtgaggctggtcccggggacggggaggggccgcagcccaggccgctcagccggacaatagcccccagcccggccagagcccagaggcctgagatgcaaacccgccatggactcaggaccccatcaggcaggccggccagccccactccccacgcctcccgagggtcactcttgtcacaaggagccgggcatcctcctgggggtggcagcaggatgggcctggggcccacaggcaggaaaaggcctcccaggctcagaggaaaccacctggggtgtgctccctcatccagcaaatacctgtcaccgttcagttgtggaagcagaggaaatagacacaaggagaggcaagaagctccacctcaccccagtgggggctgcaggtggatggagaccagagcatgcggagcgcccctgagcagccgtggctggggtgggagcagggccatgatggctctggagaaaagtggggcaggcagctgcctccctggggctgaggggctgcaaggagaagttgcatcccgatgcat

SEQ ID NO: 16751 - DNA, 2300 bp, Homo sapien
ctgggtgatcaaaaaaaaaaaaaaaaaaagcacgtgtaccaaaacaaaacttttcaacaaaacgtagctttaaaaaatgtgggtctcagtcttccatatttatttcttgacccactaaaaatttgctaccagctgcttgcaaaacacaggtctaggtgctgatcccttatatacagatggaaaacaaatgcctcaccacgccctccccatccccccacttatgaacgtcctcacttttgaggtgttttgttttggagatggagtctcgctctgttgcccaggctgctggagtgtagtggcgggatcctgagtagcagagattacaggtgcctgccatcacgtccggctaatttttgtatttattgtagagacggggttttgccatgttggccaggctggtcttgaactcctgacctcaagtgatccgcccgcctcgacttcccaaagtgctgggattacaggcgtgagccaccgtgcaggccacctttgaggtattttgcaagcaccagttgcatcatcaaaccggtttctattcctttaacttaaaaaaaaataggcacaattcacgctttttacagaaaacttggaaaatgggaaaacagaagccctcctctgagccctggccgcctccacccgcgtccccttccctcgcaggcctccaggccccggcggcccgcattgctttgcgggggacttccgcagcgctgcgcctggccctgcttattggcgtctctggaaggagtggctgtggctcgggctctccagataaaccgcgctctaggccgtttcccagataggagcgctataggttttaagaactaaaactttaaaatctcagccctcagccatgctaaaggcagtttcttttctttccttttttttttttttttttttttttgagacggagtttctcgctctttcgctcaggctgaagtgcagtggcgccatttcgcctcccgggttcaagcgattctgctgcctcagccccccaagcagttggaattacaggcgcccgccaccacgcctggctaatttttgtatttttagtagagagggggttttaccatgttggtcaggctggtctcgaactcctgacctcaggtgatccgcccgcctcggcctttcaaagtgctgggattacaggcgtgaaccatcgcgcccggccccttttcttcgtttccatgtaatagcttgattgagaaataattcacatatcaaatccacccttttaaaaagcgagcaacgcggatcgcggaggccacgcctgtgatcgcagcgctttgggagggggcagttccaagagagcggatcactgaaccggggagttcgagaccacccggcaacgtaatctccgcctcgatagaaatagttttttttttttttttgagacggagtctcgctgtcgcccaggctggagtgcagtggcgcgatctcggctcactgcaggctccgccccacggggttcacgccattctcaggcctcagccttttgagtagctgggaccacaggtgcccaccaccacgcccggctaattttttgtatttttagtagagacggggtttcaccgtgttagccaggatggtctcgatctcctgacctcatgatccgcccgcctcggcctcccaaagtactgggattacaggcgtgagccaccgcgcccagccagaaatagttttaaaaaaagaaataaggagcgtgcggcccgcgggggaagcgcctttaccagctcgagcctgcagccccccaggccgcgccgtcctcggctcccccgggcagcgccggggttttgtcaggcgcgcgctgctgtttgcctggattgcgctcattctgaccctgaagccagcggccccactgacacgccctgaaaagtgggagccacacgcgggatccggagaccgcgctaaagtcccacgcacgacggcgcccgccggcgagtccacgcccgcacgtcggcgcatgcgcgcggccaagccggtgcccgcgcccaccagcgcgcatgcgcgccccgtcccttccctccccccgtgctctgccccgatggttcggtccgcgccgggggcggggccagggcgcccgcgggaaatttggcgggaaccgcgcccgcctcttcctcccttccttctttccttgctttcgccgcgcactccgccgccatggagcagcgccgcgtcaccgacttcttcgcgcgccgccgccccgggcccccccgcatcgcgccgcccaagctggcctgccgcacccccagccccgccaggcccgcactccgcgccccggcctccgctaccagtggcagccgcaa

SEQ ID NO: 16752 - DNA, 2300 bp, Homo sapien
tttttttttttttttttgagacggagtttctcgctctttcgctcaggctgaagtgcagtggcgccatttcgcctcccgggttcaagcgattctgctgcctcagccccccaagcagttggaattacaggcgcccgccaccacgcctggctaatttttgtatttttagtagagagggggttttaccatgttggtcaggctggtctcgaactcctgacctcaggtgatccgcccgcctcggcctttcaaagtgctgggattacaggcgtgaaccatcgcgcccggccccttttcttcgtttccatgtaatagcttgattgagaaataattcacatatcaaatccacccttttaaaaagcgagcaacgcggatcgcggaggccacgcctgtgatcgcagcgctttgggagggggcagttccaagagagcggatcactgaaccggggagttcgagaccacccggcaacgtaatctccgcctcgatagaaatagttttttttttttttttgagacggagtctcgctgtcgcccaggctggagtgcagtggcgcgatctcggctcactgcaggctccgccccacggggttcacgccattctcaggcctcagccttttgagtagctgggaccacaggtgcccaccaccacgcccggctaattttttgtatttttagtagagacggggtttcaccgtgttagccaggatggtctcgatctcctgacctcatgatccgcccgcctcggcctcccaaagtactgggattacaggcgtgagccaccgcgcccagccagaaatagttttaaaaaaagaaataaggagcgtgcggcccgcgggggaagcgcctttaccagctcgagcctgcagccccccaggccgcgccgtcctcggctcccccgggcagcgccggggttttgtcaggcgcgcgctgctgtttgcctggattgcgctcattctgaccctgaagccagcggccccactgacacgccctgaaaagtgggagccacacgcgggatccggagaccgcgctaaagtcccacgcacgacggcgcccgccggcgagtccacgcccgcacgtcggcgcatgcgcgcggccaagccggtgcccgcgcccaccagcgcgcatgcgcgccccgtcccttccctccccccgtgctctgccccgatggttcggtccgcgccgggggcggggccagggcgcccgcgggaaatttggcgggaaccgcgcccgcctcttcctcccttccttctttccttgctttcgccgcgcactccgccgccatggagcagcgccgcgtcaccgacttcttcgcgcgccgccgccccgggcccccccgcatcgcgccgcccaagctggcctgccgcacccccagccccgccaggcccgcactccgcgccccggcctccgctaccagtggcagccgcaagcgcgcccgcccgcccgccgcccccggacgcgaccaggccaggccaccggcccgcaggagactgcggctgtcggtggacgaggtgaggggcgtggggagactgaggccggggagttgggggcggggagactgaggcccggggggcagggctcggggaaactgaggcggagggacgggggcggggaaacaggcgggggggacggggcgcagggaactctgggacaggccgggggatcctgggggcgccctgccaccactggggacttggctggctcctgagatgagcaggaggcactggggggcttgcaccgggatccgatgatggggctggaagtccagcttctctgcgaggccagggcaggggtccgacctggaaacggccccggaagacgagagcaaggctgtgtccccggccttagcacagaccaccatctacgggaagtcctaagccccccagccatgcccgtcccagttaactcagagcggcttctgatccttcggggtcctctgcagagccaggagcaccaggtcttgtcatgagttcacccttggggtccctcccaccaggtttccagccccagtacccccgaggccccagacatcccagcctgcccttctccgggccagaagataaagaaatccaccccggcagcaggtcagccgccccacctgacatccgcgcaggaccaggtgaggggcggggcctggggcagatgcgggagggctgagtggtgccggcctgcctgcctgcctgacggcaccgtgtcccctgatccccctgaaggacaccatctctgagcttgcgtcatgcctgcaacgggcccgggagctgggggcaagagtccgggcgctgaaggccagtgcccaggatgctggggagt

SEQ ID NO: 16753 - DNA, 2300 bp, Homo sapien
gcacgtcggcgcatgcgcgcggccaagccggtgcccgcgcccaccagcgcgcatgcgcgccccgtcccttccctccccccgtgctctgccccgatggttcggtccgcgccgggggcggggccagggcgcccgcgggaaatttggcgggaaccgcgcccgcctcttcctcccttccttctttccttgctttcgccgcgcactccgccgccatggagcagcgccgcgtcaccgacttcttcgcgcgccgccgccccgggcccccccgcatcgcgccgcccaagctggcctgccgcacccccagccccgccaggcccgcactccgcgccccggcctccgctaccagtggcagccgcaagcgcgcccgcccgcccgccgcccccggacgcgaccaggccaggccaccggcccgcaggagactgcggctgtcggtggacgaggtgaggggcgtggggagactgaggccggggagttgggggcggggagactgaggcccggggggcagggctcggggaaactgaggcggagggacgggggcggggaaacaggcgggggggacggggcgcagggaactctgggacaggccgggggatcctgggggcgccctgccaccactggggacttggctggctcctgagatgagcaggaggcactggggggcttgcaccgggatccgatgatggggctggaagtccagcttctctgcgaggccagggcaggggtccgacctggaaacggccccggaagacgagagcaaggctgtgtccccggccttagcacagaccaccatctacgggaagtcctaagccccccagccatgcccgtcccagttaactcagagcggcttctgatccttcggggtcctctgcagagccaggagcaccaggtcttgtcatgagttcacccttggggtccctcccaccaggtttccagccccagtacccccgaggccccagacatcccagcctgcccttctccgggccagaagataaagaaatccaccccggcagcaggtcagccgccccacctgacatccgcgcaggaccaggtgaggggcggggcctggggcagatgcgggagggctgagtggtgccggcctgcctgcctgcctgacggcaccgtgtcccctgatccccctgaaggacaccatctctgagcttgcgtcatgcctgcaacgggcccgggagctgggggcaagagtccgggcgctgaaggccagtgcccaggatgctggggagtcctgcaccccagaggccgagggccgccctgaggagccatggtgagtgctgggtgggcggccacgaggccccggcaaaggccgggttggtggcaggcgtggcccagcgagcctgtcagaggcccaggtctgctccttccagggagggtggtggtgaggtcaccagggcgcggacccagacccctgagaaaaaggtcccgggcactgctggcgctgtgccctcagtccctcctgcggggggcagctcctgcctcggggactctggcaggtttcaaatgctcctgatgcattggtgtgttgtctgcctctgcccctgagagctgacgaaactgcgctggggagagggcagagcttccctgggggagctgcgtggacacagcagagctggggtgtggagccgggctttcccgtcaccactgctacccctaacggtgccagtgctggtgggtgtgcaagggccgcgaaagccatcgtgtgtggcatggcaggccccatcggagggtctccctggccgaggggcctgctgtggcgttggaggggtaggggcctactgcttctcatgaggctcctccctccctgacagtggcgagaaggcgcccgcctaccagcgcttccatgccctggcccagcccggcctgccgggactcgtgctgccctacaagtaccaggtgctggcggagatgttccgcagcatggacaccatcgtgggcatgctccacaaccgctccgagacgcccacctttgccaaggtccagcggggcgtccaggacatgatgcgtaggtgagtggccgggggtgggctgtggctgtcctggagttgggggtgggcccgggcctgcctcctgagccgcccccatcctcccataggcgttttgaggagtgcaatgttggccagatcaaaaccgtgtacccggcctcctaccgcttccgccaggagcgcagtgtccccaccttcaaggatggcaccaggaggtcagattaccagctcaccatcgagccactgctggagcagggtgagtgctgggtgcgggacctcggtttccccatctgtgagccgcacagtttc

SEQ ID NO: 16754 - DNA, 2300 bp, Homo sapien
aggtggctggggatacagtttgcctttatacatcttagggagacacaagatcagtatgtgtatggcgtacattggttcagtcagccttccactgaatacacgattgagtctggcccagtgaatccgcatttttatgtaaacagtaagggaacggggcaatcatataagcgtttgtctcaggggagccccagagggatgacttccagttccgtctgtcctttgtccacaaggaatttccctggacgctaattatgagggaggcgtgtagcttcttatcattgtaactatgttatttagaaataaaacgggaggcaggtttgcctaattcccagcttgatttttctcttggctgagtgattttggggtccggagatttattttcctttcacaccttctcagcagctgccaagaatcaggtgcccagctcccgctgcctcccggccggcctcctccagaggccagcgccacattggttgttgaagggcaggactcggggctccttgctgttcccacgccagcccaacagcccgggttgaaggaagccacagggccaattctgtgttgaaccctccccaggcccctcctccagtacccccccaccccacgccttcccaggcccccctcgggccatctgggagacagaatcaggaacaaggaaggggaaggcggaggcctcctgggctggacgtggacggctgaagtgtagctcacacacttggaccggtggggccggctcatgtggcagcttccccggggacgtgaggatgtcagggtcctccatttccaccttccctaggggtctggagcccaggccccaggccttgccagccctgaccaccgcacactgcgaggcagccgcccctaccacgccccttggcatcagacgatgggtcccccacccgccctggaaccggggccccagcagccgcatgcagcctccggcctccccctccgaaggctcctgggggctgccttccactgagtgggttttcccttctgcagtaactgccaggccaaagctgaattgtaaaagttgcgaaatgatgggccgggcgcggtggctcacgcctgtaatcccggcactttgggaggccgaagcgggcagatcacggggtcaggagatcgagaccatcctggctaacacagtgaaactgcgtctctactaaaaatacaaaaaattagcagggcgtggtggcgggctcctgtagtcccagctactcgggaggctgaggcgggagaatggccggaacccaggaggtggagcttgcagtgagcccagatggcgccactgtgctccatcctgggcgacagagcgagagtccttctcaaaaaaaagttgcgaaatgaagaaaagtcttggaatagagcacaaggcattttagctctggggattttcttgaaaggaaattgtgtttggggggagttatgcctcacacaaccccctgggtaccagtcctcgggcggccagggggttcacagctccccaccccaaggctaaggggtcacctggcctctgcaggcggacagaagggcttctgccctcgcggatgcgcgccctggcctggccacaccttccggcctccctcccccgggtccgggcggggaagagccgcctcaacggcagggcccatccgcgagaggccagcgcccccggccggtccagcccaggcccgccgcctccgccctgggctgctccctccgggccctgcaccgccctcctgctacttggaccgcttcctcacgcccttctccaccccgcgcgccagcctcccgcgcgcagcgtggggatctcggccaataaaggagaaagggcgcggcccgtacgcgcgccaggtgcgtgggcgagaccagctcacgcccctcctccagccgccaaggccccggcccacagctgcctggctgcagtcagaagcgtagcccgagacaaggaagggcgccttgactcgcacttttgtccggttcgaacgttctgctcagtggtgcgtggaatgcgagcgcgtcttaaaatcgatggcgcctaggagtccatgaaatacggtacaggcttccggcgacggatgccccgcccctcacccacgctccgccctccggggatgccccacccctcgtggcggtcccgcccgtccccgcgcaggcgcgctcgggctgccgctggctcttcgcacgcggccatggccgactccgagctgcagctggttgagcagcggatccgcagcttccccgacttccccaccccaggcgtggtattcaggtgcacgcacaggccgccctcgtggcgccccgacctgcgggcctacgga

SEQ ID NO: 16755 - DNA, 2300 bp, Homo sapien
gtagctgtcctgagagaggaaggcccccagcagagcgagcccacacggtctgccctagctgtcagggtactgcccatgtggtctacgggtggggaggccggctgtgctccagacatccagggacatgggcaggacaggaggtgggatgaaacccccactgggagccacaccaggagcaaaagccgctgtccagacagagccgtcctggtgcccgggcgtgggggcagcacctcttgacacggcagtgccgggtccgggaccctcatcttttgtgaattttattttgcttaacttgactcttcttggcggaagtgctcattcattacatgacggtgaccagaagcagcaccagcttgctgcctctttctagatagagccccgtggaggtgtgggagtcgcaccacgcagcccccatttgaagtgtgcagttctgtggttggcattagtcacaggctgggacaaccagcactgtagctgcttcagaacgagccccatggcctgagcggcggctccccagccccagccgagtgaccacagccgcctcactgccttcaccttggtgtcgtgccctcagccccattcccccatcttcccatgtggcaggttattgcagcaccggcctcagccaggtcatcagatgcaagaccgtgccctgggggagcgagggatgcgtccagcttggttgttccctgagtggacatttcatttccaggcttccttttttttttttttcttgagacaggatcttgctctgtcacccagggtggattgcagtggcgcgatctcggctcactgcaacctccgcctcctgggttcaagcaattctcctgcctcagcctctcaagtagctgggattacaggcgtgcgccaccacgcccagctaatttttgtatttttagtagagacagagtttcaccatgttgcccaggctggtctcaaattcctgacctcatgatccaccttcctcagcctcccaaaatgctgggattacaggcatgagccatgacgcccagccctagccttcttttaaatgaagcccatggctttgctggtgaaatcagggagaacgggactttcttggcctaaattctgaagtctgtctggatctgtgttcttttcagatattatgaagaatttcctattaatctgaagacgggggaagccaacctcacccagatctacctgcaggtgatggggaccgcaccatcctcgccctgtgggacgcatggggacggggaccgcaccaacctcatcctgtgggaggcgtggggacaggaatgcatcaacctcaccccgtgggaggcatgggttcagggacctcatcaccctcgccccgtgggacgcgtggggacggggaccgcaccatcctcgccccgtgggacgcgtggggacggggaccgcaccaaccttgccccgtgggacgcgtggggacggggaccgcaccaacctcgccccgtgggacgtgtggggacggggaccgtgggaggcatgaggaggtcggcctgaggctggaggacgacggtgtggctctctccataggaagccctggacttcattaagagacaggcacggcaccacccctttttcctctactgggctgtcgacgccacgcacgcacccgtctatgcctccaaacccttcttgggcaccagtcagcgagggcggtgagtcctggctccatggagcatagacctcgctggaggccccagctgtgcttgactccagagatgggacactcagtaccgtggcatttaggccaattatggaaaggccagagcaaccccacccctttgaagccgtccactggcctgggatcagcagaggagggctgtggtgggggtgctggctctgtccttcataagccacatgaacttgaactgaggccattcctcttctgggaagaggccggccagtttcactgtggtctgtgaagttatgatttaatgaactccgtgaatcacagtatgccgttggctgcctgatccatttgtcaccatcctccaggtatggagatgccttttgtcaccatcctgcaggtatggagacgccgtccgggagattgatgacagcattgggaagatactggagctcctccaagacctgcacgtcgcggacaacaccttcgtcttcttcacgtcggacaacggcgctgccctcatttccgcccccgaacaaggtgagtgctcgctgtcacttctcacggtttccccacagccagcgtgtcagcgaagagtgcctggaccggctgtgcccacggggtctgtggtgggcagagcatgaagggtccctctgggtccagc

SEQ ID NO: 16756 - DNA, 2300 bp, Homo sapien
ttttaatgttttgttttgtttggtaaaaatcaaccttagacaatcagcgatcagactctagtccctgtcgtggtgaactgtggagagaccaaagtgagcctctctccggctcttggagcaccagggcccatgcagcctgtcttggggtcatttgaaatggtggaaactttacaagggcccgatgggcaggtgagccccactcggcctccaggcacagccctcctcaaggtccctgctgtccatgcaggtggcagtcctactctgtgggtgagtcctggagccacttgtgacaggaggaggctggatggggtgaatttggagaaaagtggcaggtttttgttttttatttttttgagacagggttctctgtctgttacctaggctggactgccgtggcgcgatctcagctcactgcagcctctgcctcctgagctcaggggattctcctgcctcagcctcccaagtagctgggattacaggtgtgtgccaccatgcccagctgattttttgattttttatagagatggggtctcaccttgttgcccaggctggtcaacgagagagaaaagtatttcagagacttaaaaaaagaaccatcggtggtctccagtgtgcttaagagctgcgggtggagctgtttgcgttcctcctgaaggctttggctgccagacatggctgggctgcagatacttgctttactaagaggttttccctccctgccgtccaggtgtgtccacaggtgtccacacaaccaggtgtcgtgaatgtctgttcacactaagtgggcttctcagtaaccccctggccacacccccatctcacccatcccaggagcctcctgggaccacacacgggggtcgggagcttaaaagaacagaaacacggccgggcacagtgctcacacctgtaatcccagcactttgggaggccaaggcaggcagatcaccggaggtcaggagttcgagaccagcctggccaacatggcgaaaccccgtctctactaaaaatacaaaaactagctgagcatgatggagggcgcctataatcccagctacttgggaggctgaggcaggagtaatcgcttgaacccgagaggcaaaggttgccgtgagccgagatcgtgcaggcaaaggttgcagtgagtcgagattgtgccctccagcctgggcgacaacagcaagacttcgtctcaaaaaaaaaaaaaaaaaaaaaaaagccagaaacgcattctgtctcggtctggaggccggaagtctgagctcaaggtgtgggcaggacctcgctccctcggaaacctgcaagggacctcttgcccctgcagcttctggtggcccccagccgtccggagcccatggctgtgtgtctcccgcctctgaccccattgccacacggccaccttcgccctgtctcctataaggactgcagtgtgtgggatgagggtccacccccatgttagtgacctcatcttactgaatcatatctgcggcaaccctgtttctaactaaggtcacatgctgagctacactggggccatgatttcagcataacttttggggatacagctccacccattaacacagatgaactgtgatttatttaaccaaatttctgttcccagtatctcaaccacaattttaaattggcataatgggttatacatagctgtaattattttcttaggataaactcctacaagtggaattgctgggccatgatctttttttgtttgtttgtttagtgagagtgtctcaccctgttgcccaggctggagtgctgtggtgtgatcatggctcacggcagcctcaacctcctggcctcaagtgatcctcctacctcagcctcctgagtagttgggaccacaggtacacaccaccacacttggctttttttttttttttagagttggagtcttgctgtgttgtccaggctggtctcgaactcctggctttaagtgatcctctcatgccctttttttttttttgagacggagtcttgctctgtcacccaggctggagtgcggtggcacaatctcggctcactgcaacctccgcctcccgggttgaagcgattctcctgcctcagcctcccaagtagctggtacaggtgcccgccaccatgcccagctaattcttgtgtttttagtagagactgggtttcatcatattggccaggctggtctcgaactcctaaccttgtgatccgcctacctcggcctcccaaagtactaggattacaggcgtgagccaccgcacccagccccatgattgccttttaagatagggtagctgcactttcactaa

SEQ ID NO: 16757 - DNA, 2300 bp, Homo sapien
ggtggccacaccccacccctccaccctgcacggcctgaacccttgctgtcctatggaaacgtagggtgagtccacatgcaattccctatttaccgggagccacattagaaaagcagaagtaggtgaaatacagactaactttatattttatttaacccaacataaccaaaatattatttcgacaagtcttcaacataaaaaattattcatgagctgccccgcctcacccctctgtcctctgagaaagtcaggaaaagcagaaacttaacagggaggcttcacctgcagagcccagctcatccagcgaagctatgctggcccagaaggagttacacaatgaaaagaagaaattctgaaacaaagtatctacactggcccagaggaacttcaaaagtgaaaggatgaaattctgaagcaaagtatctttaggagggagatgccactcagtgcagagaaaggcccggctactgctgtcaggacacggacccctgggcgctggagagcgtgctctggaaagcagtcactgcacacaaataagacatatgagatggaaaagcagctgcccaggactgtcggctgtcacccctgggtggggaaattatgggtggtgtctgttatcttttcaagtatatctttatgttaaaaaaccattaatttaataaaattgttaagtgagatattttacattatttttctttcaccaagtcttctaaatctgtgtattttacactaccagcaccttccaattccgacagccacgactgcccagcccttgggtgtggcccgtggcccccactggtcagcacaggtgggtctgaaggcacctgtcagggtctctgctggtcggagccagcacacaggggctgagcgacaccgacggcccaaaactgtctggtactcggtgtcgtcccagtcctcacacacaacgtgagcacggcgggacaggtgtaaccccccaggtgtggcagctgaggttcaagaatggaagtgacccccaagcttggagacagtagggtttcaacccaggtgtgtctggggtcctgcacggtgacccatgccccaggcaggctcattcctgagtctccaggtggctcccacaaggagttagggaaggaggcctccaggctggctgtgacccctgaccccgcacttgcccaccaggagacattccagcctttcagttcttcagaccttagggacacctgaccttcgctcagcattctccagaggacagagacagccgtcaggtaagactggagcccagcggggggacccggcggcccgaggtggcgggagtgattcctagggcgacgcagctctcaggcagggcggcaggagcagcctcttcctccctttggggaggccacgctgcgcgcccacctttcccaagagtagagggcgggaaaggtcagacgggggaggcagggcccggtagcacgccggccacccacctgccagggaggacgctgtcccggtcatgcagcacagtggcagcgcgtgtggtgatcggtgaccgccgagaccccacgcctggaccccgcggccactccccgaggggcctccccctccccgcacggggataccccccgtcccctccccctcctcctccccgcgcggggcctccccccttccccaaggggcctcccctcacctctccccccaccccgcccgcccttcccccacctcgctcctccctccatccgcccctcccctccccgccccaccccggccctgccccgtcccaccgcccgcactcacgtcgtccatgagcaggagcaggatgttggggggctgcggggcgcccgaggcccccatccccgcggcgctgagcaccagcaacagctgccaccacctcgtcgccgcgacaaccgccgccatggcaaccacgggagccgcggagccccggccagcgagccgacctagcgagcgtccgccggcccttccggctgggctgcggggcggggcctggacggccacgtgactcgcggggcggggccagagtccgcggagggacgggaggcggggcctggactgcctcgtgaccagtggggcggggcctgagccagctgtgtgcggatggggcggggctttggaggccgcgtgaccagcggcgggtcacgtgacgcggtgcctggcgccgagcctcccaagatggcggtgtgcatcgcggtgattgccaaggaggtgcgtacgcgcggcgtggggcgtccgggctcgcaccatcctcggctctccgctttctttctacttcttccctgggcttagaaggcaccttaggaaatgggacctggaggaggcct

SEQ ID NO: 16758 - DNA, 2300 bp, Homo sapien
ccttgcaggtacaaagcagaagtgtcccacttcctctgcaaaccagacaacggacacgtgcaaaccaaaacattctacggggaattctagccttgcttttcccaaatggctcttccaatgaaagagaagagttacaggccttcattcacctcaagctaccctaattccctggctggctaaaaactctcacctctttttcttctaaaaggtttcaagttatctgatcctaaagtacatcttgcaactgtaggtcctccctgacacacaccctgccctgaaagatacaccttgtagtcctccgtggggtagagcaggcccaggtacagctccctctggtcgaccagggccttccccattgcggagatcttctcatccaccacgtccagagatgtgtgcaccatgtagtggaacttcagctcgttctccgtaggggtgctgcgaatgtagagggggtaattctgcaagaaaggatgacggcgactgaaaggacaagactccacccagcgcacaccagctctgaactatgctgcagagccgtgacctgcagccacccggggaacgcattcccatgctctaaggcccaccgcttcattctctatgccgcagtgggcactgccttcaggggatcccagctaacctaaggagatttatgtgttgtttgcaaagcagcagcagtagggtgggcggaaaagaaaaaatgaatcagaaaaatgggcctgagcacagcctgccgatcaagcctggcacctgggcacgcctctcaccttctcctggaggccactctgcctcagcccacctctaactctgcatggctcacccaaatacagcaccctcaatactggcttttcttcaccttgacagtgacccttttactaaacccttcaagactcagctcaaattcccttcatctctgcatttctgaccattggaagcccagaattaacagcttctttctcggtctttcacacaccaccatttaccctgtgtgtgttcagcactgggtcctgcacaaatacagtgaacaagagtcctcgctaccctcgtggggagtgatacctagtcaataaacccacaaacaagcaaatgatcatcttggccaagagggaagcccatgagcagcttagcagcagccaccgcccagcagggagcggtctcgagtctggtctcgggagaccctggctaggaaatgaaggctccgtgcagcaggagcgtgtgggcagccacccagctcagtcttagccttcagaaaatgctttccagttgaaatgtatgtgggccagtaaagaggatgggagctggggagaggtgttccgcgtgcaaaggcccacaggtgagagggcagagcatgtccagggagctgcagaattgtttggttggagcggagagtgccaagggttatggggggaaaggatcccagagcaggttattcagacagcatcctaaggcaacgagaagccactgcagaggtctcaggcagaggcgtgacaggatccgatttgtttttaactcggctccggggagactggcaggagggccggggccgccgtccgcggggaaccagcgctggacgggagaacgggcagaacctgctgaggacggaggacggaggtagtgcccgggaccacctaggtttctggtgggtcctggcggggaggagacctgctgcgccgaggggtgcgttcagcagcgggacgggcgagcgcggaactggggtctcagtcagggtctgcctggcggctcgtccaccgcgaagcccctgaccgctggagctcggcgaaggcctcctccaggtcccatttcctaaggtgccttctaagcccagggaagaagtagaaagaaagcggagagccgaggatggtgcgagcccggacgccccacgccgcgcgtacgcacctccttggcaatcaccgcgatgcacaccgccatcttgggaggctcggcgccaggcaccgcgtcacgtgacccgccgctggtcacgcggcctccaaagccccgccccatccgcacacagctggctcaggccccgccccactggtcacgaggcagtccaggccccgcctcccgtccctccgcggactctggccccgccccgcgagtcacgtggccgtccaggccccgccccgcagcccagccggaagggccggcggacgctcgctaggtcggctcgctggccggggctccgcggctcccgtggttgccatggcggcggttgtcgcggcgacgaggtggtggcagctgttgctggtgctcagcgccgcggggatgggggcctcgggcgccccgcagccccccaacatcct

SEQ ID NO: 16759 - DNA, 2300 bp, Homo sapien
ccctcctcccagctgtcagcgcagcccaggcatctcgagaggcccagggaggaggattcctaaaaccctcatggcgggccttgcttccctccacttactttctgctcactggctcttcccagagtctatcctgagtcttgcaagaagtgtgggcaaaagcagtgccgaggcctctttgaggcaggacgtgttcggggacggcccggaactgggctcctcagaacccacccaccccatcctgcagcacgtcccaggaggggtcgccaggcatggggccagcacccctcccagcactgttgtcagcctcgcccctcgccctcatgctttttggaaggggagcccaggcggaaagccaggtccctgaggcagagccccgctgagcgggttaaaaaggagaatcccaaactcctgcgtgcgtctaggcacgtgtccatgtgagtctggtacccccaggcgctcggcagtcccaggctagggacccatctttgcaagccatggaggtgggccctccctcacccccttactctcacgggcggtgggctggtcgggcacccatcctgtccggggctctggccgagtgggctgggggagtgtctggtgcgtcccggtccctctgaggtgctgaaggctgcgccgcccgcccccagctcctgaactgcatcatggacatggtggagaagacgcggcgctcgctcacggtgctgcgcaggtgccaggaggccgaccgcgaggagctcaaccactgggcgcggcgctacagcgacgccgaggacacaaagaagggccccgctcccgccgcggcccggccccgcagcagctccgccggtcccgaagggcctcagctaggtgcgtgtggggtgtggggggagggagcagacacggggtgctctggtggggcggacacctgggagctgtcaggcaggcaatgcaacgaaacaccaggcagaacagtttcgcttgagaaagaggcacctttttcactttgtaggaaaacacgggctggtctgccaggaagcctggagctcagagcgtctggtgggccagaggctcggagctgggaggccctgagggtctctgcttctccgcctcagcgacgaatgctgacacaggagaggcccaggacacacacggctcccagccgagtccaaggtccacagctccaatgccccccgtgcccgggcactgccctgggtgcctgagccagaccttgtccgagggcacctgggcctccccccagggacgcacacactcacgccctgcactcagggcccagccagggtggggagggccccagcgtgggaggggcagccgcgtggcccatcctgtgtgacgccggcccctgtttcagacgtgcctcgcgagttcctgccgaggaccctcaccggctacgtgcctgaggacatctggaggaaggctggtgagtgggggtgcaggggcctggccagcagagctgtgggaggccagggccccagatgcgcctctcaccggctcagctttgaagagcttctgtctctctctgggggctcaggctacaaggctttctgcattccgctgtgtggctcacggagaggtcagagtaggttcacacttagggcaggacagctgctacctgcgcctaccaggaaacggaccggtggccgcccagcagaataaagtgggtcctggacctgcacacccaggagggcacgcagaagcgcacacactcggagcctgggcgcgtcaggcacgcggggccagagtccgggcagaatggggtcagaacaggggcagacgtggagctgagcgctgggcaaggctgtggggacatttgctcatgccgtgggaatcagccttgggggaggggctggggcagagccagatatgtgggcagcaagaggggttagggttggggttagggttagggttagggttgggcagcggtaccggggtctccagctggcctcagggtctctttcagtggtggagttgaaacatggcctccccagctgcgtgggcagtgctccctggaggctgctctgagcctaccccatcttagcacagatcaggatctgtgtgtggctgtgtgtgggtcggggagcatggtcttcagaggccagccaggttaaaggatggcaagtgcggtgaggataacagcagggtctggggtgacagcacagagccctggacgagggggcttcctgggctgcgtctgggtggggccagaggtgaaggcggaacggcagagttatccaagtgcttcaggtcagcagcagctcccccggctcgcgttaggaatgcagattccgggtgcgcccctggct

SEQ ID NO: 16760 - DNA, 2300 bp, Homo sapien
cctcccagtgaggttacccattgattcacggactaaggcaggtccaggtcatggtgtgacttggcactgaggcatcctcaggccacgcttagtctaacaaagccttcccggccagtggctgaggacactgctccagctccagccagcctcggtccacaccccacccccaccgctccctgcctggtgaccacaggcaaacacatcctcttaaccagcctcagtttcctcagctgcagaatgggactgagactgaaccctcccttggaggcgtgtgccgtgttgcaggggaagagcagtcggcccagagccccaggcggctcagtaacccaggcatcctccacggtcaccaagtcaaccagcccttcggttaccctgtccatcgtccccagcgggcacagcccacgggtggggcctgggagcagagggcggggtctgggagaatagggcagagactggctgtgggtgggacctaagcgtgcacctcccccatccacagtggtgcctgggtcccggcaggaagaagtgatcgaccacaagctcacagagcgtgagtgggcagaagagtggaagcacctcaacaacgtgagtgtccacacacagccacgcccacacagccatgcccaggcgcacagccacgcacacacacagccacgcacacacagccatgcacacacagccacgcccacagccatgcccacacacagccacacccatgcacacagccatgcccacacaagccacgcccacacagccacagccacgcccgtgcagtcacacacagccacccccacgcacacagccacgcccacgcacacagccacacccacacacagccatacacacacagccacacccacacacacagccatacccatgcacacaacccccccatgtacacagccacacccacgcacagccatgcccacacacagctacacccacacagccatgtccccacacagccacacctgtatgcctatgcataaacacggccatggctctgccccatggggcctggggctgctggagacagcagggctgtgtgggcgcccctgagctcagtgccctcctgtgtggcctgcgccgtccctgcgcagcggctgggtccttcacctgagcccccctcctcccagctgtcagcgcagcccaggcatctcgagaggcccagggaggaggattcctaaaaccctcatggcgggccttgcttccctccacttactttctgctcactggctcttcccagagtctatcctgagtcttgcaagaagtgtgggcaaaagcagtgccgaggcctctttgaggcaggacgtgttcggggacggcccggaactgggctcctcagaacccacccaccccatcctgcagcacgtcccaggaggggtcgccaggcatggggccagcacccctcccagcactgttgtcagcctcgcccctcgccctcatgctttttggaaggggagcccaggcggaaagccaggtccctgaggcagagccccgctgagcgggttaaaaaggagaatcccaaactcctgcgtgcgtctaggcacgtgtccatgtgagtctggtacccccaggcgctcggcagtcccaggctagggacccatctttgcaagccatggaggtgggccctccctcacccccttactctcacgggcggtgggctggtcgggcacccatcctgtccggggctctggccgagtgggctgggggagtgtctggtgcgtcccggtccctctgaggtgctgaaggctgcgccgcccgcccccagctcctgaactgcatcatggacatggtggagaagacgcggcgctcgctcacggtgctgcgcaggtgccaggaggccgaccgcgaggagctcaaccactgggcgcggcgctacagcgacgccgaggacacaaagaagggccccgctcccgccgcggcccggccccgcagcagctccgccggtcccgaagggcctcagctaggtgcgtgtggggtgtggggggagggagcagacacggggtgctctggtggggcggacacctgggagctgtcaggcaggcaatgcaacgaaacaccaggcagaacagtttcgcttgagaaagaggcacctttttcactttgtaggaaaacacgggctggtctgccaggaagcctggagctcagagcgtctggtgggccagaggctcggagctgggaggccctgagggtctctgcttctccgcctcagcgacgaatgctgacacaggagaggcccaggacacacacggctcccagccgagtccaaggtccacagctccaatgccccccgtgcccgg

SEQ ID NO: 16761 - DNA, 2300 bp, Homo sapien
tttctcaagcgaaactgttctgcctggtgtttcgttgcattgcctgcctgacagctcccaggtgtccgccccaccagagcaccccgtgtctgctccctccccccacaccccacacgcacctagctgaggcccttcgggaccggcggagctgctgcggggccgggccgcggcgggagcggggcccttctttgtgtcctcggcgtcgctgtagcgccgcgcccagtggttgagctcctcgcggtcggcctcctggcacctgcgcagcaccgtgagcgagcgccgcgtcttctccaccatgtccatgatgcagttcaggagctgggggcgggcggcgcagccttcagcacctcagagggaccgggacgcaccagacactcccccagcccactcggccagagccccggacaggatgggtgcccgaccagcccaccgcccgtgagagtaagggggtgagggagggcccacctccatggcttgcaaagatgggtccctagcctgggactgccgagcgcctgggggtaccagactcacatggacacgtgcctagacgcacgcaggagtttgggattctcctttttaacccgctcagcggggctctgcctcagggacctggctttccgcctgggctccccttccaaaaagcatgagggcgaggggcgaggctgacaacagtgctgggaggggtgctggccccatgcctggcgacccctcctgggacgtgctgcaggatggggtgggtgggttctgaggagcccagttccgggccgtccccgaacacgtcctgcctcaaagaggcctcggcactgcttttgcccacacttcttgcaagactcaggatagactctgggaagagccagtgagcagaaagtaagtggagggaagcaaggcccgccatgagggttttaggaatcctcctccctgggcctctcgagatgcctgggctgcgctgacagctgggaggaggggggctcaggtgaaggacccagccgctgcgcagggacggcgcaggccacacaggagggcactgagctcaggggcgcccacacagccctgctgtctccagcagccccaggccccatggggcagagccatggccgtgtttatgcataggcatacaggtgtggctgtgtggggacatggctgtgtgggtgtagctgtgtgtgggcatggctgtgcgtgggtgtggctgtgtacatgggggggttgtgtgcatgggtatggctgtgtgtgtgggtgtggctgtgtgtgtatggctgtgtgtgggtgtggctgtgtgcgtgggcgtggctgtgtgcgtgggggtggctgtgtgtgactgcacgggcgtggctgtggctgtgtgggcgtggcttgtgtgggcatggctgtgtgcatgggtgtggctgtgtgtgggcatggctgtgggcgtggctgtgtgtgcatggctgtgtgtgcgtggctgtgtgtgtgcgtggctgtgcgcctgggcatggctgtgtgggcgtggctgtgtgtggacactcacgttgttgaggtgcttccactcttctgcccactcacgctctgtgagcttgtggtcgatcacttcttcctgccgggacccaggcaccactgtggatgggggaggtgcacgcttaggtcccacccacagccagtctctgccctattctcccagaccccgccctctgctcccaggccccacccgtgggctgtgcccgctggggacgatggacagggtaaccgaagggctggttgacttggtgaccgtggaggatgcctgggttactgagccgcctggggctctgggccgactgctcttcccctgcaacacggcacacgcctccaagggagggttcagtctcagtcccattctgcagctgaggaaactgaggctggttaagaggatgtgtttgcctgtggtcaccaggcagggagcggtgggggtggggtgtggaccgaggctggctggagctggagcagtgtcctcagccactggccgggaaggctttgttagactaagcgtggcctgaggatgcctcagtgccaagtcacaccatgacctggacctgccttagtccgtgaatcaatgggtaacctcactgggaggagctggtctcagtcattcgcggcagccctctgcggtcacccgcaggcgcccatgactccgatgaagccacgccaaacaccacccaaccacgtggcctcggcacccgcctcctgtctctgcctgtgaacaccgccagccaagccgaggccagggctctcggaacacgctggctctgaggcccatcctattcggggttgttctctgctcagttaaa

SEQ ID NO: 16762 - DNA, 2300 bp, Homo sapien
tcctccccaggccccggaggcccagctggccgtccgcccgtgcggacacccgggagccaacactgacccgaagacaggtcagccagacttcccacctgctccctcaggaggtgggatccggtcccctcctgctgggctgcacgggccacgatggaaaggcgcctcgtgacacgctgcggtcagctcagaaaagccgcagatgctgacacgggcaaccctgcccagtgtggggcgtcctctgaagtgggagccgcagggagggcctcacggaggcctctgtccacaggcagcggctcccggcacccaccgctgctgaccgagcccctggcacccccaagccgagcctttgaaccccagcagggaaggccacctggccgagaccctggccaccacggggccatcactgtcccacggggctctgttccgactccttggcccgagggtctctgagcaccaccagggttgcctcacgcctctgagtttggggtggtttgttcggcagcactggggcccggggcagcttcttgcccggcgtgtggcacagctgtccttgttgggggcgtttctgggatcctgtggtttcggggacgctcccctactccctggccttgggggccgatgaccaggtggagcgggcccggtctgtgagggagtcacaacgccaggtcactccaagctgcctctgtggccacacgtccagctgcccccacacaggcgagacccatgatcaagccccagggctggaaagcagacacaggggatgtatttgtttgtggaatcaaatacgacggcagcttgcaggcagcccagccgctgtgcaaacaaccctcttccagcacccagtgagggcgtccctgaagcagccggcgaccccgggcgctgtcacccgccaggtggggtatggggaccgtccctcaggcaagacagggtgcctgtgtactgagcgcctcgtgtgtcaggtgcaggtgcagacaggcaaaagtcctgccccacggagctgacctcggacgggagcccaggaacactgtgcaaacgtacgagaccgaggctgggaggtgtggtggttgggagaggcacgggtgggtgactggatggccactgaaaaggtgccatctgagcaaggcctgaaggagggcagctgggagccacgcaggcgtcggggggagcattccaggcactggggccagcagcgcaaaggccctgaactgcagccaggcacggtgggccagcagcaaggcggagcagagtgggtggtggaagggaggggagtttgtgtggtcttggaggccccacgaggacctcggctccgttcctggagagctgtgactggcctttaatgggttccatctggctgccgagtgcaaaatagacctgggatgggggtcaggggtagaagcaaagaaaccaggtacagaatctggcacaagtcacgcggtcagagagcaggtgctggagagatcccataactgtttgtggaatcaaacaggacagcagcttgcaggcagtctggctgccgctgtgcaaacaacccagggcgcccctgaaccagcccgtgacctcaggcaaacggcatccatcaccggggccggcacaccatcgcctgtgagaggcgtggtgagggctgctcccacgggcctgcgggaggacccggtgacagcaaggccaagccccctgcccaccaggacagtggcttttcttgataatttatcccttgaaaccccgtggacaattaaacccagagttaccaggtgagccagggattctactcctaggaatccaaccaagagaaatgaagacattcatccacacaaaagctaccgatacccacagctgcatggtccacgcaaaagctaccaatacccacatctgcatcacccacgcaaaagtcaccaatacccacatctgcatcatccacgcaaaaactaccaatacccacagctgcgtggtccacgcaaaaactaccaatacccacagctgcgtggtccacgcaaaaactaccaatacccacagctgcgtggtccacgcaaaagctaccaatacccacagctgcatggtccacgcaaaagctaccaatacccacagctgcatggtccacacaaaagctaccaatacccacagctgcatcatccacgcaaaagctacccatgcccacagctgcatcatccacgcaaaagtcaccaatacccacagctgcatcgtccacgcaaaagctaccaatacccacagctgcatggtccacgtaaaagctaccaatacccagagccgcatggtccacgcaaaagctaccaatacccacagct

SEQ ID NO: 16763 - DNA, 2300 bp, Homo sapien
gaagcagaggtggggctggccagaggtgcagacctagagcagccgggatgaggctggccttggggctccatgacccaggcagggcagaggtcaagttctcccacccgtgccctgaccccagatgggccccagggcctgtatccaggtgagggcttttgcacctacagtgctaaccccgagtcatgaccgagccctcagccaccagatcccccagtcccttgggggtgctcaggtgctctaagaatgtggcccggcaggctggggatggggaccgacagcacaggcaaaggaacgcccgggcagggctggacagggactgggcggggctggacaggggcctggagacactcgctgcggcccgccgtcagactggctccctgcatgacctgtggagtgactgtacctctcccggcgtcggagacggggaacgctccacggccctcgtgggtgttacagggacgcgacagtgcgtgtaagccccagcgctgttgtaggctctaagacccacccaggaaggctccacgaccctgtgagcaggagacacaggccacaggcaggcagtgcagcaagtgcgggccgggagagcagccccatggagacgccagcgccttcacctgtggcaccaataacaaggccctgctagtccctccatgctgggtctgaacacccgcgtggcacacacggcactggggcacgctgaagttgcttctggttcctccctgccagggaaggaaattcagagccacttaattcaagcaccatccttccaccctggcactgtgggaggctgaggatgaatcagaaaaccccaaagtcaacctgctaacggtgcagcagggaaggggggaggccagcggagagccccaagatggttccagaagctggcagggaaatgcctcacccacctcacaccctccctgccaccccagaggcggcagcggcgaggcccggccctccccactgcagccctgagggctgggatcttggggattagtgacccagcctgctggcagcatctccagatcctcgcgtagggagaaaaattaatttcttccagtcatgcagaaatgaaaatacgtggagccaaaccagagagatttcctggaggtggtaactgaattacgcagatagcgggcggcaggggaagagctcaggggggctcgggcggctggtgtgtggcttcgtagccccagagggttctggaaggcgatgtctggggaaagccctcccactcaccagccctggcttcacaggtggtgacagcacggccccagcaccacgaaccactcatgtgaacttcccttctcccctgtcactagaggatcccagcacatcccaggagagatggagcctgccggaagactgatcctgatgcgacactctcttccctccctgagccccaatctcgggtggaggccacatctgttcctcctgctctgggcgcttcttcctttctgtttccctttcagtgtggaagagtggccgcttgcccagcaggacggtcccaaatagcatggcttttccaggcacggtgctgtcggccgcacagaacaggaccctcccggcagctccggcttgcacagcatccgcctgtctggcccctgtggaagtatctgactcccaacgcccagactggagcgggggcaaaggacacagcccgaccccagaggcacacagagccagccctccacggaagaacgtgcccaggaactgtgggctgggccttcctgcctcctcccctgccgcgaaagcgatgccaggggcaggtgagggtcggacgcgctcaggcccagccctcgccccttcaggtctgggggacacagtggagtcccagcctcaagaagtttccccaacctctcagaaacttgaagggcaatgccaggtaccgaaaaaccggcccccgccccttatccccggccgacccgtccgccgaggtggctgccctgggaacctcctgttcctcgtccaggagaggaaacgcacacccgggccggacgcacagaagccgcaccctggctggggccacaagcctgacagctaccgacaagcccccacccacaggagcacgcgacgtgctctcttttcaagggaaaggtttttcttcctgggccctggaatgggcctgaagtcagccggcctcagcccacagggtgaatgaggggtgggcacagcccggccgcggccccagcacacacgggcggacgcaggggcgggggagcgccagccccgcagtgtgttcggagcccagcggctctgagtcgccgccaccagcctggccgccttctgctccacgtaagtga

SEQ ID NO: 16764 - DNA, 2300 bp, Homo sapien
gctgggtgagggcttccggcccaggtccaggccagcttctgctcccaggccctgtgggcagccacagctgccgcaggcattgtttagctcacaacccgactgacttcagggtggttcgctgctgaattctcccacctgcccccactcccacgtttatgttgctttgtaaaatctctgaaacctgggggcgttttaggattatcaccggcagaatgttttcctttcttagtggcacacaaaataatggtgcatcttaaaatccactgtgcctcagagtccatgaagccagggagccaggatggataaatttcgagcataaaatcggtaaccttaggcaacacacccaccgcatggggactcgcactgtactgtggggtgggctcagaactccccctccattccacaaggactgggctgagccacatgggcaagcaccatgttacgcacagtctgaaaacctccattccacaaggactgggctgagccacatgggcaagcaccatgttacgcacagtctgaaaaccaggagaatgaaggtgcttggcgtttgtgtcacaattttcacggagtctggctggcttcagacagcacttcccacagccaggagctggaggaactggctgggccacactgcggttagtgacccagctgaccagaccgctgcccaggggctgcaggaggacatggtgctgtcctccccctcacggagcccccgttctgggtttccgtccccttcctctgccagctcaggtgggtagagccaagtccatgagagggacgaggggtggggggaaaaggcccgcggcacaaagctggaatgggccatgtttcgcacgttgccatatttttatattggggattggggacctcggaccttcacatgcaaaatttatgcgaaatgagaggcaaaccaaggccctgctgctctgaaggtctggcctcttgtgtctcctaatggtgacccctgggccccccagccgcttgtgtctaaagtaagagcacgtgtgcgttggggcaggaaacagggaaaaggcgccaattttactaaaatgtactaagcaggcaaatgcgccagacacgccacaaagtactttagggaaaggcaaagcgggcgggggagggggcctgccggcagagaaagtgcggagagggcagagcagcggctcggggcgtttctgcaggtggacatgaaacgcacgatatgcaaatgaatgcaaagtgtatgcaaatgacctggccccgggacccgcgggaagcgagggcttcgcatcggacccgcccgggaggctgagcggggggagcgcgacccctgccggccacgcacggaggtggccccgggccgggccaggcgccgcgctgggggcgagcgcggggcagggggcgggggcggcggccgaaggagcgacctcccccccaactccccacctccccaccccccccacaccccccaactcccgttcagcctcccgcgcggccgccagaagccgcggttctaaagctgcgaggcccgcggccgccgactgctgcgaggtgggtgtgcgcggcctgcggagggggagagggtgggcgcaggcgggggccgccccccagagccgcgccccctccacggcgcccgcacccctcaacctcttcgctcgcccccgcctgcgcctccccgcgccgccccccgcaggaggcggcgcgcccgtcgccccctccccgcgcccctctcccctctccctgctcccggcgctccgcacagccccggcccccacggccagttcttagggcgccgccccggtggcggaggcgttgggggcggctctcggcggcggggagcccctctccaggccggcgccccggggcggagctgagcgccatgggcgccgggcgggaggcaggtggcgcagcggcggcggcggggggcaggaggcggaggcggagcgcgcggggcgggggccgcggggccccgtgagactctcgggcgagcgcgcggcgttggagccacaggcgcggcggctggacccggcgcgggccgcggaggccggagaccgccccgggcggggtgcgcgctttgttcccgcgcggggtggccggagccgagtccccggcatggcccaggcggccgccccgcgcgccccagccccgccgcgcgcctgagcccggtgcggcgccagaagacagcgcgcagccgcccctgagtcgtggaggcggggaccaagctggaaggagcagcgactcccggaccgagtcgcgagtgtgcgccgtccgccgcccgccggatcccccggaccccccgaccgtaagtgccgtgtccgccc

SEQ ID NO: 16765 - DNA, 2300 bp, Homo sapien
ctggccgcccagctctgaaagccacagccaacgtctgcttccccacaagcaccaactgcccggcctgggggagaggaggccggtagtggggaggtggggagtggtgcccacacccccaggtggccgccaaagttggggggcagctcctgcccccaacttgtgggcaactttcttctcttctctttccaaccccacctccgtcagaccccctgattagacaccaggcaagacggggccaggcggggagctcagggcctcattgcgaaagtggaagtgtcccatctgtggggggcgcaggtgcaggcctcgaacatctgcctcagggctgggggcagggctgcctgtctcctaccccgggtggggggagccaccaccctcacccagggtgctgtcctgctgcctcacggagtgggggctgtgccccctgagaccctcagttccccgactctgagactctcactgcacacagctggggaataggcactgacacagaccaaccccagccacatgctcacggtggccccggcccatgtggcggctcagagcctctgctgtctccactcccggaaacgctgtaggagctgacgccgttaggatcgtgcaccctgcacaaatgaggaaaccaggagggtcagggcccccaggaccctcactgtgaatcccaccctgagccagagcacagggaacagcaggggacgtggggaccgaatgatggcaccaggggatgggccccgggctggcaggaatgtcccctccagcctcagtcctgggggcagaacggccgaccacccagggcaggggaggccccgggtgggcctggcgtctgggaagttccccagcaggaacaaacacatccccactgtaagctggacacacacgctggcatgcagcttgttgtcaccaactcgagaaagacactcgactattgggacagggagacccgggacacctggagaccctgcggggaaggagtcggcttttactcctgcacggcttgaattattaactgcgtgcaaacgtgacctaaaactcaaatcaaatcaaatcaaaatagcacagatgcccgtgagccggccctgggtctgcgggctccacacctctggcctgtctgaggccgggaaacctccagccatggcatcagaaaagccaccgaaccagggctgcagggccgaagggtcactgtcccctcccaggaagctcctgccctctgacagttgtcagggagctttagaaagtggctttttttcccagcatctgggatgtgcctcactctctcagcccaacggccgctagaaaggggtcctaggactctccctagggtctaagtagtcccaagagtgctctgaggtggcttctggaatttcccagactggagaagccacctacccccgacccccgcaaactccaggctgctcaccggaggcggccgctggggcgtggggtgagggtctttctgaggcacccccggagagtgggggagccctgctgtctccacagagggccaggagccctgtgcacgaggccaagcagagagagagggtttccttcccagcaggcgggaggtactttgaggacaggtcaggtgcccaagaaccccggagcaggggctgaggagaggctggtcagaggccccgccttgctcaagggcacagtcagcagacacaggaacacgggcagggtggcccctggagcgggggcaaactaaaaggggtgctggggaaagctcggctgactgagggctagcggagagggaggacacccccagataccccaggctgaaggaagggccaagccctggggggaagatgggtgggcgggacaggccaagggctctgggccaggatggagctgccctcaggcctgcacacctgccctggggccgaggaaacacatgcccagtggccacgctgtagggctcagggtgggtgggacgtcaccagagctgcctgggaggaggaagttgttggaaggtcaaaccggaatggcccgagggaaggccgcgcagggcagggccccagatggttcctgtcagggaagtggcgggcgcagctgcaggcctccggccccggcattatcacggggacacagctggctgcctcacccgcaggctgcagggagaccttccccagcctgcagccccaggcccgccccgcgtcacatgagccccagggctcccaccccctccccagggcagaggacacccagttggtggccgggagggcctcggctttccagggacagaggcccaactccaggacgccccagctggcccagcccctcctctttccctcaaggctgca

SEQ ID NO: 16766 - DNA, 2300 bp, Homo sapien
aaccttcccttctcttccagatgagctgagaacaggcagcagctgcagaggaaggtgggctttgcccttctcccagctcctgcgcctcacatcacatgcacctgcagcggtcacagtgggcctcagacctcaggtcctgctgggtagccacagcgggccacagagccacctccgggacatgcaggaggagcgtccaggctgagggaacagccagggcttcggcggaggagctcccagaacatttcaggggcagcaagaaggcccgtgtggtggaacagagtgaacccagggaggcagcaggggccgggttccagggcaaggccacaaggtcagctgagtagcccaggcccctgacctccccaatcccagggttaggccgtacctcccagagcctcctccagcctggggcctgggaatgcccaatgcagaggaagacccaggggcctgaggtcagaggttgcagcctaaatgcaaactgtgaccaggagcagcctgggtggcacagagggggcgtggcctcgagggcgggatggggcagggcccagggtgggacctgtcagacacgggctgggaacaggtgaggggagtgacagccacagggcagatgccacaggcagctccccgttcactcccgcagctcccagccatgccctgggggttaactccccgttcactcccgcagctcccagccatgccctgggggtcggctccagccctgtgttcctgccgcagggcaccgggaagacgacgaggttctggggagcagggtggccgcaggagccccagccacgcaatctgaggttctggggtgtccagggtattgaggcatctcagggccgagtctcgcggtccgtcccggagggtgttccttgcttgtccattgtggggcattccagggctttctgaagctgaggttgtccttggttggataaaaaaaaagttaacgctgtgaagagcattgcggtgcctgaaaatgcccagaagaggcttctgccaccaggcgaccagtggccagggtcggccgccttcaggcgagcgggtgtgagggggctggtgacccagatgcaacctgtcctggcccgaggacccagcgcatggaggggcagggagccatcctggaggggcctcactcagtcctccagcacctgcccgcccttctccctgcaccgcaccgtccacgagtcacagggagacgggccccccagcacccgcccggccttctccctgcactgcactatttgcaaggctcggggagatgggccccccagcacccgcccggccttctctctgcactgcaccatccgcgaggtgtggggagacgggcttgggttgtcttctagggtgacgtggtggccgttggtggccgtcagggcagggtggccactcccttggctcttcctggctcctcgcccaccttgcggagggagcagcctcatcctcagggctcggacaccagctccacctcgcggcgccaggtcactccatgcaggaagaggagctggaggctatgaccgccggctctgtccccaacacctcgtctccccgatgcccgggagttgtcacctgcgtctccagggtcagaggtcatgcataaccaacatggggctcttcaagcaagggaggcgacagagacagcggggtcagcacagagcaagtgccggcaaccgctctctagcaggagcctggccgaggctctgttccaccccgtcctcagcctgaggctggcctttcacgtccagttgggatgccctctggccctcagacgtaggtcaggactcccggactgtgcccatggcaggcaacaacccccggggtcatcccgccagactctcggccagccctgctgtcttgccagccgccgtgtccgcacaggagccagggttggcactcgatgaataaacgcctttcaagagaagaaacgcagggagctgggtgtggtcaccgtggcagaccgttgggggaggcggggggctgggcaggggacagggtggccggggctggcgtgtgtcccaggggacctggcaggggaaggtacgcccaatcaggaggctcctcgatgtgacgtggatccgtgtttcctcttcttcttcctggtggtttacgtaagagggagagcaatggggacgggcagggacagagctgcgggctgaggttcctccgttcggcgaagccccttctctctgcccccgcctgctctgggctttcttggctatgtctgctcctgacaggagggatgtgtgttgccaggggtgggggcttggcgtgtgtgcgtgtgagaatatgtgtgtgtgtttaaaata

SEQ ID NO: 16767 - DNA, 2300 bp, Homo sapien
ctctgccctcccttcctgaaactaccgtatttagcatattggatgcctgcctgagcccactgatttttttatctttcctctcctgtttttcatctctcggtctttctgttctatttctaggagacgtcctttagcccttcccttagggtttttactcaggctgttgtattctgacccctccagcccccctttatgttactggaacgctctttctcggggcatctcgctctggactcatgggggctgtcgcttcccttgtctccctgagggtattaacagggggtggttttgggggtctcttcactctgcacagcctggctgcctgcagttgttctgctggttgtttcagcccacgtctctctggctagaggctgtcctccaatgtctgctaatccctgactgctcctgcttcccacctgccactatgatgctgaccagagccgaggcacagatgggacccctgctcataggatgactgggccatttctcggagactgcaccctccccccactgccaccctcacagagccatggccaaggaccacgggagctgtcaccctgtcccaagtcctgtctctaggtgggtgacgcagcctgagctcttcaacttcccagggatagaaatttgcgcacacacgtcctggggctgaatcctgatgttagacgccctccttactcttcctactgccctcgtcggaaacaccattcagcctgctgagtcctggaagcagacagaattctgacaccagatcaagcctgtcccagtggcagagggttggacttgctttttctgcatgatacctagcagggtggcaaccagaggcactagaagtttgggtttgttctcccacgctctgtgttacaaacttcccccagatccagctccttcctcccaggaaaaccatcctcgggctcctgaagtgccctttcctgagctttccaaggacacaactgctgccccagcaatcatcacaagagaggaagatgggcatggaaaataatacacttacaaaaaaactgtgcaaggttctgcagataatttttttttttttttgagacagtctcactctgctgcccaggctggagtgcagtggcgcaatctcagctcactgcagtcgccacctcccaggctcaagagattctcctgcctcagcctcccgagtaactgggattacaggcacctgccaccactcccggctaatttttgtatttttaggagagacagggtttcaccatgttggtcaggctggtcttgaactcctgacctcgtgatctgcctacctcggcctcccaaagtgctgggattacaggcgtgagccatcacaccaggacggttctgcagataatttgtactactgtttgccagtacatgtctttgtgttattagtattcattttaggggaaaaaccctcaaatttcagccaactggactttgtgtttggctttaaatgttttccgccactgtccatccaacagtctcgcttcatattcgtatcctggttcccaagtcccttcgaggagagattctcaaatgcggtccgtttaaaatcacccaagaaatacaaaaattagacaggcatgatggcgggcgcctgtagtcccagctaattgggaggttgaggcaggagaatcacttgaacccgggaggcggaggttgcggtgagccgagatcacaccactgcactctagtctgggcgacagagcgagactccatctcaaaataataataataataagaaaaagtaacaacaataataataataataaaatcacccaggagctcagcgtgcagacccccagccgcaaagcccagagagccccttttgggaggacggggcgaggcccagcaatccgcgttgggagtggtcccgcgcgccgttctgatctgggcagccctgggctagcggagaccacggcgccttgcctcggccacggctcacgagacgcccgcggccccgaccccgccacgacgggacgggcgggacaggggaacacgcgcgcccggaacccgccgccacggcgccgcgccggggggacgcgcttgggcgacggacgcgccgcgccggggaagctgttgggcgccggaactggtccggcccgactcacgaccccgcgggacccggccggaacccggcccgaccccggcgcgcgcgcggcggaggacgaggaagagttgtggcgaggcagatcctgccccgtggccgcggccgtctcgtaggtgcgggcggcggggcccacgggaccgcggcggggtcggccgggcgcagagctctcgggggcgcgggctccggcgcccgcccc

SEQ ID NO: 16768 - DNA, 2300 bp, Homo sapien
gacaccctgcgggatccggaggaatagaagtcagcggcgggtctgcaacggcggcaagcagcagtggtggacggcgagcgaaagctcaacttgagccgtaactaccacggaccagaagagagtgtagttgcaagatttaatagagtgaaaacagagctcccatacaaagggaggggacccagagagggcagccgttgccaggtttatatcccgatcattgtccctcctgctgtgctctgaggagatagatgattggctattgtttacctcctgttttagcctaattagcattttagtgagctcgctttactacctgactggtcgggtgtgagctaagttgcaagccccctgcttaaaggtggatgtggtcaccttcccagctaggcttagggattcttagtcggcctaggaaatccagctagtcctgtctctcagatggacatttggatagtggacgtatgtccatggatatttggatagcagacgtgcgtgggtggacatttggagagtggacacacgtggttgtgtggctgcaggtactcactgtagtgtatttatccggaagatgtgcacgttgctcctgacccctgggtggtgagattgcggtggtttttcttttcctggtttttttttttttttttttggcctgtctatattttatgctgaacatcattattttataataacctttaagtaatattttccaaaaaaaagaggcccattttcatgcatcagaatctgctggcccaaaatcagaaacgcatctgccccatgcccttccacagggagcagagcggggggctgcagcgtgcaggcgggatgggctccttgagggatgctggaaggggcaatgttggcctgcagcctctccgcctcatggcctgatcctgtgggtcccagaggccctggagcatgtgctgctgtgaggcaggtgtgctaggtgtgtggcagttccgcacgtttgcaaagtgaaggctccgtgagcccctagagcagaggccagtgccccacgcagcatctcataggcttcccaaggtaccctgggaggcaccttcgtgggctggacatcagcagaggacccagggctggggccctagaagcctctctgtgacaggacgtggtcagcacatcaaacactccctcccaatttatcttttttatacatccccattagcgcatgctgatctggggaaacagcctgtccatgacttcccttcaaatgcagaattacaggaaccggacttgagcaggtcttgctctgagcatccctccagtgccctctgaatgccccgaccccaatccgactcacgctgcagttgttttatttatttagttagttatttttgagacggagtctcgctctgtcgcccagtctgcagtgcagtggcacgatctcagctcactgcaacctctgcctctcgggttcaagcaattctcctgcctcagcctcccaagtagctgggattacaggcgcccgccaccacgcccggctaatttttgtatttttagtaaagacagggttttgccatgttggccaggctggtctcgagctcctggcctcaggtgatccgcccgcctcggcctcccacagtgctgggattgcaggcgtcagccactgcgtctggccggttcttgtatttttaaattcaggtaaaagctgaagacgttttcttctttgaaagcacaggaaccacagccctgtggattttgcgagtcgcggggctcccggagccgctgggagggcagccgtgtgagatgcggggctgcgagcgtggaaacactcgcagtcgccagtgctgaggcatgtttcagccggggcggaatcacatgcattaattattgtacagagatgtctttagtagaaaatgattttgaaattcagtttaatttcattgtaatgtgctgcaaacaggaagggagtatgtgtgtttaattggctctcgggggtaaggcctggaagccgcatgtctttgtcacaggccattagcgatgctgctgcataatgagagcctgcaatcagctcacagctgccgctcctgccgggagagcatgatattaaatagaaatcaggagaaattaaacttaaccctttccctggccagcccctcctgccacacggattctggcataagccggcgggcacaggggacagccagggatggctggacacagctgaggatggccgaggccggcctgcagctccccaacggcctcctccgggtcaggatgagaggagaggttgccagctttgatgccagccgctcctgcctcccccacctgcctctgtgcctacagcccgc

SEQ ID NO: 16769 - DNA, 2300 bp, Homo sapien
tccacagagtgagtgagggaggagggaggggtcacagagtgagtgagggaggagggaggggccacagtgtgagtgagggaggagggaggggtcacagagtgagcaagggggggaggggccacagagtgagcgggggaggggccacagagtgagtgagggaggagggaggggtcacagagtgagtgagggaggagggaggggtcacagagtgagtgagggaggagggaggggtcacagagtgagtgagggaggagggagggtccacagagtgagtgagggaggagggaggggtcacagagtgagcggggggggggggaggggccacagagcgaggagggggtgggaggagccacagagcgatgggagagggaggtgccacgcactctcaaacatgcaggtcttgtgagaactcactcactagcacgagaacagcaaggggaaaatccacccctgtgatgcagtcacctcccaccaggtcgctcctccaacagcggggatcacaattcaacatgagatttgggtggggacacagatccaaaccatatcgttcctccctggcccctcccaaatcttacgtcctttttacattgcaaaatacaatcctacttcccaacagtcccccaagtcttcactcatttcagcattaattcagaagtccacagtccaaagtctcgtctgagacaaggcaagtccttttcacctatgagcctgtaaaatcaaagacaagttacttcccagatacagtgggggtgcaggcattgggtaaatacaccagtgccaaaagagagccgccagccaaaacaaaggggctgcgagccccaggcaggtccaaaacctagcaaggcagtcactgaattgttttttggtttcttcttttttggtttttttttttttttttttttgagacggggtcttgctctgatgcccaggctggagtgcagtggcatgatctcagcttactatagcctctgcctgcaagcaattctcctacctcagcctccctaagtagctgggactataggcatgcaccaccacacccagctaatttttgtattttttagtagagatggggttttgccatgttgtccaggctggtctcgaactcctgacctcaagtgatccacctgcctcagattcccaaaatgctggaattacaggcgtgagcaaccccacccagcccaataaatcttaaagccccaaaataatctcctaagacccatgtctcacatccaggctacactgatgcatggaggtggctcccaaggccatgggtatctctgctcctgtggctctgtagggtacagcccccatgctgctttcataggctgctgttgtgtgcctgcaacttttctaggtgcaccacacagtgcaagctgtcggtgggttattctggggtctggagaacggtggccctcttctcacagctgcagtagccagggccccactggggactctgtgtgggggctccaaccccatctttctcctcttcactgccctggagcagtggcctgagctctatctggagcccttttagccccagagcaacagggatgcaggggccagtgtccctcagggcagtggcccacaaaaccattcttccctccgaggcctccaggcctatgatgagaggcacttccatgaaggtctctgacacgcctagagacattttcctcattgtcttggcgattaatattcagctcctctttacttacgcacatttctgcagccagcttgaattcctccccagaaaattgtttgtttgtttgttttctaccatgtgatcaggctgcaaattttccaaattttatgctctgcttaccttttaaatctaagttccggtttcaggtcatctctttgctcatgcttaacaaaagcaatctttgctccagttcccaataagttcctcatctccctccgagtctacctcagcctggacttcattgtccatatcgctattagcattttagtcacaacaatttaacaagtctttaggaagttccaaactttccctcatcttcctgtcttcttccgagctctccaaatcgttccagcctctgcctgttacccagttccaaagctgcttccacatttccagatgtcttaacagcagtgccccacttccctgtaccagttttctgtgttagtccagtcttgcattgctataaatgaagccagatttttctcagccactttgccaaccggggacctccgtggctggtgacacccccaacccaggcctgccacagaaggcacccacacactcgacccactgggccatgcttggcttatgcactggctca

SEQ ID NO: 16770 - DNA, 2300 bp, Homo sapien
acacacaccacacactgccctcccacctggactctgtcccagcggcaccagggtcaggagcaggagcctcaggacccacgcagcaccaggcacagcacggagtgaggcagtgggcggtgtggcaagcgctgtgtgcaccactaacctggaggagccacggctcccggaccctcgtgtcaaagctgccggcctcctttgctgggagcctgagaggaggtcctggtgcagaacagcagcttgttgccagccacagtgagaaggtggtgagtgtgccagccactgagttaaccatcagtaacaggaggcgtgtgcagacaggtgtggaccacaggtatgtatgtcacatgcctgcatacgtcacatgtatgtgtatctcacacgcctgcatacaccacaggtatgtatgtcacacgcctgcatatgtcacatgtatgtgtctcacgcctgcataagtcacatgcatgtgtgtctcacgcctgcatacaccacaggtatgtatgtctcacgcctgcatgtcacatgtatgtatctcacacgcctgcatgtcacatgtatgtgtatctcacatgcctgcatatgtcacatgtatgtgtatctcacacgcctgcatacaccacaggtatgtatgtctcacgcctgcatatgtcacatgtatgtgtgtctcacacgcctgcataagtcacatgcatgtgtgtctcacacgcctgcatacaccacaggtatgtaagtcacacgcctgcatgtcacatgtgtctcacacgcctacatgtgtcacatgtatgtgtatctcacacgcctgcatacaccacagggatgtatgtctcacgcctgcatatgtcacatgtatgtgtatctcacatgcctgcatgtcacatgtatgtgtctcacacgcctgcatacaccacaggtatgcatgtctcacgcctgcatatgtcacatgtatgtgtatctcacacgcctgcatgtcacacgtatatgtcacacgcctgcatatgtcacatgtatgtgtatcacacacctgcatacaccacaggtatgtatgtcacgcctgcatatgtcacatgtatgtgtgtctcacacgcctgcatatgtcacatgtatgtgtctcacacgcctgcataagtcacatgtatgtgtctcacacctgcatacaccacaggtatgtatgtctcacgcctgcatatgtcacatgtatgtgtatctcacacgcctgcatatgtcacatgtatgtgtatctcacacgcctgcatacaccacaggtatgtatgtctcacgcctgcatatgtcacatgtatgtgtatctcacacgcctgcatacaccacaggtatgtatgtctcacacacgcctgcatatatcacatgtatatgtgtcacacatgcctgcatacaccacatgtatgtcacacacatctgcatatatcacttgtatgtgtctcacacacctgcatacacatatatgcctcacacgcctgcatctatcatgtgtgtgtctcacacacctgcatatatcacatgtatgtgtctcacagctgcatacaccacaggtatgtgtctcacacacgcctgcatatatcacatgtatgtgtatctcacacgcctgcatatgtcacatgtatgtgtatctcacacgcctgcgtatatcacatgtatgtgtgtgtcacacacacacctgcatacatacaggcacatggacacctgtgtgcacaccagtccctcccttccccgtcaccatcaggttcagccgggcctgtggtcactgcttccccgaggcagctgcaatggggccccggctccccctacatggtgcgtctgatcaggttgggactcgctcaggtagctctcatcacaaggtccttgtgcactgttgcggctgctcttggtggcccttctagagccttcctgagccagagcagactcctgctccccccagaccccctgggagtcgattctgtccccttcttcctggccgcaggtcggtgcagccgctttcctgcctggaagagtaaagtggaccctgtgtgaaaacattgacgacgtggcaaatgagcagcaaattgatcaatacgaatgatcacgccccatgtgcatctcctcagcagccacaagagagacgaggtcactggaggataaacatccgtgactgcacctcatgatccatcacgcacgacggccgcagcatctcctgccagctgccggcacagacaagagcacgggatggacgaccgcggtagcaacgtggggctcatctgcctctctctgagcaggaagcccgtaggtccccacaggcgggtgcacggaag

SEQ ID NO: 16771 - DNA, 2300 bp, Homo sapien
cttgttgcccagcctggagagcagtggcacaatcccggggtgtggctgctcagcctggaatcctggccctggggaaggctccggatctgtcccatggtttttgaaccatcctgggtgcaggcctctttctgggcctcccctggtccaagtccactctgtctggagaaggagaaagaggataacaggaatggctgggccctggagccctgatcccccaggacggcccagcctttcttcccagccctgacggccgcagagccctgcctgtgggccaggcctggaggggtcatcggaggggtcgctgaacagcctctctcccaccagcagctggagacggagattaaacgcggggagactggcagcgtcagctaaattgattctattacagcgactgatttaatctgaatggtcgttactgtgatttatacggctgcttgggattctttgctcccaaatttgtctcccgtccacttgatattgattgaaagacgatggaggaggtggggaggggcggggctgcctgagctgactcagggacccctaaccccttcctctctgccccgattgcaggggtgccaagcacagctgtgctgggaagagcaggaggcagcggagaggacctggtgccctccgtgtccagcacacgccccctggcctctgccctccctcccacccagctctggcccagaagcgcctgccaccaggcggcccatccttccagaagcttctagcagatgggaccgtcatctcccagccgtggccctggccggcccccccaaagggcagggtgtggaatgacccagggcaatgctgggctcctccgatgacgaagccggaagctcaaagggtctctctgaggactgggggccttaccccaagtttcttcatgtccagggatcagaactgagagctgccagctcctgaggcagccctgccctccacaggtgccaaccaccacccaggagacgggatggtaggaacagtaagatggtggtcaggaggcagccaccctggcctcctccagtctgggcaccacccagctccaagagccaggctgggtggccagggcactgccactgtcccatggcacaggctaccttcagggacactggggatgaggcagcccctggactatagatgcagccggggtccctttaactcccatccctaccccgtgcccttctccctacccagaagctcctgtccttgcaaaggacagcacccccgcccgccctccctgggcagccagcagttctcactgccctctccggggtgctcagtgcctgtggctgacggggaggacaggttttgggggcactgccctgtgctccccatgcccaccctaccatgggcccagcatgctcaggaggaccccgtcacacgaccttccttccagggccccagagcatgcggagcccctcctcccctctgcggccccttcctgctccctcttccaccctcctccctccctcctgtcacagtgttgggttatggggataaaggacagaggcctggggcactgagggagggacagagacacccacgcagcgggggagaggacagacgtccggaactgggtagagatgggccgtgggtgggatttgctggggacagagacctatgcagtggaggagaggacagacgtccggaactgggtagagatgggccgtgggtgggatctgctggggacacagacccacgcagcaggggagaggacagacgtccggaactgggtagagacgggcctgccgtgggtgggatctgctggggacacagacccacgcagcaggggagaggacagacgtccggaactgggtagagatgggccgtgggtgggatctgctggggacacagacccacgcagcaggggagaggacagacgtccggaactgggtagagacgggcctgccgtgggtgggatctgctggggacacagacccacgcagcaggggagaggacagacgtccggaactgggtagagacgggcctgccgtgggtgggatctgctggggacacagacccacgcagcaggggagaggacagacgtccggaactgggtagagatgggccgtgggtgggatttgctggggacagagacctatgcagtggaggagaggacagacgtccggaactgggtagagatgggcctgccgtgggtgcgatctgctggggacacagacccacgcagcaggggagaggacagacgtccggaactgggtagagatgggccgtgggtgggatctgctggggacacagacccacgcagcaggggagaggacagacgtccggaactgggtaga

SEQ ID NO: 16772 - DNA, 2300 bp, Homo sapien
cgtctccaggtccaccaggaaagggaagggctcttctagggctgatggtcctgcagccgaaaatgtacccctgcccccactgcacaggacctccagactcagggtacccagcccttccctgccacctacctctgacacaaggagaaactgaggcacgggggagaacctccagcccaaggctccgagctgggactggacccaggctcctgcctcctgaccttcctgctgccctgggagcatgtggagcggggtccctcgcgggggcacctgcccctgggggatagcccgccagccagggagcacaccctcccgcagtggttaagccggctgcttccctggccccgccctgcatttggggctcacccaggacctggcccagcttagcctttcccttagagacccccacatcccatggaggagggatttggcctccgtttctccccgaggtgggtgggaggcaggtggctgaagcgaggtgggtgcagggtggaagcggagaggagctggggttggcagaccgcagcctccccagacctctttctggggggagggcgagcacttctacctcacccctgcactagtcccgtgaggatgaaaaccaaaagcactcagagggcttctccacccctattttgaggtcactgaccacagaggcaggatggtggtccccaacaggctacaccccagccccagaggcctcccagtctggagatggactccctgccctctctcatcttggagcagtgagcgctagggacagtcctggcctgagcctcccgggcagcctggcctcctttcaagcaggccaagtgcacagatgctgcctgcacctgcacagccacccgccgtcgacaggagagcagaggtaccgggtctgctcccatcacagagaggaacgggctccccggcccggccctgggctggtcggcaacccccactccccaccctgcctgctcaaaagaaaggatcctcctgcctccagccccctccaccccctctccaggaccttcctgaccgtgcgctgggcctgtgcaggtgttgagccacacccacaccatcccagggggcggggtctcgaaggggagaacaggtgccacagtcaacaggagggagggcttctggccgaggtggcaaggaggctccaggaggcggcagcgttgaccttgggtgttgagggatgatgagaaggagttctgtaggaaggaaggtgctccaggcagggggcctcggggaacaaggggatgctggaggaggtgcgtggactgggggaattgggggtgtcctacgagccacgctggtatcagaggcgtgtgaaccagagcagttccatactgaataagagctgggcaaaatgaggtcgcgaggaggtgcgtggaaggcgggcctagcgttcagtgggatgcggggaggcgcaggagacgcagccagagaggcgaggggcccaaggaagtgctcaagaggtgtcccccggcagggactacaatgcagattccctggagcaggggcgagccgggcccaaggagcaggaaatgaagaagccaggaatcccagctggtccctgacccggacgcacccaccctgccttccccacagcctggcctctggctctgctcccaacgcagcaagccggggtatctccgacctagccctggccctgcccgccggaaccccgcaaaagctatcactcagccctcggccccgccccggccccaccccggccccaccccgcactctcacaaggtgtcactcagccctcggccccgccccgcccgccccatcctcctctggctccgccccaccagcctcgtgcggtcaccgccccgccggcgcacctgcgctgtcactcagccctcggccccggccccgccccgcctgccccactcgcacacgggctatcactcagcctgcgccccgccctagctcgccagaggctccgccccacccgcctgccaacacgctgtcactcagccttagccctgcccaggccggccctcggcccgtcagaggcctccttcgtgctgtcactcagcccttgccccgccccctccccgcccccctcacacgtgctgtctctgtctctggccctggcccgccccgcgcacttgcgctgtcactcagcctggacgcgcttcttcgggtcgcgggtgcactccggcccggctcccgcctcggccccgatggacgccgcgttcctcctcgtcctcgggctgttggcccaggtaaggcatcggcacctgcgggggtccccgctgcctccctcgacgctgcgggacagtgtcttcaactgcagccgcacaggt

SEQ ID NO: 16773 - DNA, 2300 bp, Homo sapien
gcgtgggtaccagcgcaggtgctggggttcatttcttaggcctgtgtcatggctatgacccttggccggctggggtgggggctgtgtctatgacgccaccaaggccctgggtgtccccggggtccctcggaataggaggtggaaacgggtcggacaagagctggccgtgggggaagagcaatggtgtgcggaggtgggggaggccctatctagggacaagcagaaaacttagggtgggcagatccccccgacccctgtgcaggggctgccggagaccagagaggctgctgtgtgacctggaccaagccccttgccctctcatgcctcagtttccccttctctccacggagggattgagcaggacatggagggccccttccagtagccattctgggactccctgcacctgtccccaggggagggtcctgagctggcctccacgtggctgctgttccccatagtggaaccttgtgtgtggagacggctggaaggtcccgctggagcaggtgagccacctcctgggctggctgctgggctgtgtcatcctgggagcaggctgtgaccggtgaggccccttcccttttcctgctgcccagcagccctcccctccgcccactctcagggttcagctagacctggtgctgccaggatgaaggttggaccctgggttatcctgaccctgtccaagcatgtcccccgctgcccaccaggtttggacgccgggcagtttttgtggcctccctggtgctgaccacaggcctgggggccagtgaggccctggctgccagcttccctaccctgctggtcctgcgcctactccacgggggcacattggcaggggccctcctcgccctgtatctggctcgtgagtaccctgggggctgctgtcactgggggaggggcagtgggtggcccgcaggcctctgaggctcccttgccgagggccccgagctgcagggacagtgagcagtgagtcccttgggcatcccgctcctgggcaggtcaccaataggtccccgcagttcccaatggaactgttccagtcctccccgaggcctccacttcaacctgtctgtgtctgcccaggcctggagttgtgtgaccctccccaccgcctggccttctccatgggggctggccttttctcggtggtgggcaccctgctgctgcccggcctggctgcgcttgtgcaggactggcgtcttctgcaggggctgggtgccctgatgagtggactcttgctgctcttttgggggtaagtgtggtgggagctgggccagcagccctcatcggggctgactatgtagcttccctctgcaccgacgtatcccatgccaggtaaacgcatgggttacagggtcacagagaactacagtgatgtcctgcccctgagcctgggggtggggtgggggccctggcctttgcctctccttccaggaggaggtggagggagccgtgggcatcctcaccaacgctgcaggttcccggccctgttccccgagtctccctgctggctgctggccacaggtcaggtagctcgagccaggaagatcctgtggcgctttgcagaagccagtggcgtgggccccggggacagttccttggaggagaactccctggctacaggtcaggcgcctaccagggaggagggagattcaggtactggaggagggcttcggagaggcacagctcctcacccccctcccctcacatctctgcggctacagagctgaccatgctgtctgcacggagcccccagccccggtaccactccccactggggcttctgcgtacccgagtcacctggagaaacgggcttatcttgggcttcagctcgtgagtcgaggaagggctggggtcctgcaccatcccccggggtgggcatatggtccccagagtccccggctctggctgggcccatagatttgctctctctcccaggctggttggtggaggcatcagagctagcttccgccgcagcctggcacctcaggtgccgaccttctacctgccctacttcctggaggccggcctggaggcggcagccttggtcttcctgctcctgacggcagattgctgtggacgccgccccgtgctgctgctgggcaccatggtcacaggcctggcatccctgctgctcctcgctggggcccagtgtgagcttggggccccgcaggccatacaggagccattgtgtttgggccgacggtctgccacaccagggggccatagtgccgacaggggagcagcctggggtggcagcccaaggccagctgctgtttgttttcctctgatccttg

SEQ ID NO: 16774 - DNA, 2300 bp, Homo sapien
cctgctggtgccaaagtcaaattttaatacattcagttacttaaaacatatccgtgcggtggctcacgcctgtaatctcagcagtctgggaggctgaggcaggaggatcacgaggtcaagagatagataccatcctggctaacatggtgaaaccccatctctactaaaaatacaaaaattagctgggcttggtggcacgtgcctgtaatcccagctactctggaggctgaggcaggagaatcgcttgaacctgggaggcggaggttgcggtgagccaagattgtgcccctgcactccagcctggtcgacagagcaagacttcgtctcaaaaaaacaaaacaaaacaaaattaaaagaaaaaaaaacatatcccaagggcaggcacggtggctgcagtggctcacgtctgtaatcccaccactttgggaggccgaggcgggtggatcacctgaagtgagaagtttgagaccagcctggccaacatggtgaaactccgtctctactaaaaattacaaggtgggcacctgtaatcccagctacttgggaggctgaggcaggagaatagctggaacctgggaggcggaggttgcagtgagccaagatcgtgccactgcactccagcctggacgacagagggagactccgtatcaaaattaataaataataaataaaacacatcccaaacactcatagtgttgaaccatttagcatgtggttgctttgtatacttcgtgaaattgtgtccaatctctgctagccatagataagataaatcctggggctctaaagactgcaagccgttgctgcccttcagagctttgtgactcagacacctgtcaggctgctgagaaacgtgatctagtcacgtcagccctccccctgtctgatctccttcttctctgggagttctctgcgcgccccccgcccacgctcatttttttctcttttctgagtagtgacccccaattcgaagcctgtgggtaatctcatggtgcgtgagactccctcaccctccaacctgtcaaagcttgtgcgccaccgccacctcctgggcacatcttgtttcttaatcagccacgaaatcacgtgaacacttcacatgtggttttgttttgtttttcacatttagactcctgatccgtttggagtttatccctgtgagatccagaattaatttcatcatttctcagacggctaaccatttgtcttagcacctttcattataaactgcatgtttgttccaccgctctgaaattatgtttatgaaccaaatttccatgttactgggttgatgtctggatattccatttgtttcctgttcatgtgtcactagcacacagttttaatgacagaggctgttttcgcatctgtcgggcattgcgcttttgtttgtccgcgtcgtctgcgttatgagacatttgttcctccatgtgaactccaggatcaatatgcctggttccaaaaaaaaaaccttttcgtattgttactggaatcatgtgacatttctgaatgaaccttgggagaacccctggtatcagtgctattttgcaacgtagtataggtggtcttggctcctacggtacattagaaaagtaacagaaacgcatatttgaagcgaaaaatagatgaacatttacagaaaaaaaaaataccacattgaaaatgcagtggaatcaactgttaaaagttcggcgtgatgttcagacagataaaaaggaacggggccagtgactccctgcagagatcgagagaagaccgagcactcccagcacccgcgggcttctcgctgtgaccgaaccgcgggccgcgctcgcgacgagcacttcctggctgtacccgcccaaccgcgccctcctggtctgttccggctccgcagttgcgtccagaggcctgatccttacgtccgcctggtcctccgggcctgtctctgcctccagcccggttcccaagggcgccccggggccctcccgcaccctcgcggaagaaactactacctccccgcaccataggccaaagcttcggcccggaggctggaggcggaagtgacgccaaagacgcgccggcccctcttccggcgccggccccgcctccgcctgtcttacagctgatccggttcttgcggcggtgcgtgctggcgccggagagttccgcgcgtgtcctcgggctgtccgcggggaagctggtccgggagtgggcgcccgcccgcctgcctcgcgccttgcgcccccggcaccgcttccagaagggaaagtcgccgccgctcgcggtagacccgggcagcgcttccattccgcggagct

SEQ ID NO: 16775 - DNA, 2300 bp, Homo sapien
tgccaagtgtggatcagtgcacattcagggtgcaggacaagcttcttaggcacttggtggaaaggacccagcagacccactgacacagcgtccatggtaaacaggatgccgctggatgcctctggcaagcactgataagactcagagcacaaccctctgggatttcagagtaaatctacaccctctaaacggtcatctatgcagctgaccacttaccttttcagaaataggctggggcttggaaccaggacagagtagagaaggaacagctaacatgggacatgaggtgactaaggctgaactcagccatctgagacctcgtggacccaaaggcagaaggtgcttactatccgccctttgccaacctctcctctgaattcaattacaagttcataggaagcagcaagaaatggaggaatatttaaacgtatcacgagaaaacaacaccaaagtcaatatgatagagaaaccacaggggttgttctaggtgaaaagacataaacgatgggaacagataaaccttgaagggctcttagtccccaaaatacccaacagcgcaatgttggaaaaatgttgagaatcctagatattacacaaagtagacagtggatgacctccttcttatttttttatttttttatttttttgagacggagtcttgctctgtcgcccaggctggagtgcaatggcacgatcttggctcaccgcaacctgtgccacccaggttcaagcgattctcctgcctcagcctcccgactagctgggattacaggcatgcgccaccatgcaaggctaattttgtacttttagtagagacgggatttctccatgttagtcaggctggtcttgaactcccgacctcagatgatccacccgcctcggcctcccaaagtgctaggattacaggcgtgagccactgtgcccagcggaccttattatttttaattattattattattttttgagacggagtctcgctctgtcgcccaggctggagtgcagtggcgccatctcggctcactgcaagctccgcctcccgggttcacgccattctcctgcctcagcctccagagtagctgggactacaggagcccgccaccacgcccggctaattttttgtatttttagtagagatggggtttcaccgtgttagccaggatggtgtcggtctcctgacctcgtgatccacccgcctcggcctcccaaagtgctgggattacaggcgtgagccaccgcgcccggcctaattttaattttcttagatgaaatactaatattgtggtttcagtaggataatgtccttacccttaacagacgctttaccaagtatttaaaggttaagtatcatgtgtgcagtttaatttcaacttacttacactcaaataataattcaccgtaaggtttatttattgggggagagagaaaacatggcccaaagctaaaaaggagtaaaacgattgcagtggatattccttgtagcagatgttcacatttttattagattcagattttctaaagcaaaacgtgagaaaaaatacagttagtcgaaacacactgttcaccgtggattcgattactccaagaccagcgggacaacggccgcatccctcccgccccgagggccgggcctggaagtcccggcggcgagggacgcgcgctcccgctggcccccacgggctaactttcacagggagctgcacgcccggggcgctcaggggtctaccttacgcttcggtcccaacacaatgtgccagaaacaaataaaaaacgtcaaagccgaagccagattctcacagaaacacgccctgttcaaagtgaaggaagcaaagggcccctctctcaccagctccgcggaatggaagcgctgcccgggtctaccgcgagcggcggcgactttcccttctggaagcggtgccgggggcgcaaggcgcgaggcaggcgggcgggcgcccactcccggaccagcttccccgcggacagcccgaggacacgcgcggaactctccggcgccagcacgcaccgccgcaagaaccggatcagctgtaagacaggcggaggcggggccggcgccggaagaggggccggcgcgtctttggcgtcacttccgcctccagcctccgggccgaagctttggcctatggtgcggggaggtagtagtttcttccgcgagggtgcgggagggccccggggcgcccttgggaaccgggctggaggcagagacaggcccggaggaccaggcggacgtaaggatcaggcctctggacgcaactgcggagccggaacagaccaggagggcgcgg

SEQ ID NO: 16776 - DNA, 2300 bp, Homo sapien
tatgttttttgtggccatcagggcagcagctgcttggtgactgtttctgtggtgttgaatccccacggtataaaggtaatctacaacgaggtgaacaataaatcctggatggacagacccgtgcaccttcatattacgtgtttgaaatcctggatggacagacccgtccaccttcatgtcacgtgtttgaaattctggatggacagacccatgcaccttcatgttacgtgtttaaaattctggatggacagacccgtgcaccttcctgtcacatgtttgaaatcctggatggacagacctgtgcaccttcatgtcacgtgtttgaaattctggatggacagagccatgcaccttcatgttacgtgtttgttgtggagaggagtgggttgtgccatgtttctcttgtgggattgagtgtggctatttagctcatctgttgccacctttaattgttggcattgacactaaaggtcatcagattagcgggaaccagcttgtggggttgtagcggctcctggactggtctcaggtgacatcctgattggctgaaataagtcctgcaggtctctgctagaactgactcacagttgcctgagtccagaacttgtgggtcacaggtgacgccaggactgcatcatcctggtgctcggactcctagtgacagcatcctgagcaggcggtagcccagacaccaccctgcctgatatgcccactgttggtggagacatcaccccagcacagacctcaattaagacgactacccctccgacgactccccctcccttcactggaggtgacttcacgcacttcttcagaacctcctcagcagcgatgcccatggactggggttcctaaggcacaaatttgatatttgagattctgtgatgagctgagcttgctgtccgctaacccgtgatcctggtgtaatctcaaccaaaacccacagccctgcaccccttgcctgtaggaaaatctggtaggagttagtagtgtctgtgaagtctcaataattgataccaaaatgttttgtttcaccaggaggtgcccgcctcctatcagcctctgggaaggccactgtctccccagtgccttctcctccgctgcagctttccatctcatctccttactcccttgacttggcttcacacagagcctcttctttacacatactaactgtttgcttcataccctcctgcagcagaactacagacctgccatcctgataattgtcaaactcatccctttatcacctttataactcctcaaggatattatcattggacccccaacatttcaaagtgattttcttgagtaataccatatgctgtgatgtggatgtgattggtttgccctcatcaagtctcatgttgagctttgaccctcagtgtggcagtgctgggagggggcctggtgggggtttgggtcatgggggcaccctcctgaatggttggataccattcattcttgctgtgtcaagcctggattggtttgtaggggaatgcactagttactgggagcatggttgtgataaagccaagccgtccctcgggtttggctcactgcccttgaccttctctgccctgtttgacacagcaaatagtcctcaccagaagcaggtcagatgccagtgctatgcttgcacagcctgctgaaccatgagccaaataagcctctttctaagttacccacagcctcagatatgtagcaacacagacagactaagacaccaagcatgatggaaaactgggttatgggcaggactgcaagtactggttaggcagatacctgtatttctcttcctaactctcagaacgtgttctgtgtcacttagggcaacttatgccctcctgtgtgaaaatctccactcccaatgtctgagggttcctcagagtaagataaaatattaaaggaccaattgtattaattatgttttttttttttttgttagggtacattttcatcctggggtcttgctgtgggggctagaccgtccctctcaggctagatcattcctaaagatggtaaacaacttgctggaaacatgcactgcatatacaaatcaactcactgcatatgcacatcaactcactgcatatgcaactcaactcacaccgtatatgcaactcaactcacaccgtgtatgcaaatcaactcgcactgcgtatgcaactcaactcgcactgcgtatgcaactcaactcgcactgcgtatgcgaatccactcactgcctatgcaactcagctcgctctgcgtatgcaactgagctcgctctgcgtatgcaacccagctcgctctgcgta

SEQ ID NO: 16777 - DNA, 2300 bp, Homo sapien
ctgtgggctggaactgcagcgtgctctgtgtgacacaggctgactcaggtttttcttttaaggcagggcttaaaggaagttttactgtgaccaaagttctgtgattgagggggtgtggagaaaacaaaaagcctggccaagatggtgaaaccccgtctctactaaaaatacaaaaactagccgggtgtggtggcaggcgcctgtagtcccagctactcgggaggctgaggcaggagaattgaacccaggaggtggaggctgcagtgagctgagattgcgccactgtgctccatccagcctgggggtcagagcaagactccatctcaaaagcaagcaaaaaacccccaaaaacccacgaagcccccaaaacaaaccacagctaatccgaacccagaaaaatagactggaaccttctggcttctccacacccccaccccaagcccgtaaatgaggtggacaaccctgcctttgctcaggctcagccctgaagggaacaggagggaatccacaaaagttctgttcacagatcgaagacaggagagggggcatggccccacgcctacccccaaccccacgcaggggcccagctggcgagggagctcacagcagcctttgggggaatgaagccactgcccccgccactggctcagcctggcagggctcagggaccctcccaggtcgggctcctccgcaggggacccagtgaccaggaccctgttgattctgatgcacgggcagtgtctgctcttctgtgggggttgtttctgtagctgccactccctccccagcacccaggtacaggggacagacagctcagaaggaaaagggtgaggcgcctccatcagctcaccctcctgtcacgccgggggccaacagtctcctggagccacactggctggagggtcctggcaggcatcctctgtgccaagatcctctgagcagaggcctcgcatctccatgcttgcctgagctgccttccagccaggacagggctctcaaagcgcggaccctcaccagctgcagctgccagggaactgtgggcaggggcacaagccagccagccacaagctgaagctcaggggcgtgcacagctggccacggggtctggccacggctgcagtgctcagatccgtggggagtgatgctcctgtttctctccagctcctacaagaggcagtaattccacagcattcccggtctgtgcaaaggcagaggacgaggggaacagataatttgtttcaaaattaaaagctaacaacttggtaggaaaaaggttttcttttttttcagacagagtctgctgtggagtagggtggcgtgatctcagctcacagcagcctccacctcctgggttcaaacgattctcctgcctcagcctccggagtagctgggactacaggcgcgcgccaccacacccagctaatttttggtatttttagtagagaggggattttgccatgttgggcaggctggtctcagactcccgcctcggcctcccacagtgctgggattacaggcgtgagccaccacgtctgtcctgggagtaagaaggtcgtcgagaggggcgacactgtgtcagtcccacacacagcccctctcctggagggacgcactgtacaaagagcattttaattaatttatttatttctttacacataactgaaagtgatgttacagtacataagttatttacaactgtgcagtaatgtgttgcaaaataaattatctagaaggcagcaaaagtacattgtgaaggtatataaaactgtacagcgtttacggatacactttttatatgattattggctctgtagtgtttcaagttacgttctcagaaagagaaacaaaatgcccaagattaaaggaaagaagatacaaaccacgcggatttgactccatttcaatacggctgggagtcctggctctgtgtccctccgcctggctccgcaccaggtctgaagcccagtctgaggccgtcgcagctcggcggcaacagaaccacggctgggatggggctcctgcccctccgacctgcaggtcactgtttgtgagaggtggacaccttaattttctttagttgatcagaatggaacaaaaaattttaaaaatgtactccgttctccaactcctgaaatgcctctgcagttgctggagaaaagggcccgaaggtcgccgttttcaaacagaagctgccgtgtgtgcgcgcccggcatggtctcctcatcccgccggggccagtgaggctctgggggctttgcccccgccgcggcagctggtagagaagagacgtgtttcacctc

SEQ ID NO: 16778 - DNA, 2300 bp, Homo sapien
ataacttaagagcatggcaacgcctgcacttcgggatgtaaacatactgcagccccaacaccgccccagctcctcccaacaccgccccagctcctccctccgcagccccacctctgccccagctcctccctccgcagccccaactctgccccagctcctccctctgcagccccaataccaccccgcctcctcccctccgcagccccaacaccgccccagctcctccctccgcagccccaactctgccccagctcctccctccgcagccccaataccgccccagctcctccctccgcagccccaacaccaccccgcctcctcgctctgcagccccaactctgccccagctcctccctccgcagccacaactctgccccagctcctccctccgcaaccccaactctgccccagctcctccctccgcaaccccaactctgccccagctcctccctgtgtccacccctagtggccacatgcagcacagaagtggggcccactcgcttttcacttctgatggtcaatggaataaggagatgccgtctgctcccaggagtctcctgtgctgtgtgcagctttgcaaagtctgtgtatctcggggattctgctttcctcgtgttctcagggggcttcgtgtctccaaaacattaacccccctgctctgggtgacggagggagcaggcctctgaatgtgcgtggctaggtcttggggatcagggccctgcagaggttctcagctgcttctccaggcgactgtgggcagaccagctgctcggtgagtgtgggcccctcctggagagaggaggacttgagggctatcggtgggggagctggggtttctccagcagcttcgtcgcctctttcctagagggaggcagccgcaggcctgcttctgttgtttagaggtggctatgagaagcaagcctggggagggccggcccccgggcagcatggagggtgcagggaaagcatggggcgcacgcagagacccacagccaagcgcctgtgacccaagctcactgctaaggtgtggctacgccaatgatggctgtaggctggggctcattggccggtggcgaggctgcctccccaaccaccgtgtttgccaggttctatgaggggctggggccaaagctcaagtgctttctcagatctgtgcgttgaggactgtttacagactagctggtggtggcgatggcagcctgcagtacttggggttttgcccatgagtgtgacgcaggtcgatgtggccaggtgtgtgccttcctgcaggcttgtcccataggacatacgaatccacattctcagcatgccccagaccgaattcctaagaaatcagcctcagataccttggaaagaactagagtgggtgggcagcgtcctcttaggaaatcgacgggcacattcacggggaccatggtggtgaacagcaagagagtcgggccctgggagctgagctgagagactagttaagaccgttctgtgttccagtgaccgggcaggtgtgggatccagttagtccgttgttagagatgtctcccacctctgtaggatcaaacaccagccgagggagaagtcctgaagagaggcttcttgggagtgctgaatggaagggaagggaggtgcctcagaggagagcttcagaggcccacgtcttcctggtggcccttcttccccgagtcaggccttggcagagccttgcctctgcgctgcacctctgcagtttcaccccatgacctagaaaaccccagaacccgcagggcagctggaggaggattcagaggtgtctggcccctgatttccatccacaggagggcactggtcaggcagaggaggaggcatcttctgtgcccccgactcttggtgcttggggtcttctcttccccgcccctgcctcctgcctcttttaaaagacacagcacgtgagttgcgttagacgccagccgagtgttctgtaacgggtcagatgagtgcagggtgtgcttgttacgaggaggctgaggtggaaacagccgagctctcacaccgtgtcttgttagtgctctgtgttgatgccttcagatgcctccagcccagtccctgttgtggtgctgcaaggctggtacgctcctcgaagcaccatggcatgagatggaggttcctagaagcaagaagaaaggtacagtactgaccagttggccttgatttactgatgtgttttaaactgtgtctgccattttatatctgcactgtttggaggagggacggggaaggtggaattgaattacagacacgtgtattgaacagagacctgtcctgtgtga

SEQ ID NO: 16779 - DNA, 2300 bp, Homo sapien
ttctcaggggccttgggcaccattcgatatttaaatggtcattacacaaactagtggttggtggagttattaacttacataaggagaggagcatttgcccaggacgtacgtaaaggcctgttctatcaacatactgtggaagacaaatctgaatttgaagtgttctctttctctctgggagtcttcggagggtaatgttgtcacatctgttcagggagagagactcacccaggtgtaagggggcttggtgttttaatacaaattacagcaaacccttgaacaatacaggggttgggggcgccagcctcctgtgcagttgaaaatttgtgtagaacttttaactttccccaaacttaactaacagccttctgttgaccagagccttcctgaccacataaagccagtcacacacattttgtatgttatgtgtgttctgctcttactgttagggtagagcaaactagagacgtgaaaatactgagatcatgaggagaaaatagacttaagcctcgcgcagcagcagcgggtctccacgaatggctttcgtcctccgggttttcacgttgaggaggctgaagaggaagaggagagatgggtcttgctgtctcaggagaggcagaggtggaagaaaatctgcgtgtaagtgaacccacgcagtgcaaacccagacccaggttgttcatggtcagctctgcttacattccatccctttattgaaggtgaatttcaaccccaaagaagtctttttttttttctgtgagttttaagattagttgtgtcattacaagttttttcttatacggtccttctcaggtgttagtgtgcagaacagaacatgcttaaaatgcaggtttgggttcagaaggcccgaggggacccgtgagtctccatggtccacggactccctggtgatgccaaggcctctggcaaggagtgctcctgggcagcccctgccccgcagctgcggctccccacccggccccacagtccccgccccgcagctcccgccccacaccctgccctgcaggccccgccccacagtcccctccccacagtcccgccctgcagccccagtcctgccccgcccgacaggtgtctcagggttgtcctggcccagctcagatcctagaagccggggagaggcagcgccggattccccaccagtgcctgctcttgtcagctgaagagaccagataggctgaaattcctgggggttttgccaaactgaccttgccgtagtcagtgtaaccacttctgcatcaggcttaatcctggaggaaggctctttggtgctcgctgcatctcctgtggagcagagggaatcgcagctgggctcctgtgtgtgcggagggggagggcgcggtgcctggatggttcaggcgaaggctctgtgctcgctggcgcgtggtgggtgctgggaaacctgccctgtgccttccctgggccggtcttgacagcatctgtcacctcctgagtgctcttgaagccaccttccgggaggagcaggccatcgttgttcctgtcacgtctgtcctgccagccccgtagaaggattgtcttttgagccccattgcaggggaggtggagcccctctgggctgcaggggctctcgcagtgtggagaggcacagggcaaggacggctgttcccagcatcagctggccctggatcccagagctggccgcagacactgtccactccgctgggctgagttgtgtcttattttggcacagatgcggggctgccaggtaatgggcaagttccctgagcccacagctttggcgccgtggcttctgcttcagggagtgtgccagtggctcgtgtgggggactcccaccaccctggactctcggtgaccctgacagtccacgaagctgggacggttgccatccgccaggaggtgaagtaacaaggaatgcgtggcctgggggcggtcagggccaggtgctggccggcccctcggctctgcgtttaccttcccgcggctgtgccttgccgctcagcacagggcgtgagtcagccccagtggcctgaggcgtgtttcagtttcctgctgattcaagggtcgtgagtttaaaatagactttgcctgataacttggaaatgagggagatttaggctgcacttaaaatgagtctaggcagggacagccaagtcaccttccagggaagagtctcccccgggagtgagacccggtgccttctgttgtgtggtcggctgtgcagcatcgtgatgagaaggcacaggggctgcggaactgtctaaagaggggactcccagcttcaaggactgttttatgtg

SEQ ID NO: 16780 - DNA, 2300 bp, Homo sapien
agacaggtctgcttcaacacatcacgaccatgttcttgaactgcatggaccctggagcatctcagcgtggcatcacagtgctgctcatggaaaacatgaactggcagacccattgagacattttcaaaacataaacattgtttttcttatttccatcgtttacccattgtagaaaatgtaagaaaacatgaaaagggtgaaaatctaacttaaactcccttatacaggtaatgaattttagcttcttgtgatccttcaggaatgggccatcagtgtgtttgaaatgcttgctccctggtgccgtaaagaaatagcacttgaacgtaaatttaatttcctcagcaaggccattttttataccttctgcagaaagggtacactcgcctgcagttttgccacgagagtacaccgaatgaaggagaccagggtcatttataacctgacgctgtgtccggtttttttataccaactgctgtgtccggtttccattggctggaacgggacctcacattctgtatttgtcccgattggctagcaacttagaactttttaaaagaggcaaaggcagaggagaacaaaggaaggaggaagtaatttgtggaatgctgagaaaggtaaaaacaccttcaactaaggaagaggaacaggccgtgacctaatgcttgcttcgaccagtataagcatgccagggcagatatttaggctaaattgtgggagctaagaacataaagtacattgatttctttattaaggctagcagatatttaagaatgtcagtacaggtctttgaataaatgttgcttttaagagaagttactatttatttttagttagatggggaggaaagtctttgaagaggaacctctgctttacttcttacaagtgtgcttactgattctctgtcagcttgtcctctcagtgattgagaacagggtattaaaatcattactgagtttgtggttttgtgtatctgtctgtgtagcttgacttcatgtatttctaagctcagttagtaggggttctgagggggaaaactcagatttttcctttgctctcatgccacagcgacagtcaacacagaaaacgcaaaagacgtctgtgaccagttgtgtgggctttctgcccagcagcagggaggcagtcagttctgtggcggacaccagctgggtgtcccacaatcccgtgcagcctggacactgtctacctggagacggcacggggtccaccagggagaggactgagtcccgcaagactgccagcactccagcacccaccgcaagccctgggttcctgtggctgtgcttctcagcgacctgccctgaatctggggttccgtgacccctccttgggttcaatcatttttttttttttttttttttgagacagagtctcgctctgtcgcccaggctggagttcagtggcgcgatctcggctcactgcaagctccgccttccgggttcacaccattctcctgcttcagcctcccgagtagctgggactacaggcgcccaccaccgcgcccggctaattttttgtatttttagtagagatggggtttcaccgtgttagccaggatggtctcgatctcctgacctcgtgatccacccacctcggcctcccaaaatgctgtgattacaggcgtgagccatggcgcccagcctggtgcaataattttatgagagtggctcacacaaatcagggtgacacttacatgttcaccagtgtcgtggaaaggattttgcaaaggatatgcacagtcagatgcggagggcagggcatgtggggagcagcgcagagctccaggaacctcctccccagagttagacaaccattaccagcagcattgtttttgaaagattttcacaggtgtttttctgcaggacttacgggtgctggcccctggctgtgtgctcactgtttccccgagaacctgtcgtcccttttgcctgttcttctttacctagtttctcacctttgactgcctttaagattttcttttcacctctgtgatgtgccttggtcaggttctccatgttttgtgattgggatttgttgagcttcttggatcactagagtttacagttttcatcaaaatgtggaaatgttcaggctttattccttcacgtatttttttctgccctccacctcctttgggagcaccccttaccgttggttaggctcctgcacctcacccacgccacactcggggtttgatccagtgatcttctctctctcagtgctccccgccacactcggtgttcgccccagtgatcttctctgtctgtgctccacgccacact

SEQ ID NO: 16781 - DNA, 2300 bp, Homo sapien
ggagacatttttggttgccaggatttgctgggtggccttactggcatctagaagaccgacgctgctcaaccctgttggcgcgctgaacccaaatgccagtggcagtgagcttgcaaatcgttggactcatgatgctttgagtgctctcaggactctggaggtcgatgctggggttcctcgctggcttcctgctgctgatgctcttcccctctctgagctcttttacggaaagcttcgtggcacacttgctgcttttcactgaaaccaggctgtgtggtgactagaagctgcgtattcacatttatttttattgattgatggattgaggctgctgtgcagtggtgtgagtagctccggctacaggcgcacgccaccatgcccagctaattttttgaattttttgtagagatggggactcgccgtgttgcccaggctggtctccaacttctgggctcaagcaatccgcctgcctcagcctcctgaagtgctgggattacaggcgtgagccagcgcacccatcacacacttatttttaatggtccttgaggttaatggcagctttgaacaatcctgtccaggagtgtaaggaggaaaaacctcactccatcttccaggagtgtaaggaggaaaaacctcactccatctttgcaaaacgcatgtgccaggagtgttgctcaggaaacacgcgattctctcggatgctaagtgcagagccggggaaccctgcaccagcaagccctgtcctgggagctgccttcaatcctgtctgtgcttccttccctggttctgcacacggaagtgtttggagttggaggagagcctgatgtttggatgggactgaagtaacatgggtatagattttttttcccccatttagactggtttgttttattcttggagtccccagagctcttcagggaaattatatagttttattcagctgccttttttttttttttttaagacgagtttcgctctgtcacccaggctggagtgcagtggtgcagtctcagctcactgcaacctttgcctcgcagattcaagtgattcacctgccccagcctcccaagtagttggggttacaggtacaagccaccacacctggttaattttttgtattttcagtagagacggggttttgccctgttggccaggctggtcttgaactcatgacctcaagtgatccgcccacctcggcctcccaaagtgctgggattacaggcgtgagccaccatgcatggctttattcagctttttaaaaaaatggtactgcagtataatcttttcctcttaaaatactcagtggaaatgaaaaccaccttatctttttttgcaccttttatgtagtttaaaacttaatatgcttcttaaagttaaaattagccttttaaggctgggcatggtggctgacgcctgtaatcctaacactttggaaggccgaggtgattggaacacctgaggtcaggaggtccagatcagccgggggtgggtggcgagcgcctgtaatcccatctactcgggaggctgaggtaggagaatcgcttgaacccaggaggggaggtggaggttgcagtgagctgagatcacgccactgcactccagcctgggggacaagagtgaaactctgtctccaaaaaaaaaaaaaaggccttttaaaaacttagcttactggtaatgttttgtttctgtggcgagattgcccacttgggttatttggtttcttacgtataaaaagccccagagcctctaaaatctggttttatggtgatttcacaagattgtatcagtgtcatctactcttttttgtgctggactttggatttacctttaagttgttgcaattgctgcattgtgacgtaaaggtatttgatgaatgaagttaagttttggccttggcacagtgaccaggagctgagcagtgggtcatgggagaggaagggcgatggaataaaccgtgtggaccaaatggagggagacgagagcgatgaaagaactgaggctgaaattattattgacatgagctaatctcactctcttgtttcagaatatatacagccctgctctgggacacacctccattggatttaaaagacagtcctcgtcagcactgactttcagctatggaatcggtaaatactcactgcattctctatcaatttatgtttttgtcattgatttgtaaaaataagtatcaaaataatgcgtgagtgtccaggttggttttcttggacttgatagagttttgtcgaaatgttgtgaattttgttctggatttcacttagagtgtattcagagtggta

SEQ ID NO: 16782 - DNA, 2300 bp, Homo sapien
ctgggcaacagagcaagactccacctcaaaaaataaaaataaaaaaataagaatacaccactgtccctgaatgtgcactgttcttttaatttagaatgtgagcccacaatgatttgtacagcccaacatctaagatgcaatgaacagaatgtaaatgggggttggggggagggaagggactacacagcttctgagagaacagcaacgtccctgcagcgtgggattctcaactctcacgctcagacgttctagtacacagcagggactctcaactctcgcgctcagacgttctagtacacagcagggattctcaactctcacgctcagacgttctagtacacagcagggactctcaactctcacgctcagacgttctagtacacagcagggactctcaactctcacgctcagacgttctagtacacagcaggtactctcaactctcgcgctcagacgttctagtacacagcagggactctcaactctcgcgctcagacgttctagtacacagcagggactctcaactctcgcgctcagacgttctagtacacagcagggactctcaactctcgcgctcagacgttctagtacacagcagggactctcaactctcgcgctcagtcgttctagtacacagcagggactctcaactctcaggctcagacgttctagtacacagcagggactctcaactctcgcgctcagtcgttctagtacacagcagggactctcaactctcaggctcagtcgttctagtacacagcagggactctcaactctcgcgctcagtcgttctagtacacagcagggactctcaactctcacgctcagtcgttctagtacacagcagggactctcaactctcacgctcagtcgttctagtacacagcagggactctcaactctcacgctcagtcgttctagtacacagcaggtactctcaactctcgcgctcagacgttctagtacacagcagggactctcaactctcacgctcagacgttctagtacacagcaggtactctcaactctcgcgctcagacgttctagtacacagcagggactctcaactctcgcgctcagacgttctagtacacagcagggattctcaactctcacgctcagtcgttctagtacacagcagggattctcaactctcacgctcagtcgttctagtacacagcagggactctcaactctcacgctcagacgttctagtacacagcagggactctcaactctcacgctcagacgttctagtacacagcagggactctcaactctcgcgctcagtcgttctagtacatagcagggactctcaactctcaggctcagacgttctagtacacagcagggactctcaactctcgcgctcagtcgttctagtacacagcagggactctcaactctcaggctcagtcgttctagtacacagcagggactctcaactctcgcgctcagacgttctagtacacagcagggactctcaactctcacgctcagtcgttctagtacacagcagggactctcaactctcacgctcagtcgttctagtacacagcagggattctcaactctcacgctcagtcgttctagtacacagcagggactctcaactctcacgctcagtcgttctagtacacagcagggactctcaactctcacgctcagacgttctagtacacagcagggattctcaactctcacgctcagacgttctagtacacagcaggtgcgctgtcctttaacaaggacaaaggtcaacaaacgccccttggatgaatggctgattggcaggcattccacactgcaggctctgtccccgcccagcagacttgtcccctatcttgaaacactacttttccatttcattaatgcaacctgatggccggccactgtaacaaaagaaacatcaccaaaatgaattgtttctttcttaagacaaaagggagtttgctcctcacatatgaccttacgcagtttctgtctgagaatcatcatgttcgtcagccctgcctgtgctctcctcttcccactgtgcttcctcctgcatcacaaaggaaacccctgtgagcctgggaagtgggtgcgcaggcggagaaacagaaacggccactccaggctcaacctatccatcccggcctcttcctaagaccaaggcgctgctgactcaaccctgcttccagaagcctagggttaacatctgctccttcctcctgtttgcattcagtgaaatcctctcctctcccaggagtttccacataaaacctgcctctttgtttattaagaattgtttacag

SEQ ID NO: 16783 - DNA, 2300 bp, Homo sapien
tattttgcactttaaattcccctgatagatgagcatggtggtgcaggcctgtaatctcagctcctcaggcgggaggatcacttgatccccggaagtttgaagctggactgcgctgaccgcacctgtgaataccactgcccgtcaatcagcctaggggaaacattctcgagtgcgagcatgacggcttaggttgatgtttttcaaattttcccaatgatgagtattgtaagggaccaaaataaaaaaatgccaatgcctagtcccctctcatctagaataattccataggtgatgatggggtccaggactctgaatttcgtcaattttaccaaatacttcgtccagtgaggcaaatatggaaacacttggatcacctcttcgtgaacgcacatcagcgcatacgccggctgtttttatcaggcgctcacccctcatccaatggcgtgactagttgtgggtggagcccgaaatctggctgcctagagaaggctgaaggtccagttatagcataactaatgtttccccagagctcacatacgtgccaagcaccgtgctacagcctccacagccccttcatttaatcttcccgatgggcctatgaaataggtgctcctggcccgcaccgtggctcatgcctctaatcccagcactttgggaagctgaggagggagggtcgcttgagtccaggatttcaagaccagcctgggaaacacacagagagcctatctctacgaaaatttaaaaaattagccgggtgtggtgatgcctgactgtggtcccacctacttagtaggctaaggtgggaggatcctctgagcccgggaagctgaggctgcagttagcactgcactccagcatgggcgacagagtgagaccctgactcaaaaaaaaaaaaaaaaaagaataggtgctacttgtagttcccattttacccaccaagaaactgaagatctgagagacaaagcctacagggtgaccgctagtcactggtagggctgggatttgaacaggggcggtttaacaactgatctctcgaccataatgcgtgttgcccaagaaaaaagaccgtcctcacggtcctatccactccggactttgcaattccgttatttcgtaaattgaggcctataaatagtttgcttacccgttgtcttagtccccagtaacatgcagaactaaagaagaaactgaaggagcaccgattttgttcaccttgctttttggtttagttctggaggagaacacaggtgcacttagaacaggatccacacttaccagaggcttgattcattttagctgcaaagaaaaccagtcctcgtctacctttttcgcgtgttggagaactaactagcaaggcagggaatgcggttcgtgggcgcttggcctcctcaagcggctcaggctctcagagcgcgaggcccaggggctctggagccgcggccgcgacgcgcccgagggccgttctcttcgacggcagagcaagagtcaccgcgcgggagccccgagcgaccgccccgctgccccggtaccctcccctcgcagccgcccagagctcttcatgccccgtgacgcccgttagggcagcgcggccggaggccgggccggacgtggcccgagatgtccgggggcaggcagaagaccacgggcacgcgacaggcaaccgccgcctcggctctagaggtggacgttttgtctccctgcgcttcaataccagattttgtttccagacgacatccctgttgcttccggcacttggaaagaccaatcgtcaggcccgagaatgcaagacccaccctcctttgcgacggaggcagccaatccagttgctcgctacttccagtgtcgcatgcgcccttacgcaggaccctgcccaatcgttaccgggacgtcctcctagtcccgcctccggaccgccagagaggctgtcaatcccgcctctctccttcactccattagcgcactaactcacggcgctgtgacgtgcacagcccctgcggccggccggggcgggccaatggcggtggcggatacggcgggccaatgggcgggagcgtctcatgcggccggctcccgccgcagccgccgctgggtcctggagccagaggccgccctgagacggtgcgcgatggaccgagggccccagccggggaggcgccgccgccgagcccgcggccagacgccccatcagtagcgtccgcaccgggagccgcggctctcgcccgagccgtgggcgcgcccgaggggcgggctcgcctcccgccgtccctcgcagctctgccgggcccgagcccgcgccgccg

SEQ ID NO: 16784 - DNA, 2300 bp, Homo sapien
ggaggcctcttgccaacaccccacactgcttctgatgaattgccaggaaacaattttaacttatctcaaacaatattaataggactacacttaaactcctcccaaacacatccaaatgtgtgccctcaccctctctccagccttgtcccgtgaccaacccaaccaaacttccgaaagggttttttgtgttctaggaagtgaccgagccccacaaccctttatgcctgtgcgttcagaggatttgtgacctttttttttttttttgagatggagtctcgctctgtcgcccaggctggagtgcagtggcgggatctcggctcactgcaagctccgcctcccgggttcacgccattctcctgcctcagcctcccgagtagctgggactacaggcgcccgccacagcgcccggctaatttttcgtatttttagtagagacggggtttcgccgtgttagccaggatggtctcgatctcctgacctcgtggtccgcccgccttggcctcccaaagtgctgggatgaagggcagggagagggagggggagggcaccgcgcccggcccacctggtgtctttcaatcagggaaagaaaaaatagtggaggaggaaacggcaaggttggattcactgcgaaggctgactgtacaataagaagcaaaaggaaaagcggttcagttgtgaaaatcagtgtcagccctgggtgtaggggaaggtcctctccacaaaccaacagaacacctccccagccccgagcacctctgccgaggcacccggcccactggagggctgagggcggataaccacgataactgaaaacactttcctgagcgtctcggggctgaggaagagggaggattacacgcagcccactggctttgcaacctcgtctgtagtggtggagtgagtgcaggtccagaaacaaaccagaccggccttgaaattctgccctaacttcagagctgtaatcctaggcaggttacttttaatacttctgaatctttctttacatgtaaaatagaggtattgtattcgctgcacagggttgtgaatattacatgggtgttcgacacggagctaggcactcggtgatgttggctgtcgtcactggcattcactgttacgaatttgcggagtacagaaaagcataaaaataaataggtcaccctcatcctacctctgtgacagaccatctagtctttgcttttcctactcaacaagctttccagctcttggcgtcagctctagacctaaggcggacggaggaaggggtcggggtggcggaggaccccgcgcgcctgggagcccacgagggaccctgcccgggcccggagggcggaccctgaagagaacagagcctcttcctaagcttccagacggcgcctccccgcttcctacgatgggctcgcgcagcggccggggcaggaccgaggctcgaagcgcctccgaggtgagccagtccgaaggcacaggacggagcgctccgaagtcagaggtgtgcgggacgagctctgcagacgcctgccaggccgcgccgcactgcgcgctccctccctcacgaccctcctcctccggggctgccctccctgcggcggctgcaacttcagtcctcgtcctcgggcggctcaagacgcaggaaaaccgcccccttcctgcgctcctcacacccgaaggggccctcccgacccgaggcctccggcgccgccctcctgagcgcgggcctctactcgcaggcgggattccggcccgcaccatccgccctcgcctgtgaccgaaccctgcgggtgacgcaggctgcccgggcgtgaggcccctcggcgcgggcggagcacgaccacgcagccacgacccggccggttattcacccgccaggccctgggaatacaaggccggcttcaaaaaaaccagggcacccgcgacctcctcgcagacgcgcgcccccatacccgggcctcaggcagccacgaggtagacgggctcaggctcgggggtgcggcaagcggcacccgggcgcggcggggcgcagctgtggggaccgcgcaggcgccacgtcagaccccgcccaccccgccgcgcaggcgccgtgtagcgccccgcggatcacgcaggcgcggctttcaggccaacatggccgtgctgctgctgctgctccgtgccctccgccggggtccaggcccgggtcctcggccgctgtggggcccaggcccggcctggagtccagggttccccgccaggcccgggagggggcggccgtacatggccagcaggcctccgggggacctcgccgaggctggaggccgagctct

SEQ ID NO: 16785 - DNA, 2300 bp, Homo sapien
gtgctgctgctgctgctccgtgccctccgccggggtccaggcccgggtcctcggccgctgtggggcccaggcccggcctggagtccagggttccccgccaggcccgggagggggcggccgtacatggccagcaggcctccgggggacctcgccgaggctggaggccgagctctgcaggtaaatccccgcggagtccgggccccacctcccgcccggctctgctctgtaaggcccagcccggcggggcgggtcggaggccgcctggcccctgcggcgggggagcctgcgcctgtgggcccgcggatcccccagctgtggacctcggcgcggagcgactgttggggccctggatcgtgggcgctgggcgggccgggaagaggcagggctgggatccgcgcagtcctcggcgtggactttcccaacccgtctgttgtgtgtggatgttctccgcccgtcttcctcgccttttaaagtggaatccagtaacggtttccggcgtagcactaatttacagtccacgcctgtggatcgattccgtcaccaggaattccagcgccttccagttagggtggttattgccgagtagggggcccagaacgtttctgtgtccgcaaaataccctgtagctgcattttgctgttgtcatgtagctcggcacgttattgatacagtcattgagcaccccctgtagtgcggccttgtttcaggttctgctaaggataggatagcatctcctcccgaaaaccagaccttgtgtccttcagcttttgggctgatgtttttttctcctagccctcgcctaggagcttagcccacaccttttaggttgttgttttttcggttatttttgagacagagatctcgctctgtcgcccaggctggagtgcaatggtcttggctcactgcaacctccgcctcccgggttcaagcgattctcctgcctcagcctcctgagtagctgggattacgggtgcgcgccaccacacccagctaatttttgtatttttagtagagacggggtttcaccatgttggccaggatggtctccatctcttgaccttgtgatccgcctgcctcggcctcccaaagtgctgggattacagggcgtgagccaccgcgcccggccataaaacatatttaaatgggaaaatgtttatcttgaaaggagaactctgaaagtatatacttgttaactggtttggtacctggaaatgttctacaaggagccactctctggtgacagcaggagccccgtgtctgggcagccactgtggcctttggagagctgggctgctccctttctcctgcagaagcttcaggccatgggatagcagccaatgtacttctgtgttttgttttcttcttttttttttttttttttttttgtgacaatctcgctgtgtcgcccaggctggagtgcagtggcctgatcatggctccctgaagcctctgcctcctgggcccaagcaatcctcccacctcagcctcccaaagtgctgggattacagacatgagccaccgtgcctggccactatcgtgattttttgtttgtttatttgtttgttttttgagatggagtttccctttgttgcccagcctggagtgcagtggtgctatctcggcttactgcaacctctgcctcccgggttcaagcgattctcctgcctcagcttcctgagtagctgagattacaggtgtgcaccaccacgcccggctaatttttgtatttttagtagagatgaggtttcaccatgttggccaggctggtctcaaactcctgacttcatgtgatccacccgcctcagcctcccaaagtgttgggattacagccgtgagccaccacgcctggccaattactgtgttttaacctgtttacttgcttttgacattttgatgttacctaaagctttgacctattgctcagactattactttatatttcagggcaatgtagatattacaaataattatatatttgaacttttaaaaacgatttttagtctgcattgctttggtactctctaatgttggtgtgacctccagtattgtttttttttttttttcagagcttacaattgagactgctaacccctacctttgaagggatcaacggattgttgttgaaacaacatttagttcagaatccagtcagactctggcaacttttaggtatgtatctgtttaaagaagcagctgagcatgactgcacacttaccgcctcagctacttgggaggctgatctttttttattttagagacgggatctcgccctgttgcacgggctggagtgcagtacaatg

SEQ ID NO: 16786 - DNA, 2300 bp, Homo sapien
cggcctcccaaagtgctgggattacaggtgtgagccaccacgcccggctgacctttttataaaaaaaaatttgctgggtaggtgcggtggctcacacctgtaatctgagcactttgggaggccaaggtgggatgatcacttgagcccaggagtttaagaccctcatttctattattattattactattattattattatttttttttttgagatggggtctcgctctgtcgccaggctagagtgcaatggcacgatctcggctcactgcaacctctgcttcctgggttcaggcgattctcctgcctcagcctctcgagtagctgggactacaggcgtgcgccaccacgcccagctaattttttgtatttttagcagagacagggtttcaccatgttggcaaggatggtctcaaactcccgatgtcaggcgatctgcccatcttggccttccaaagtgctgggattacaggtgtgagccaccgtgcccagcctggagtttcactcttgtttcccaggctagagtgcaatggcgtaatttcagatcactggaacctctgcctcctgggttccagtgattctcctgcctcaacctcacgaatagctgggatcacaggcatgcaacaccaagcccagctaatttttgtagttttggtagagacctggtttggccacgttggtcaggctagtctcaaacttctcacctcaggtgatccactcgccttggtctccgaaagtgctgggattacaggtgtgagccaccacgcccggccgttcgtttttttaataaaagaagaaagttagatcacttggggccaggagttcgagaccagcctggctaacatggtgaaaccccttgtctactaaaaataccaaaaaaaaaaaaaattagccaggtgtggtgtacgtgcttgtaatcccagctactccggagtctgaggcgtgagcatcgtttgaacctggtaggcagaggttgcagggagctgagattgtgccattgcacttcagcctggataatagagtgagacctttctgtctcaaacataaaaaattaagaaagaaaaggccgggcgtggtggctcatgcctgtcatcccagcactttgggaggccaaggcgagcagatcacaaggtcaggagatcgagaccattttagctaacacggtgaaaccctgtctctactaaaaatacaaaaaaaaaaaaaaattaggcgtggtggtgggcacctgtaaccccagctagtcgggaggctgaggcaggagaatggcgtgaacccaagaggcgaagcttgcagtgagccgagatcgcgccactgcactccagcctgggcgacacagcaagactctgtctcaaaaaaaaaaattaagaaagaaaaaagcgacggcgagactcttgtctcaaaaaaaaagaaaaaagaaaaaagtcgtaagagaaaatatatttcctatttatgcagtggaagcggatcaccataaagagcttcatcctcatggccttcaccttgagtgggctgaggaggaggacgaggggctggtcttgttgtcttgggtagcaggggtggaagaaaatccacgtgtccgtgatcatacatagctcactcctgtgttgctgaagggtcacctgtcatagaagagggaagaattgtgtggcctgtgcggattctgcattcagccttgtgtgttgtgttacggttaaccagggacgtgtgccccactaataactctgattcctggaaggaatggcatggcagcctccgttgtcatggttcctggagggaatggcatggcagcctccgttgtcatggttcctggaaggaatggcatggcagcctccgttgtcatggttcctggaaggaatggcatggcagcctccgttgccatggcaaggcaaagccatggcagcttcctggttatcactcctggcatgtggtaggtgcttgtccagtgaaatcctagtcgttgctgcattggcaggtgccctggcgtgaggaagggcaggcagtcaccatgccctttgctctcctgggccctgcatctgcttatggatgaggctgcgtgtagctgacatgcgtgtctctcctgcatctgagtaattgtcgtcgtcttttttttttttttttttttgagatggagcttcgctcttgttgccgaagttggagtgcaatgccacgatctcggctcattgcaaactccacctcgtgggttcaagcagttctcctgcctcagcctcccgagtaactgggactaaaggtgcccgcaaccatgcccggctaattttttgtgtttttagtagagacggagtttc

SEQ ID NO: 16787 - DNA, 2300 bp, Homo sapien
gttcagtttatcaatttttgcttttatagatctcgtttttactgtgaagtctaagaactgtttgcccgccgggcatggtggatcacctgaggtcaggagttcaagaccagcctggccaatatggagaaaccccatctgtactaaaaatacaaaattagccgggtgtggtggcgtgtacctgtaatcccagctacttgggaggctgaggcaggagaatcgcttgaacccgggaggcggaggttgcagtgagccaagatcgcaccattgcactccagcctgggcaaaaaagagcgaaactccttctcaaaaaaacaaataaataaaagaactgtttgcctattcctagatcctaaagattttctcctgtgggtttcttttttcttttctttgagacagagtcttgctctgtcacccaggctggagtgcagtggtgcgatcatgggtcactgcagcctcagcctctgggactcaagccgtcctcccgtctcagcctcctgagtagctgggaccacaggtgtgtgcaccaacatgcctggctaattaaaaaagaattttttttgtgtagttgggggtctcaccttgttgcccagcctgctcttgaactcctgggctcaaatgatcttttcacctcagctcctcaaagtgtggggaatacaggtgtgagcccccatgcctggcctctcatgggtatcttatagaagttttatatttaatccatgatcttattttaagttaacgtctacatgaagtgggaggtttggtcaggttcattttctgcctgtggaaaagtgctccagccccactggtctgaaatgctgtcttctttccaccaagttgtgcttgcacctttgccggagctcaggtgcatgtgggggtctgtgctggctctgtgagtctgtccttccgcacacaactggtctctcgcttctgtgagacgagagcaggtggagtgattcctcccactttgttctttaccagaattgtttcagctattcctttgccttttcctgtaatttttagaatacgcttgttcctatctaccaaagtatcttgctgagattttgataggaacacacacctcttaggagagctagagtaaagagcagtgaccggcccagatctgggccatacgtgtgatcccagcattttgcgcgtctgagttggaagcattactttagcccgggagtttgaaaccagcctgagcaacatagtgagattctgtctctaaaaaaatacaaaaattagctggcagtggtggtgcgcacctgtagtcttagctgctcagaagattgaggtgggaggatcacttgagcctggcagttcgaggctacagggagccgtggtcaccccactgcactccagcctgggcaacagggcgagaccccatctcaaaaacaaaacaaaactcaaaaaacagtgacaacaccacacgctgctgaggatgcaaagaaaccagatcccttgtacgctgctgatgggggtgtgacgtggtgcagcctcactgggaaacagtttggcagcttcttaaaaaactaaacgtgtgctcaccatgtgaccccgtgtccacatgcgctcaccacatgaccccgcatccaccctcctgggtgctcatcccaggaaagcaaagacttaggctcacacgaaatgcctgggcgccgacgctcatttacctgtaatagctaaaaactggaagtgacccaggtgccattcagtggctgagagctgaaactggtgtatccttatcacagtgttctacgcagaaatagaagagctgaaactggtgtatccttatcacggcgttctacacagcgactagaagagctgaaactggtgtatccttatcacggtgttgtacgcagaaatagaagagctgaaactggtgtatccttatcacggtgttgtacgcagaaatagaagagctgaaactggtgtatccttatcacggtgttctacgcagaaatagaagagctgaaactggtgtatccttatcacggtgttctacgcagaaatagaagagctgaaactggtgtatccttatcacggtgttctacgcagcaatagaagagctgaaactggtgtatccttatcatggtgttctatgcagcagtagaaggaaactttcttcctgcagcaacaaggaaatgacgcaaagtgagaagagccaggcttagtatcgtatgactccacttgtacgaaattgtcaaaataacaaaattctggggatggagaacgggttactggttgtcagcagttaggggaggtctccagggaggagggatgcctctggggagggcggttct

SEQ ID NO: 16788 - DNA, 2300 bp, Homo sapien
gggattacaggcgctcaccaccacgcccggctaatttttgtatttttagtagcaatagggtttcaccctgttggccaggctggtctcaaactcctgacctcaggtgatctgcccacctcagcctcccaaagtgctgggattacaggggtgagccaccatgcccggccatctttgttctcccttgagggccccttcctcctcttaagccctgatagcagaaacccacccacccacaccgtggctgtttgtgttgacaggggctgacatcgccaacatctgcaatgaggctgcgctgcacgcggcgcgggagggacacacttccgtgcacactctcaacttcgagtacgccgtggagcgcgtcctcgcaggtacagggggcgcgccctgggtgaaggccctccttagcagggcttgaaccccagaaatacccaggcaggtattgagaggtgaggtggatggaaccatcacacaggaaggaacacacgttgcgtttcagttctgcgtaactcatgtctttatgataccttgtacttttccttagtttaaaatatcacagatttacctaagagtagacgctcgtccaacagaaataaaaaatgccttgccaaagaaagtgaaaaaataaaaataaaaaatgccccccaaaaataaaaataataaaaactaaaaatgtcttgccagcctgggtgtggtgggctcagcctagccccagcctcatgggggctgagctccagccgctgactgtgggccggagggctgctgccgcccgtggctgtggagggacagccgtgctttcagcgcagcaggggctctgcggagaggtgtggatctgcagcaccacctctggtgaaactcatggtcccgaccgtcagtaggaacgggagatgagttttggtgacgggtgaccggtgggctgaccgcctctgactgccgttccgtggctgctcagtgtggggtctgcgacgtctgtgaggagagaggaccaaactgggaatcggagctgctggaggtttccatagctatgatggcaacacccagacgtgatcagtcatctcatggaatggagttcagacccgcactgtcagtgtgagacaggttgaacgtttgaaaagggaagtggttcttgccccaggtgtttgaggagcacgagcctcctttgcgagctatccctgcgagaaccgagttcctcaccctcaattcgagtgaattcctagcacgaacacgcctcttgcaggtccccagggcttcagcttgggaaagcagtgggttcctgcagaggagtggggcagctgctgtgccagacactgcaaaacacacctggcttctctccgacagccctgcgggtcgagaggactggcgctgcctgtgtcttactgaaatttattttcgtgtaaccatttacttttatgtggaaatcgaaaagcttttgataatagtagcaaagcaggaaggactgagtgggaaccacaagccagttgaaagaaaatacatgacgtacttgagtgctcaggaccacgagctgattcaagttgtacagaatggacacttacagatgtgtggaaaatctgagacaggaaatgaagcctcaccagtaagctgaacaggggagatttaatgcaaacatttgtccctggctgggcactgtggctcatgcctgtaatcccagcactttgggggctgaggcaggagggttgcttgaggccaggagtttgagaccagcctgggcaatacagcaagaccccatctcttaaaagaaaagaataaagagtattagccaggcatggtggtggagcacacctctggtctcagctactcaggaggctgcagcaggaggattgcttgaacctgggaggttgaagcaacagtgagccgtgatcgcaccactgccctccagcctgggcaacagagtgagaccctgtcactgacagaaaaaaagccttgtccctgaggcaaaaagcttctgaaggggtgagtagaagccataaggatccagaaagtgatggggatgggagctgcgcctccaggtctgaggggagagggaaagtaagcaggaggcccgtaactcagaggaggcctctgcccatcctgccagggagaaagtcaaaagctgctgttctgtgacccttgccccgaccctgtggcacccccccaaccatggggcaggaggagacactcctcagagggttgcacttgttcctaaaagcagcaggagctatttcgatgattgcaacatttataaaagaagaaatcacgacctccttcaacagccctttgacctgaagagtgtcgttttgagttgg

SEQ ID NO: 16789 - DNA, 2300 bp, Homo sapien
agtgcagtggcacgatcttgggtcagtgcaacctccgcctcccgggttcacgccattctcctgcctcagcctcccaagtaggtgggaccacaggcgcctgccaccacgcccggctaattttttgtatttttagtagagtcggggtttcaccatgttagccaggatggtctcgatctcctgacctcgtgatctgcctgccttgggctcccaaaatgctgggattacaggtgtgagccagcacgcccagctcttaaatttttcatttttgagacggaggcttaactctgtcacccaggctggagtgcagtggtgcagtctcgactcactgtaacctctgcctcctgggttcaagtgattcccctgtcctactctctggagtagctaggattacaggtgtacacaaccacacatggctaatttttgtatttttagtagaggcgggattttgccatgttggctaggccggtctccaactcctgacctcaggtgatccacccgcctcggcctcccaaagtgctgggatttacaggcatgagccaccgtgcctggcctgtgaaatacttttttttctttttgagactgagtcttgctctgttgcccaggctagagtgcagtaatgtgatcttggctcactgcaacctctgcctccccagttcaagcaattctggtgactcagcctcctaagtagctaggattacaggcatgcgccaccacgcccagcttttttgtatttttagtagagacagggtttcaccatcttagccagggtgatctcaaactcttgacctcggctgatccgcccacctcagcctcccaaagtgctggaactgtgaaattcttaaaatgtggattacgttggccaggcacggtggctcacgcctgtaatcccagcactttgggaggcccaggcgggcggatcgcgaggtcaggagatcgagaccatcctggctaacacagtgaaaccccgtctgtactaaaaatacaaaaaatcagctgggcgtgatggtgggcgcctgtagtcccagctacttgggaggcagaggcaggagaatggcgtgaacccgggaggcagaacttgcagtgaacagagatcgcaccactgaactccagcctgggcaacagagggagactccgtctcaaaaaaaaaaaataataataagttttaccaggaggaagcgtggtgattgggtgagggtagggaagaaagagggttattgggatttaaaggtttccaggtagcagtaagatggatggtgccttcacagacttatactagagaagagatggctttttgttgatgcttttctttgtgaaggaaggcagtaggcacagcaggtcagagtgtgacattttcagtcgggtacccctgaccttagagaagtcacctaatcctgggccaagggaaagcgacagaggccaacagtaactccgtctactaaaataccaaaaattagcagggtgtggcggcgggcgcctgtaatcccagctactcgggaggctgaggcagaattgcttgaacctgggacgcggaggctgcagtgagccgagatcgcgccattgcactccagcctgggcgacggagcgagactccgtctccaaaaaaaaaaaacaaaaaaaaaaaccacaaatgttctaaatggatgggaggagaataaacgctggaacgacaaggacgaaggccttaggttgcgcaaactcggatgtcactgaagtttttctgcctttgcgctgcaaacgtgtctcacaaatgtgaacaaacagaattcctcgggcgtcgcccgttcgccgtcggcccagataccggactcgcgcgcgttagcccgcaagacaggactcggccgcggcccgcgcagcggctgaagcgccggggcagtaacggcggacgtcaagcaagtccggccgtcggttactcagggcccaggaatcacggccgccccgccgcattctcagcggcaacatgtctgcgacggcggccctagggctgccgggagagccgcggcgacgtcagttcctcctttcggggctctgattggtcagagcgcccggcgcttctggttggccggccctgctatcatcccagagtgcattgcggggccgcttcctttccgctcggctgttttcctgcgcaggaggtgagggagactgggtcctggcctttgggcatcatccagcgccatcggcctggcgcttcagccaacgcgggagtggatgggccccttcttcttcgcagacagcgttcggccgctgcccgggctctaggcgcggccggacggcccagtctggagggttcggggcggagg

SEQ ID NO: 16790 - DNA, 2300 bp, Homo sapien
caattctggtgactcagcctcctaagtagctaggattacaggcatgcgccaccacgcccagcttttttgtatttttagtagagacagggtttcaccatcttagccagggtgatctcaaactcttgacctcggctgatccgcccacctcagcctcccaaagtgctggaactgtgaaattcttaaaatgtggattacgttggccaggcacggtggctcacgcctgtaatcccagcactttgggaggcccaggcgggcggatcgcgaggtcaggagatcgagaccatcctggctaacacagtgaaaccccgtctgtactaaaaatacaaaaaatcagctgggcgtgatggtgggcgcctgtagtcccagctacttgggaggcagaggcaggagaatggcgtgaacccgggaggcagaacttgcagtgaacagagatcgcaccactgaactccagcctgggcaacagagggagactccgtctcaaaaaaaaaaaataataataagttttaccaggaggaagcgtggtgattgggtgagggtagggaagaaagagggttattgggatttaaaggtttccaggtagcagtaagatggatggtgccttcacagacttatactagagaagagatggctttttgttgatgcttttctttgtgaaggaaggcagtaggcacagcaggtcagagtgtgacattttcagtcgggtacccctgaccttagagaagtcacctaatcctgggccaagggaaagcgacagaggccaacagtaactccgtctactaaaataccaaaaattagcagggtgtggcggcgggcgcctgtaatcccagctactcgggaggctgaggcagaattgcttgaacctgggacgcggaggctgcagtgagccgagatcgcgccattgcactccagcctgggcgacggagcgagactccgtctccaaaaaaaaaaaacaaaaaaaaaaaccacaaatgttctaaatggatgggaggagaataaacgctggaacgacaaggacgaaggccttaggttgcgcaaactcggatgtcactgaagtttttctgcctttgcgctgcaaacgtgtctcacaaatgtgaacaaacagaattcctcgggcgtcgcccgttcgccgtcggcccagataccggactcgcgcgcgttagcccgcaagacaggactcggccgcggcccgcgcagcggctgaagcgccggggcagtaacggcggacgtcaagcaagtccggccgtcggttactcagggcccaggaatcacggccgccccgccgcattctcagcggcaacatgtctgcgacggcggccctagggctgccgggagagccgcggcgacgtcagttcctcctttcggggctctgattggtcagagcgcccggcgcttctggttggccggccctgctatcatcccagagtgcattgcggggccgcttcctttccgctcggctgttttcctgcgcaggaggtgagggagactgggtcctggcctttgggcatcatccagcgccatcggcctggcgcttcagccaacgcgggagtggatgggccccttcttcttcgcagacagcgttcggccgctgcccgggctctaggcgcggccggacggcccagtctggagggttcggggcggaggcccgggggggtgcgcgcgcccggggtccggcctctcactcgctcccctctcgtccgcagccgcagggccgtaggcagccatggcgcccagccggaatggcatggtcttgaagccccacttccacaaggactggcagcggcgcgtggccacgtggttcaaccagccggcccgtaagatccgcaggtgagccctgcgctcggggctgcccctggggctcgtgcccgcggctgcgccttggcttgcgggtggccgatgccagggcggggggcgctgtctgcaaccgtcgcggagcgctggcctggcggccttaggcaagggtgaccgccgctgcgcttctctccaccagacgtaaggcccggcaagccaaggcgcgccgcatcgccccgcgccccgcgtcgggtcccatccggcccatcgtgcgctgccccacggttcggtaccacacgaaggtgcgcgccggccgcggcttcagcctggaggagctcagggtgagtactggcagcgctgcggtgtcaggaaggccccgaagtcccctctgttggcctcagtcgcgtgatgacattctccggaatcgctgtacggccttgatgaaagcacatttgaacccttttccatctgattgctgaggcttttcatccaggcctcggggctggagaaag

SEQ ID NO: 16791 - DNA, 2300 bp, Homo sapien
caattaaaagaaatttgcacataaaaaaaaaaacctggagggttagatgtggggaggtgatgggctgctttggggtctggaaatttgtttttactccctatctgcattgtctaatatttcaacaaggaacacggttattattcctgcgtgtatgtgtgtggatctcatttcctgtgtctggccctgcagggaaagctgggagggggagccttggaaagatggctccacatggcctgcggggtccttccattgtacctgggcctactgcgggctgatccctgagcaggggcaggcagcgtccagacaccagtgccacaggggaatcggcttttccttctgtggtttctctccattagagcaggctgcagtcagggctgtcagtcaggagacagcaagccggccgagggctgtggctggagatcccaaatcgccctgggcttcagagactcaaattcccaaactctgtgatctttcttggctccctgcgtcctttgcttggaagccatctgttattttgccagggtgccgctatgtgacagccaagggctgaactggggtgttccaggtttaagccgggtacccctcagacagcctggtggacctcaggcctcacgccacactgcagacgagcaaacctcagggcggtggtgaggagctttcgggtgaggtcaaggcaggaagcggagcttggtctggggaaaactgtcccagggctgctggaaccgagcgggaggcacggcctgcaggagctgcctgggcgcccgcaccctttgcctgaatttcgcatccttttcccatggaagtggttggggaccgaggatgtggcctcccggcagcctggaaggctgggctgaggaggacacagggccgggaaggcccagactggtccctagagagcgggactggcctctgcccactgcgggcttcagggaggaggcgcagaggccggggagacagcagatggggccctgcaggcctcgctgcgccctgacctgttcctcgcctctttagccaacctcccgggaaggcaggagccggtctccatggcctctcccggccctgccagccccgtggggcctccccgccctgcagccgcgcccggcgccatcccgccgtccgaccgcgaggggacgccgctggccgcgttcctcctcccaggccgaggctgcctgtgctgcctcccgccggcggggccctgagcctcctcgccctgtcggcggcggtcccctctgaccgcagggtcttcttctagagtcctgatcgccgaggctgagcggaggcgcccggtcttcccgcctcttcagtcttaatgtctccctcaccctcgccccccacccccgtggcttttggcgaggtccgtgccctatttttaggcagaaatcggcaaaaagagtggactgcgaggtggtttctgtccccgccgacgcctcctcttccgctgctccctcccccgggaccggtgatggggaaggtgggggagtgagttcagggcggagcgggcccaccccccacggaacccaggcctgccccgccccgccccggcctcgggggactggtgtggaccgtgccccgcggacccctcggaatcagaccgcgattcagccctcggccccccgggacggtccttccagccccagacgagcgcggcgcctgcacacaacaggcgcccactaaatgcttgttgatggaggtggcgagtacccgaaaccagcggagcctggaaatgggatcctagagatccgggaagggcgcggggatctggtgccaagctggggtcccccttttgcctcccctagtgtctgcctgggtccgaacccgggctcaggccccgcgcagctcggagcctccagcccggagccggtccctgggccggggatgcgcacagccggggagggcgcgcccgacctgaccccaaagctatcagttggggggggggtccccggggaattagaagctgtctcctcccgggcatctccgaggggcacccctgcctctgccccctgccctcatttcccgccgcgcccctccccggccccgccccccggccgcgccccaccccctgcagtccccgcgcggcggccgcccgagccacgtgcgcccgcgcccggcaggcgttcagggaagcgcggccacgcctgggccggccaccatttcccgggcgccgcggcggcgccgactcgcgggcagcggcccctcagtgcgcccagccgggcccccgaacgccgggagcatgagcgcgggctcggagcgcggggcggcggcaacccccgggggtttgcccgcgccctgcgcctcgaagg

SEQ ID NO: 16792 - DNA, 2300 bp, Homo sapien
ggtctaaatggggggggggagtttaactgaagcaatttttatagaagcagaactggcaaaaagttaaaaaattaattggttacaaatgcagttacaaaaaataaacagctccaggtgcaggggcttaaactatcacaaagagataaatgcaggggcttcgggtgccatccaccgagcgcgtcccgaggagctgctggtgcagcttgcctcagtatcttatcagtaggtgcattcccagacgtgctttgagtcagtcacactagttaagccttaagggagggaggtgaagggggctgcaggtgaagaaactaaaatggagtctgtccggcgctctctctgctacgagaaggtcacttaggttaaaacaaggttgggtatcacactgggaggccgaggcgggcggatcacgaggtcaggagatcgagaccatcctggctaacacggtgaaaccccgtctctactaaaaaagaaatacaaaaaattagccgggcgtggtggcgggcgcctgtagtcccagctactcgggaggctgaggcaggagaatggcgtgaagccaggaggtggaggttgcagcgagctgagatcgcgccactgcactccagcctgggcgacagagcaagactctgtctcaaaaaaaaaaaaaaaaaagtcattgccccaaatagaaacccattcccattagcacccactccccactttccttcacagcctcaacaaccatgaatccaccttctgtgtctatggagtcacttattctggacatttcatataagtggaatcacacgacatgtggtcttttgagtctagcttctttctttcttttctgagacaggctcccactctgcggcccaggctgaagtgcaatggcgtgatcgcagctcactgtaacctcagtctcccaggctcaggcgctcctcctgcctcagcctcacagcagagaccacaggtgcgcaccaccacacccgactatctggcttctgccacttagcgaaatgtttctgaggttcttcatgttatagcacgtgtcagcacgtcactcttcttcatggctgagtaatactccactgcgtgaagagacacatttatctgtccccgtgttgggcatctgcactcttcccacattttggctatactaaattgtcctgctacgaacacctgtgtagtttctgtgtaaaggtacagtacctatatgttggggtgatcagacccaaccccaggtcgtgggggtgacaaagtccggcggagtcaaaggattcagaaaaacacagagagagaaaggtggcacaccagggggccatcgctattgtggaggctgcaaaagcccgagctctgggagcccacggtatttattggtaatgcaacaaagaaacagatggtgagaatatggaggtcaaaagaccacgttgcattaagcacatgattacagctgtgccggtttagcatttatatggagcatgttctgctacttgagataatgggaataggggcctaggagggctagaaggaaggagccagcaagtctagacacattccaaaggacatcatgcaagccctgcctcagtttccctcccaacacctatatgtcttgttggtatacatgttgtattttcacaacgaaaatgcatgagaaaaaggacacagatggcttatgtgtactgatgtgtagcattctctaagatctgacatcacagagctggacagcacagctgtgcacgcacccccctggctgggaggtggcacatccacacatgagggaaaaacactgccaggacatctcagggcactctcaggaaatgaggaagctgctggagaagtttctagccttgggggaggtcaggacgcagagccatctcctggagcaaagttccctcctcctctctccctcctcctctctccctcctgcagcccttccttccgacccctggccctttctctccaaccttcccctcccctcctccatttccctcctctttctactttcagagaacacagggttcctgcaggaaatggggcagtttcaccttcctgaggaggggcctgggaggggcagcaggtggccgggtagggccagcccagctgtgagcctggcgtgggagctgcctaggccgggccctgccagggagcaagtctgcatcgcagaggccagggtgagtgggctggggagtcggtgcgccagggtactggggtgcccacctggggtggtgcaggcccggggaccccagggcaccactgtgggtggaagctgggaccaggcgtgcggggcaggggacgcggcggcttcctgggattctaggaggctg

SEQ ID NO: 16793 - DNA, 2300 bp, Homo sapien
acaggcataaaccaccaggtctggcctacattatttatttatgcatttagttttgagacagggtctcactatgttgcccaggtgggagtgcagcctcaagctccgaggctcaacaaccttcccacctcagcttcccaagtaactgtgactgcaggcacacaccagcctggctagtttctttatgtctgtagagacgaggtctccttgtgttgccccggctggtctcagactcctgagcttaagtgattgctgcactgttccccgggcaaagttgcacaattcgcattttgtaacttatagattaatatttattttattttcaccagaacggtaggaaccctgcacaaaactggttttattttgctctttacgtacgcacatcccaccagcaccctctacctttggcttccggagggttgccctccctgctccctccctgcagctccctgcccccctgctcccctccctgcagcccccctgcccccccgctcccctccctgcagccccctgccccccccgctcccctccctgcagctccctgcccccctgctcccctccctgcagccccctgccccccctgctcccctccctgcagctccctgcccccctgctcccctccctgcagctccctgccccccctgctcccctccctgcagccccctgcccccccgctcccctccctgcagctccctgcccccccgctcccctccctgcagcccccctgccctccctgctccctccctgcagccccctgcccccccactcccctccctgcagctccctgcccccccgctcccctccctgcagccccctgcccccccgctcccctccctgcagctccctgcccccccgctcccctccctgcagccccctgccccccctgctcccctccctgcagccccctgccccccctgctcccctccctgcagccccctgcccccctgctcccctccctgcagccccctgcccccctgctcccctccctgcagccccctgcccccctgctcccctccctgcagctccctgcccccctgctcccctctctgcagcccgctttccccctgctccccccgctcccctccctgcagccccctggtccccctgctccccccgctcccctccctgcagccccctgctccctctgctcccctccctgtagctccctgcagccccctgctcccctccctgcaccccttttgccccctgctcccctccctgcagccccctgcactcccttcaccccctccctgcagcctgctgtgccccctgctcccctccctgcagccccctgcaccccctccctgcagcgccctgtgccccccactcccctctctgcagccccctgcgtcccctcccctctctgcagcccccactgttcctcccactgctgcccatcattggctgcttgaaaatgtcagactccaagggcccctgtgactagcccagcagcagccctaggtctccaccctgccttgggtggggtccgggataggcctggcctccccccgcctgcttgaacccactgagtatgcccccctcccgccgcaacctcagaattccaaagccagcctggtctccagctcagtgcggtccacacgcagaccctccttggatttcgaaagcccgtgtggctttgccagaggacattccaatcctcgattgtggctggggatggagggagatcaacccatcgcacttacagataaagaaactgaggacggagtttgtcccaactccggggccagggtcagtgtcctccgagggagtcagggaggtggctggggtctgccagtgggggggacacacgacctgggacccccaggccacttgagactctctgggctcgttgggctgggcccaagctcccaggccccctcctctccatttctcaacctgctgccacctaaggcagataccctacactactgcctggggggcctcaaagggtgatcacccagcacaagctctcctgcctggcctgggaccgagagtcccagaagcccctgggctggccggatgctcaaggcctcactgagggcatgcgtatcttcggaaacaagaaccagctgacatgtgtgaggctttagcccggctctccctggggtactgtgcgagccctcaaggaggtggctgttctgtagctggagagctccgtgggtggcaggactgaacttgaacaccagaaacaacccccaagccttgtgacctgggaggcaggaggcgggtctgtctccctgggacttgggtggctgagccgaggtactcgggaccctgtcccgcgcatggtgagtctcggggag

SEQ ID NO: 16794 - DNA, 2300 bp, Homo sapien
tgggattacaggcgtgagccaccacacccggccacaaaaggtatttctttctttctttcttttctttcttttttttttttttttgtgagatagagatttactcttgtcgcccaggctggagtgcaatggcgcgatcacagctcatggcatcctccacctcccggattcaagcgattctcctgcctcagcctcccgagtagctgggattacaggcatgcaccaccatgcctggctaatttttgtatttttagtagagacggggtttcaccatgttgcccaggctgatctcgaactcctgacctcaggtgatccgcccgcctcagcctcccacagtgctgggattacaggtgtgagccaccttgcccagcccccaaagggtatttctttatagcagtgtgaaaatggacaaatacagtggcctcaagttctctccttagtggcacctgagggagtgtggtgctcttggaaatgctctcctgtcactcagtttctgcctctgaagcgacaagcagaacatggatgttctcagagtccagggctgtgtagatagtattggagctgaaggcaaaaggaaaaatcagaatattgggcctgtctttattttaaaggtttgtgggggagggggggcggtttgtgttttgtttgtttgtttttctgagatggagtcttgatctgttgcccaggctgaagtgcagtggcatgatcttggctcacagcaacctccgcctcccgggttcaagtgattctcctgcctcagcctcctgagtagctgggactacaggtgcgcaccaccatgcccagctaatttttgtctttttaatacagagagggtttcaccatattggccaggcttgtcttgaactcctgacctcaagtgatccatccgcttcggcctcccaaagtgctgggattataggcgtgaatgactgtgcccagctattttaaagttttatactttgttcattatggattttttttacatgaattctgatttttttaaaatattgaatgaaaatacgatttatcatgacctgggcatggtggctcatgcctgtaatccccgcagtttgagaggccaaagcaggcaggtttgcttgaggccaggagttcgagaccagcctgggaaacatggggaagaccccatctctacaaaaaatacaaaaattagccagacgtggtggtgcacgcctgtggtcccagctactcaggaggctcaggcaggagggttgcttgggcccaggaggtgcaggttgcagtgagccgagagggagccactgtcctccagctggggcgatcctccttccctgccgggctccccccacccccccccgaagcctctgaccagttttccctcctgctcctcccagcaggcctggtttagccccagtgctcagcccactgtcccccagaaccccagacaccacccagccctgggattaagattcttccgtcagggcaccacctgggaactgtgtgcccaggagccctcgggcgacttgaatgtgctctgctgagtcctagagaggccccggttctaaggacgtgtctagctgcttggcctgaagctctgtagctggagtgtgggtccctgtgacgctggagggctgcaggccgggggtgcggacccctcagcaacagggcaggcgccaggggcacacctggctgtgcagcagcttcctggaacgccctaatgtttatcccccatggcaagtcacgtaagatgatttttacgtggaaaggggtgctttatgagaatgcactatttgaatgactgttgtcttgcttgcagatctaggcccccgggtcctgagggaggtggtagtaataacagtagcacagctagagccaacagccactcaccactcatctgggcctgctctcagcctgctgtcctttcatctgggctctagctccacccctgggtctgggatcccagcttcttactatgcctccgcctagcccagacagcaacgcccagtcattgagtgtccggccttccatcctacccaccctggtggggaatgtgctggttacttattgaacatgggaagctataaacaggagagcagccacctgtcatcacttccacccacacctctggtgcctctcctggcaggcagagtggctcctcacagcctgaagctcatccttctgcacgggccagccaggccagcacagaggcaccagggcagcagtgcacacaggtccccggggaccccaccatgtggagcggatggtggctgtggccccttgtggccgtctgcactgcagacttctttcgggacgaggcagagaggatc

SEQ ID NO: 16795 - DNA, 2300 bp, Homo sapien
cagtcacagctcactgcagcctcaacctcctgggctcaagcaatcctcctgcctcagcctcgcaagtagctgagaccacaggcatccaccaccatgcccggctgatcttttcatttttaagtagagacagggtgtctatgttggccactctggtctcaacctcctgggctcaagcgatcctcctgcctcagcctcccaagtagctgagaccacaggcatccaccaccatgcccagctgatttttttcatttttatgtagagacagggtgtctatgttggccgctctggtctcaaactcctggcctcaagcaatcttcccacctcggcctcccaaagtgctggaattataggcgtgaaccactcactgtcactgtacctggccaggcctcggtcttggcaactcccacaagaggcagagcctgcatggccaggctcatctgctgggtcagggacgtcacagcagagccttggctgttgcaggcatttccttcacacagtgcaggtgggccaggagggcacagcagtcctggagaccccacgtcggcggccttttctccaccgaccccgcgctgggtccccacgtcggcggccttttctccaccgaccccgcgctgggtctccacgtcggcggccttttctccaccgaccccgcgctgggtctccacgtcggcggccttttctccaccgaccccgcgctgggtctccacgtcggcggccttttctccaccgaccccgcgctgggtctccacgtcggcggccttttctccaccgaccccgcgctgggtctccacgtcggcggccttttctccaccgaccccgcgctgggtctccacgtcggcggccttttctccaccgaccccgcgctgggtccccacgtcggcggccttttctccaccgaccccgcgctgggtccccacgtcggcggccttttctccaccgaccccgcgctgggtccccacgtcggcggccttttctccaccgaccccgcgctgggtccccacgtcggcggccttttctccaccgaccccgcgctgggtccccacgtcggcggccttttctccaccgaccccgcgctgggtgtccacgtcggcggccttttctccacggaccccgcgctgggtctccacgtcggcggccttttctccaccgaccccgcgctgggtccccacgtcggcggccttttctccaccgaccccgcgctgggtctccacgtcggcggccttttctccaccgaccccgcgctgggtccccacgtcggcggccttttctccaccgaccccgcgctgggtccccacgtcggcggccttttctccaccgaccccgcgctgggtccccacgtcggcggccttttctccaccgaccccgcactgggtctccacgtcggcggccttttctccactgaccccgcactgggtctccacgtcggcggccttttctccactgaccccgcactgggtctccatggccttttccgtcgagttggtggtctttccataggacccagatgatggctcagcccagagttggggttttgtgggtcagggttggggtgccccagctctcctgtcagagtccaggggacccgtccctggtgcgtgagctccacttgcctttcatcctgttccctcctgcgctctctcctgtctcaggtgaccaagaatatggcccaggtgaccaaagccctggacaaggccctgagcaccatggacctgcagaaggtctcctcagtgatggacaggttcgagcagcaggtgcagaacctggacgtccatacatcggtatgtggcccctacccttggggctgtggcctggggacaaggagcgtgtgtgggcagctcatcgggaggggtggctcacaggctgacgtgctgtctctgcatacctgtggttgctccctgacgtcaccaagcatcctctgtgctgggtccctgccaggaccctgacaggtagggtgggcagggcggcgggggcctcctgcaggcacctggctccttgtggggaggctcggatggcagacaagcatgcagaggtgtggaaagatgtccacccgcggcagcaggcatggcacagtcagagggtggggctgggtgggggggcaggaaaggctcctggtggaaggtgagacagagagagtcactgagagaacagggcaagaaggtggctggctgtgtgagggaacgaaaagtgcagtcgtacccttgtgaagctgagtggggccccatgggcctggccccacctgttgtccagagcatgcccctgcccccaggtgatggaggactccatgagctcggccaccaccc

SEQ ID NO: 16796 - DNA, 2300 bp, Homo sapien
tgcaacctctgcctcccaggtttaagcgattctcctgtctcagcctcccaagtagttagaattacacgtgcacgccaccaggcccagctaatttttgtatttttagaagagacggggtttcaccatgttggccaggctggtctcaaactcctgacctcaggtgatcaaccaacctcggcctcccaaagtgttggggttacaggcgtgagccaccacatccggcctcccaaagtgctggaattacagccgtgagccaccgcgcccggcctcccagagtgctggggttacaggcctgagccaccacacccggcctggccagcatattttttgtggcgggaggtagatgttatctttcatcttctctcagggcagaaaatctctacacatttccttcatgatgatgacacggtggtactatagcttttcacacttctaactaaaagaattttttttgagacggagtctcgctctgtcgcccaggctggagtgaagtggcgcgatctcggctcactgcaagctccgcctcccgggttcacgccattctcctgcctcagcctcccgagtagctgggactacaggcacccgccaccacgcctggctaatatttttgtatttctagtagagatggggtttcactgtgttagccaggatggtctcgatctcctgaccttgcgatccgccggcctcggcctcccaaagtgctgggattacaggcgtgagccaccgcgcccagcccttcaaaaagtatttttaaaagcctgcccatcacaccagcccaacgatgtttcagcaaacataggacttcattttgccagattcttcctgttctttggtatccctgagcacacagccggctagccccagatgtagaaggtaagaattagggcgacccattgagcacagaaacgcttgtgctggctcctgctcaaacctctgcttccccacatggagaatggacgcaaagagctgctgtgaccagggcctggcactcagggagcgctttctgtctgagtccttctgatttgcagtgatgctgtttggggcagggggtgcaactgtcactttttctggtgccctctgacccgacattccaagtcccgaaaggccgaacaggcatcgcacagtcccccctaccgagctggcgggaaagggcgcctgacgctgaggagtgccaggggcgggggaaagggtcctgggtcggtggtcgggggtccaggccctgggcaaggggtcctgggtcgggagtctaggtcccgggtccatggttgggggtcagaggtcgaggccccggggaaggcataccgggttgagatttggggatggaggccccggggaaggggtcccgaatcgggggtcggggatcgaggcctggggggaggggtcccgggtcgagggtcgaggcccggggtaaaggatctcgggttgggggtcgggggcctgggaagggtcccggtcggtggtcgggggtcgaggcccgggagaaggggtcccgggtcggtggtagaggccctggggaaggggttccgggtcggggatcgagggtcgaggcccgggaaaaggggtcccgggttggtggtctaggccctggggaaggggttccgggtcgggtatcgggggacgaggctcgggaaaaggggtcccaggtcggtggtcgaggccctggggatggggtccgggtcggggatcgggggacgacgaccgggaaaaggggtcccaggtcggtggtcgaggccctggggatggggtcccgggggatcgacggtcgaggcccgagctctcctgagtcctgcccgcggccccaggtgggcggagcccacgccagtgggagaagcggccccgccccgcgcgcgagtccccggaggacggccgcgacctcttaccgtccatggccacaatgacaggagcagcactcggagagggagaagggacgccaactccgggcggtgtcaggtcccggcggcgatcgaaccgaccaagctgcacccggcggggacttccggggtcgccgccccacttccggtcgcacgggatgctctcgcgagaggatggtggccggtcccgccagaggggcggggcgcggctgcgcggcgcgcggtcgccatggtgacgcacgccgctggcgcgaggaccttttgtgagtcgctcccggctccgcggccgcggaggtgtggggacccgggcttgcgtcggagggggcggtgggctcacccatgggcctttccaaaagcaaagagaaacccaggaaaggtaaaggaggcgcaggcgctgggctccccgcgtctccgcccctgggcgcgggc

SEQ ID NO: 16797 - DNA, 2300 bp, Homo sapien
tccatcctccggtggggggttgcgccctcctgtgaggggttccaccctccagtgggaggttccaaagttgggaattcaaatccaagtctttcttccaagtccaaggcccagagcctcctactttcagcccttgatcctacaagcgtgtcagtgtgaagcagtccaggcccagctcctctgcctagcaggccagtcatccccctgacattctttcttgtctgacccgagtggttctctccttattatttttttttttttctgagacagagtctcactctgtagcccaggctggagtgcagtggtgcgatctcgctcaccactacttctgcctcccgggtcccggttcaaggttcgagcaattctcctgcctcagcctcctgagtagctgggattacaggcacatgccaccacgcccagctaatttttgtatttttagtagagacagggtttcaccacgttggccaggctggtcttgaactcctgaccttaagtgatccacacgcctcggcctcccaaagtgctgggattacaggcgtgagccactgcgcccagccgagtggttcattcttgtgatgaaacttaaaacacctcctcctggcacaggcccccaatctcctcggacggcaggctctgcgggttctccctgcctgacccttctgcaattcctactgcaaggccttgctggctcccactgggccacagcaatgggtctctgaccgggccacctcccctgcgaactggcttcccctgttggtaggcacagacctcatcatgccgcccttgttttttatttttaaatatttattttttgtagagacagggtctcactatgttgcccaagctggtcttgaactcctgggctcaaaagatcctcctgcctcggccaaataactgggaggacaggtgtgaactaccgccccaggcagcacctccgttgtttaaaatatttaacgcttccagctccacgtggtaaaactgatggaaaactttgtattctagcttcttcctacttttggggcctcatcttccccacacacacccaaaggtctggccacactaggctgttataaaagacacctttgtcgcacccaggttctactcctcggtcaccctccgcaatgtacttatccccacagccctcggagagctacagtccagcctgggacggcctcccaatgctctgttccagtgtgcggaggctcagggattctcagtggcaccaagatacccagccctcgaggagaacctcaggtgagacacacgcacactgccccagcccctcgaccacctggtacgcacttatcactcgggaactgacctacattttcattaaacttatgttttcaactaagatttctggatatttacctcctacataaagttcccaaaacaaaccagtttcatctttacggcgcgtgcctgctactagtgtccatccggtagggtcttacagtaggctcctcaccccagccccagatcctccaagccactgacctcgcttcgctccctcccgccgtctcctaccttccagcgaagctgccggcggcgggtgcttggctgtcccggcccccgggtggaggctgtccacaggcttctccgactccctgtctgcctgcctggcttcctgggaatgcttctccatcaacttctccttagattttggaactgaataggtggatcccttcttttgctcctcacctgaaatatatggatcatccgttagacccgggacttaccgaatgcagggcagtgggtcccatcgtcttcagtcgcctgcgtggatccagaataagctggcttcaagtctcgagtctccgcgtttccgtaaccgcctcaggcgggaaacgcgccgtccgtggcggactcggcggcaggaacggttcgcaccgggccgagcctggcgcctgcgctcacaccgccccgcccagcccagccccgccctgggcccgcgcccaggggcggagacgcggggagcccagcgcctgcgcctcctttacctttcctgggtttctctttgcttttggaaaggcccatgggtgagcccaccgccccctccgacgcaagcccgggtccccacacctccgcggccgcggagccgggagcgactcacaaaaggtcctcgcgccagcggcgtgcgtcaccatggcgaccgcgcgccgcgcagccgcgccccgcccctctggcgggaccggccaccatcctctcgcgagagcatcccgtgcgaccggaagtggggcggcgaccccggaagtccccgccgggtgcagcttggtcggttcgatcgccgccgggacctgaca

SEQ ID NO: 16798 - DNA, 2300 bp, Homo sapien
tttgaggcagagtttcgctcttgttgcctaagttggagtacagtggtgtgatctcagctcactgcaacctctgcctcctaggttcaagcaattcttctggctcaggctcccaagtagctgagattacaggcgcccacaaccatgcctggctaatttttgtatttttggtagatacgtggtttctccatgttggccaggctggtctcgaactcctgacctcaggtgatcgacctgcctcggcctcccaaagtgctgagattacaggtgtgagccaccgcacccagccttatggccttattttttttgtttttttttagatggagtcttgttctgtcacccaggctgaagtgcagtggtgtgatctcggctcactgcaacctccacctcccaggttcaagcagttctcctggctcagcctcccaagtagctgggatcacagacgcacactaccatgcctggctactttttgtatttttaggaaagatgaggtttgccatgttggtcaggctggtcttgaactcctgacctcaagtgatccgcctgccttggcctcccaaagtactaggattacaggcgtgagccaccacacccagcctgaaaattatatcttgtgctcaagatgattacaatttaatagatttgtttataaaattttagagagatttaattggccttatgctgtctttatcttttgagaagaaattccctcaaagaataaaggtttctacatttttttttgaaatctttgagttatctcagcaccataggaaaggtaaaaacagaaaaaaaaaaagaaaataaaaaaagaaatctgtgagttatcactgtggctaagtgaatgacttattttacaatgacctgtgatcctatttagtgatagcaactgttttaaaactttttctaggccaggcacggtggctcacacctgtaatcccagcactttgggaggctgagatgggcaaatcaagaggtcaggaaatcaagaccatcctaactaacatggtgaaaccctgtctctactgaaaatacaaaaaattagctgggcgtggttgcaggcgcctgtagtctcagctgcttgggagactgaggcaggagaatggcgtgaacccgggaggcagagcttgcagtgagccaagattgcagcactgcactccagcctgggtaacagagcgagactctgtctcaaataaaaacaaaaacaaaacaaaacactttttatatttgacaaactttccaaaatcaaattctttcttcagtcctcattaatttttgtgtgtgtgtgtctgatggagtctcactctgttgccccagctggagtgcagtggcacaatctcggctcacttcaacctccacctcccaggttcaagcgattctcctgcttcagcctcccaagtagctggaactacaggtgcccgccaccacacctggctaatttttatatatttttttctttttgagatagagtcttgctctgtcaccaaggctggagtgcagtggcacgatctcagctcactgcaagctccgcctcccgggttcataccattctcctgtctcagtctcttgagtagctgggactacaggcgcctgccaccacgcccagctaattttttttttttgtattttttagttgagacagggtttcactgtgttagccaggatagtctccatctcctgacctcatgatccacctgcctcagcttcccaaagtgctgggattacaggcgtgagtcacctgcctcagcctcccacagtgctgggattacaggtgtgagccactgcgccaggcctcccaaggtgttgggattacaggcgtgagccaccgctccgggcctcccacagtgctaggattacaggtgtgagctgctgcacctggcaattttttgatattaggtcccctgaagtccaaaaagagatatatggcttatttggtataatgaaatcatacaggaagcattgttaaaggtgaaatggtgtttttcttgggattatatttatataaatgtgttgttagtgtgtgttccaaaattgtatgagatgcctgtgattctgatacatcttagtatatggtattagtagtaattatgattattatgtaaaattgttgtatgccacataagtaaccaaatttgcttgtcaattatgtcttttttttttcttttttctgagacagagtcttgctctgtggcccaggctggagtgcagtggtacagtcttggctcactgcaacctctgcctcccaggttcaagcgattctcatacctcagcctccagagtagctggactgcaggcgcatgctacca

SEQ ID NO: 16799 - DNA, 2300 bp, Homo sapien
tgtagtggtgtgatcttggctcactgcaagctccgccccgtgggttcacaccattctcctgcctcagcctcccgagtagctgcaactacaggcacccgccaccatgcctgcctaattttttgtattttttagtggagatggggtttcactgtgttagccaggatggtctctatctcctgacctcgtgatcgacccgcctcagactcccaaagtgctgggattacaggcatgagccaccacgcctggccaacacccccattttgtataccacactcaactcccccattttctacatgctgatcaaaaccaatctgaatggagtctaggtctggctgtgggctgttgggaagaggcccccaaatctggccatcaactggccgcaaaactggccataaacaaaatctctgctgcactgtgacatgctcatgatggccatgactcccacactggaatgagggcaaggaacacctggcccacccagggcggaaaaccgcttaaaggagttcctgaaccacaaacaatagcatgagcgatctgtgccttaaggacgtgctcctgctgcagataactagccagacccatccctttatttcccgtaagaagtgcttttaatctataatctatagaaacaatgcttatcactggcttgctgtcaataaatatgtgggtaaatctctgttcgaggctttcagcttcgaaggctgtgagacccctgatttcccactccacaccctatatttctgtgtgtgtttctttaattcctctagcgccgctgggttagggtctccacgaccgagctggtcccgcagtgggcagtggtttgggcccgaccgagctggtcccgcagtgggcggtggtttgggcccgaccgagctggtcccgcagtgggcggtggtttgggcccgaccgagctggtctcgcagtgggcggtggtttgggcccgaccgagctggtctcgcagtggtttgggccctgcttgctcgactggatttcaacagtgaagccagattagaggacatgctggctgccccgatcctggacctggaccaatggtgcttcctaaacattccatgtcaacttttctttttccaccttccagggctgggctgtgaaagagattggagaggcaggtgcctgtgagagaagcttctaccagcctgggaagtcaggtcttccatgagtgaggggaggtatctactttgccaaaccttgttagggaatgctgacatagctgcctcttcctgcccagaagctaagcttgaatgccacccctcacagagcttctctcctgtctttcactcactcctgcttatttctgtgacagaacttgacagcatggacattgccacttgcttccttcagtctcctggagtccccatgtcctgaacacagaggaggcacccaaatgcttgctgaagccacatccctggaccaagtgacctgaccctcacctggaggaccttcaccttcacctctcacctggaggaccctctcacctggaagactctctcacctggaggaccaccccacctgaaggactcccaactggaggaccctcttacctgggggaccccctccgctggaggaccctctcacctggaggaccctcttacctggagggcccttcacctgggggactcccccacctagaggatcctcttacctggaggtcccctcacctggggaaccccccccccacctagaggatcctcttacctggagggcccttcacctggggaaccccccccccccacctagaggatcctcttacctggaggaccccccaccgagaggaccctccccccccacctggaggacctccccacatgaaggactcccacctggaggaccttcttacctgggggaacccgtctcacctggaagaccttcacctgggtaatcgccgtggcctcccactacggcgcagccgggtcggctgcccgggcttcaccctaaaataaggcccgaactgcagcagtcggagccgatccctggagcccagcgcctagggcggacccgcgggagcgtctcttggtaaccgttgctaaggagaggaagcccgggaaggagctttcgcgcctgcgccgcggggccgtccgcgtctgcgcctgcgcgcaagagaggcggggccagcgctcggcatggcggagccagatctggagtgcgagcagatccgtctgaagtgtattcgtaaggagggcttcttcacggtgcctccggaacacagggtgcgcggggtgccacccgggcagctctgcccgcctcgctagcggcactgcccggctgggtctggggagcct

SEQ ID NO: 16800 - DNA, 2300 bp, Homo sapien
gcagaggctgctgtcccagcatccctgtatcactacctcctggaagttatgaaacgctacccagtggcatctggccttggaatgtgagctgaagggaccgtgtgacttccaggtgaaaggaagctttcacctcttctcacctcagtgacgggaagaaaaaatggaaccagaatgcctgacccacctgtgcaaaacaactgcttctctccagaatgttaggggagagtgaaaaaaggcatcatcttgaggccctgtattttggggtctctgaactagtagagtctgtatccttctccatggatctaagaagcacatgtaagccgggcgcagtggctcacgcctgtaatcccagcactttaggaggctgaggtgggtggatcacgaagtcaggagatctagagcaccctgactaacacggtgaaactccgtctctactaaaaatatgaaaaaattagctgggcgtggtggcgggcgcctgtagtcccagctgcttgggaggctgaggcaggaggatggcgtgaacccaggaggtggagcttgcagtgagccgagactgcgccactgcactccagcctgggtgacagaatgagactccgtctcaaaaaaaaaaaaaaaaaaaaaagcacacgtagcaaggtttgaaacctcacagcccccatttcccggcttcccttctcttaaccctcagtatcaaacctgggctcaagcaatcctcccacctcagcctcccagattgctgagattacaggtgtgagccactggccgcatttgtcctcagtctgattccttcctgacacctggggaccgagtcagaagcatctggcctgtcactcactgatggcctagtctcaaactccctttcccgccttaattccccttctcacatcctctgcttgtgctcttctcgacacgcttatttctgggtgtccaaatccttgtcacacttcctgaactcaaagaaatgccaggccaggctgggggcggtggctcacgcctgtaattccagcacttgggaggccgaggcaggaagatcacttgagcccaggaggctgacgatgcactgagccgtgatcacgccactgcattccagcctgggcgagagcgctagaccctgtctcaaaaaaacaacaaaaaagaaaaggccaactcactacttcaccccagagtccagcacacggctctcaacgcggtgagcgcctgctgcacgtctggatgagtaaagtgtggctcctgttgtcatccagccacgatctgttaatgattcttactgaacacgtggcttggcctctcagagcaccagccagcagttaaaaacacaaaccagcggccaaagttcagggctctccacccccaccagccgtgcacctgggcaacaccgcccaacgcccagaggctctctcctggtctctgcagagggaggcaccggcacctccgcaagggacgcgcccagggttcgcgtgaagccgccaggcagcgctggaccccgctccatgcagcccaagcccagcgggagccttcaagctcgaactcgtcgcgggtgtaaattctccccacaaacaagtggctcgcggctcagcctgcaaagcccagctcgggcgctgaacccagcagcgcccgagctggatcccggagcttgctcttcccaagtcccgggcccgtctctccgcgggcgcgaggcatccctgagcccgccccggcccctcagatctccagggaccggctgtcgggggtcctgagcccgccccgccccggcttccgcccccgccgcggggaactctgggactgtcgttcccgcccgtgccggaagcctcggcgcggcagcgcgacacgaggctccccagacccagccgggcagtgccgctagcgaggcgggcagagctgcccgggtggcaccccgcgcaccctgtgttccggaggcaccgtgaagaagccctccttacgaatacacttcagacggatctgctcgcactccagatctggctccgccatgccgagcgctggccccgcctctcttgcgcgcaggcgcagacgcggacggccccgcggcgcaggcgcgaaagctccttcccgggcttcctctccttagcaacggttaccaagagacgctcccgcgggtccgccctaggcgctgggctccagggatcggctccgactgctgcagttcgggccttattttagggtgaagcccgggcagccgacccggctgcgccgtagtgggaggccacggcgattacccaggtgaaggtcttccaggtgagacgggttcccccaggtaagaaggtcctccaggtgggagtcct

SEQ ID NO: 16801 - DNA, 2300 bp, Homo sapien
atcagaagaagaataaagatgagacttacgaagttagctgtcctgaggactggtgtggacccatggtggcactgggcaccaagagtgagttcagtaaacagtaagtaaaagagctccctgtccagaggtggccacctagataactcagggagatccaccgactgcatcacgatttttttttccagacattctcgctctgtcacccaggctggagtgcagtggcacgatcttagctcactgcaaccgcaacctctgcctcccaggttcaagtaattctcctgcctcagcctcccaagtagctgggcttacagacatgtgccaccacgcccggctaactttcgtatttttaatagagacggggtttcaccatgttggccaggctggtcttgaactcctgacttcaggtgatccgcccgcctcggcctctcaaagtgctgggattacaggcgtgagccaccgcacccggtcatgatcactatttctaagatgccagcagggaacttccaggtaaaaaatctaagaaaaaggggggacctcgccgcccaggcccagggaaagtttcaacaaacttgggccttggttttggtggcctggagagatgagggacacagacgtgaagtagcaaagcctgcccaaagcgggggtgtggggtaggggtgggtttcggctgggacctccaagggtctccctcatcctcctctacttctgggcaatgcgagaaagtggctgtagcacagaacagaggaacccgagcgaagaaaacgtccccgggaagtcgtggcccagatttagcctgggtggatccgcagcccaggtcagcttttagcctagagaggggggcggcttcgccctgcctcagagacccgcccagacgatgctctcaagggctgcagatggcaagtgcaggaggccgggaagcggagccagcataaacagaatctgaggtccccgcatccacctgaggctgctgtttcagacgaggctgaaaggcttgtccttccgcccaccttccgtgccgcgggcccctccctcaaggggatggccccgccccacaggggaggcccgcccccggatccggccaatccccgccaggtaatgcaggtggccccgccccgcaggaaaggctcttcccaggatccagccaatccccgccaggtaatgccggtggccccaccccccaggggacgagcccgcgcacctgcttccccgcggccgggtcgcctggggctgggtccctgtctcgtggggaggagcggcccaggcacaacgttccctgagcgcctgccatgagcccgcagccctcggcccagcggcgtcgtgaacgataccggtcccgcgaggagacgggcgacgcggtgacaggaggctctcggggtgcctcgcgcaggggctcggccgggctgacacctcctcctcccctttcaccaggccccgcccctcctaaattattcggaggcggggcctgcgccaagccccgccccgcccccagcgtcacggccgcggaccccgggcggagccgactcccggcggaagcgcgcggcgcgcggggaggcccgaactgatccgcggcggccggagaccgctggggacagacaggtagcgccgtcacccgcgggatccgcagctccatctgccgggcgaaggggctctggtcgggagagggctcagcgggcggaagcgcgtctctagagaagggtgcggtcgataaccgggggcgcccctggaaggccgaggtacccaggctggagggaggggctggaggtgcgggggcgctcaactggaggggcctggatcgctgggtgggcgggcagctgatggggccgaggtctccagcgtagggggtgccgaagataccgggggcgcccagccgctgggggcggggtctccaggctcgaggggtcctggggacgctgggtgagggttcggggagagcgcggcgggctgggcgcggccttaggtccctgacccccccgacccccgtccgccgcaggatgggcagcagctcgctgtccgaggactaccgccagtgcctggagcgcgagctgcgacggggccgcgcgggcgtgtgcggggacccctcgctgcgcgcggtgctctggcagatcctggtggaggacttcgacctgcacggggcgctgcaggacgacgcgctggctctgctcaccgacgggctgtggggccgcgccgacctggcgcccgcgctacgcggcctggctcgcgccttcgagcttctggagctcgccgcggtgcacctgtacctgctgccctggaggaaggagttcaccaccatcaaggtaggc

SEQ ID NO: 16802 - DNA, 2300 bp, Homo sapien
tggctgggttctgagggtgtgttagtccgtccccatgctgctgtaaatagctgcctgaggctggataatttataaagaaaagacgtttaattgactcacagttccgcatggctggggaaggcctcagcaaactcacaatcatggcagaaggcgtctcctcacagggcgacaggagcgagaatgagcactgaacaaaggggagaaccccttataaaaccatcggatctcgtggaattcactatcacgagaacagcatggaggaagctgcccccaagatttaattatctccacctggtcctgctccagacctgtgggattacaattcaagatgagattttgggtgtggatacagaaccaaaccatgtcagaggccaaggatctcaagacaaggccagggtatggcatgtttatgatttagccttggaattcattccacatcagttctattccatgggttgaggcaggtgcaaaaacccacccaggcctatgggaggagagctaggcccactgctggatggatggactggtgttgccaaattcagtgaggacaaaggcagaacagttacctccaccctcctccgcatcagaagaagaataaagatgagacttacgaagttagctgtcctgaggactggtgtggacccatggtggcactgggcaccaagagtgagttcagtaaacagtaagtaaaagagctccctgtccagaggtggccacctagataactcagggagatccaccgactgcatcacgatttttttttccagacattctcgctctgtcacccaggctggagtgcagtggcacgatcttagctcactgcaaccgcaacctctgcctcccaggttcaagtaattctcctgcctcagcctcccaagtagctgggcttacagacatgtgccaccacgcccggctaactttcgtatttttaatagagacggggtttcaccatgttggccaggctggtcttgaactcctgacttcaggtgatccgcccgcctcggcctctcaaagtgctgggattacaggcgtgagccaccgcacccggtcatgatcactatttctaagatgccagcagggaacttccaggtaaaaaatctaagaaaaaggggggacctcgccgcccaggcccagggaaagtttcaacaaacttgggccttggttttggtggcctggagagatgagggacacagacgtgaagtagcaaagcctgcccaaagcgggggtgtggggtaggggtgggtttcggctgggacctccaagggtctccctcatcctcctctacttctgggcaatgcgagaaagtggctgtagcacagaacagaggaacccgagcgaagaaaacgtccccgggaagtcgtggcccagatttagcctgggtggatccgcagcccaggtcagcttttagcctagagaggggggcggcttcgccctgcctcagagacccgcccagacgatgctctcaagggctgcagatggcaagtgcaggaggccgggaagcggagccagcataaacagaatctgaggtccccgcatccacctgaggctgctgtttcagacgaggctgaaaggcttgtccttccgcccaccttccgtgccgcgggcccctccctcaaggggatggccccgccccacaggggaggcccgcccccggatccggccaatccccgccaggtaatgcaggtggccccgccccgcaggaaaggctcttcccaggatccagccaatccccgccaggtaatgccggtggccccaccccccaggggacgagcccgcgcacctgcttccccgcggccgggtcgcctggggctgggtccctgtctcgtggggaggagcggcccaggcacaacgttccctgagcgcctgccatgagcccgcagccctcggcccagcggcgtcgtgaacgataccggtcccgcgaggagacgggcgacgcggtgacaggaggctctcggggtgcctcgcgcaggggctcggccgggctgacacctcctcctcccctttcaccaggccccgcccctcctaaattattcggaggcggggcctgcgccaagccccgccccgcccccagcgtcacggccgcggaccccgggcggagccgactcccggcggaagcgcgcggcgcgcggggaggcccgaactgatccgcggcggccggagaccgctggggacagacaggtagcgccgtcacccgcgggatccgcagctccatctgccgggcgaaggggctctggtcgggagagggctcagcgggcggaagcgcgtctctagagaagggtgcggtcgataaccgggggcgc

SEQ ID NO: 16803 - DNA, 2300 bp, Homo sapien
gttgtacagctgggtccatacctgtacagggccagcagcagaggccacagcggggagaaaaagggttcctcaatgcaggccaggcagcggtccttggaggcagctgtgtttaggccttcgaaggccagaagggtcagcgagagcagcctgtctgctaggaacagagccggggacgtccacagaggctcctcccctgctgggtcaagtggctctaagccacggggcctttctccgcccaagaaacctctttccaccgccttcaagcctcctgcacccacccctgaccctcctcggcccagggcagggagtccgggactggaaacggtcacctacagctgctgccctgttgggccagcagcctgagaagaaaccggagaatgatccttttctcaaaaggggctttacccaaaactgcaggaaccagggaagactttagatccaaccccctgtgggtggggaccctgaccaagttccttagtgtgtgggcagcacagtgagaatgacgcctggactgttgggcctccctcagtggttcttagaaaactctgggctgggcgcggtggctcatgcttgtaatcccagcactttgggaggccggggtgggcagatcaactgaggtcaggagtttgagaacagcttgaccaacatggtgaaactccgtttctaccacactgtttccaaaatgagaagggctgaggcgtgagctgggtggatgtaagtctgatcagagtctctgatcaacagacccttccccaaacagaagcttgaaacggaccaataagcaggggtgaagagctgcggcggctctcccagggagggcctggcctcacctacggcattgtggatctcctccaccgcggtcttcagctgctgcagctggggctccggctgtaccccacggccccggccctgccgctcagacgtccccaggaactgctccaggtcctcgaacgagctgtccttgtctggcaatccagatgcggtgtcccccaggggtgagggagaccccacggggccgggttggagtgggggcgtggggggactgtcctggggccgcggggctgcgctgggctcgggcggggacagcatgcaatggaggctctgcgagggccgcagccgtcggcttccggggttgggggtcggggggcagcagcctggggctggcgcggctgctctgctcacggcgggatacagggcgctgtacacggagcactgcagccgcctcaggagctgcgcgatcgggtggtcggggaggctgcgggagaagaggacgtgagaacgcggccagcctcggcctctccgtggcatccacaggtgccgcgctatgcccggtttcagagaagcgacttgcattacctcctgacagtgaatgttggaaagtctgccccccgcccccgctggggaggttggagaagccgaggaaacgccctcagcgcaaagggagctgcagtgtccacgtggccgggcacaggctccctgtgtcagtccagcccctctccggcacctggcaccaggcagaggtgcccaaggccggtgcgcaggggctctgtggggcctgaaggcccagctacctgagcaggtgtgagaccaggctggtcacgagtgacaggtcccccggattcctcttgagcttggccttccagtgcttcggccagtcctacgggacagggggccttgaaggaaagcacggtgggtccgccacgaccggacgcgcctcatctcccaccagtgccgacccctagagactgtgggagcccgtcctggggtgcaggagacccagcgccagcaggccccgcgacccgcccccgcccccacccacacccgagggaaaccttaggcgaaccctgggcctgcaccctcgctgggaccctccctcctcgcagggaccctccctcctcgctgggaccctcccacgcgacccctgacctcgcctcctcgctctgccccgccccacgcagccctggccccgccccctcaccgggccctcccacgggcctctggccccgccccctcactgccccccacagcctctggctccgccccccacgggggcccacccaggcggctctgaccccgcccccctcgctgggctcctcctacaaagcctgggcccgtgggggacgcacatggtcctgttcgtactccaggatggcggcgtaaagggcccgctgctcccgttcctccggggtcagggcgacttggctgcaaaacctcctggggagaaaggcacgcggtgggtgccggggccaggccctccccgcagcggccccaggggcgggcaggagtcccacctgttggcg

SEQ ID NO: 16804 - DNA, 2300 bp, Homo sapien
tatacagttcccaacagccactccaccttgaaagctttgttccctcgtaccttcccactgtcagggacaatggaggacaaggaggaaagtcagagcctgacgcctggccaccctgccctgaagccacattgcagaaacaaggggactgggaagccaggccccgccagagcaggggcaggaggagtggacccttctcgtctctcccacttgggagtcactgggctttttgcatttgtgtctttgtatctttcatcagttctagacaactgtctgccattctaacttctaataatgcctctctcccattttctttcttctttttttttgagccggagtctcgctctgttgctaggctggagtgcagtggcacgatcttggctcactgcaacctccacctcctgggttcaagcgattctcctgcctcagcctcccaagtagctggggttacaggcacgcgccaccatgcccagctaagttttgtatttttagtagagatggggtttcaccatgttagccaggctggtcttgaactcctgaccttgtgatctgcctgccttggcctccctcccattttctttctggaactccaacgaacacgttaggctttccatctcttgttttctgtctttattttttgtttctgtaattcattctagctatcttttgaccttttttccaatacatgaatttgctcttcagctatatctgctctgctgttataaacttgtctgctcagttttgtatgtatggatttctacatatatatagatatataactcatccttgttcccagctaaatttttttttttttttttttgagatggagtcttgctctgtcgcccaggctggaatgcagtggcgcaatctcaactcactgcaacctctgcctcctgggttcaagggattctcctgcctcagcctcctgagtagctgggactataggtgcccgccaccacgcccagctaattttttgtatttttagtagagatggggtttcaccttgttggccaggatggtctcgatctcctgacctcatgatccacccacctcggcctcccaaagtgctgggattacaggcgtgagccaccgcgcccggtcattttttttttttttagacagagtctcattttgttgcccaagctggagtgcactggcacaatcacggctcactgcaccctcaacctgtcaggctcaagtgagcctcccacctcagcctccctagtagttgggactacaggggcacaccactatgcctaattttttttgagacggagtttcactcttgttgcccaggctggagtgcagtggcacaatcttcgctcactgcaacctccaccttccaggatcaagcgattctcctggactcagcctcctgagtagctgggattacaggtgcacaccaccacggccagctaatttttgtatttttagtaaagacggggttttaccatgttggccaggctggtcaggaactcctgacctcaggtgatctgctcgcctcggcctcctacagtgctgggattacaggcgtgagccaccaggccgcctgcatttgcttgtgtccggccaggggatattcccattctgggactcattttaaaaacattcgctgtcaggccaggcgcagtggctcatgcctgtaatcccagcactgtgggggccgggcgcggtgactcacgctgtaatcccagcactgtgggaggccgaggcaggcgcatcacgaggtcaggagatcgaaaccatcctggctaacatggcaaaaccccgtctctactaaaaatacaaaaaattagctgggtgtggtggtgggcgcctgtagtctcagctacttgggaggctgaggcagaagaatggtgtgaacccgggaggtggaggttgccgtgagccaagattgagccgctgcactccagcctgggtgacagagtgagactctgtctcaaaaaacaaaaaaaaaatcgctgtcatcagctcatctttctcagcctcaaaaacccaatcccaggctcatcccacctcccatcttgtccatcttacttcttacagctttgtgactctgccccctgaagcttctggaagatctcgggtggcagaaaaggagagagctttcctccttcatcggagtatacacggcggtgtcggccggcaggctggggaatgggagcagctgcaggcatggttggcttcaggcgtgttttccctgcaagccatgggtaaccaggggtcaagcggtgggccacatcccacagaggagatgcgggcttgggggatgccccaggagagccgcctactgcaggagaccc

SEQ ID NO: 16805 - DNA, 2300 bp, Homo sapien
gtttcaccatgttagccaggatggtttcgatctcctgacctcaggtgatagcccgcctctgcctcccacagtgctgggattacaggcgtgagccaccgcgcccggctggctgagccgtacctttagtggtttccacttcttctagtaacacctgggagatatagtggatgctcctcaggtattccgtgtatgcctcctgtgtccaggaaagagaaagagtggggtcaggccagtggagggaagtgactccattattccggccaggtgcccttgtgggataagcaaggaacaccaccacctgcttatctctgagatacacccagagacattgagcctgcggtggttagctgcagccggaacacggttttctgcgcagggcacaggcagcatcgctgctctccagacttggaaaagacatcaggacctgagagagagagagagccagggacgagctggacctcattttctcctctgactgcctttctctccagcacaggaactgatattctcattcagtgggcctggggaagtgacctcagcagtttgctgtcatttttcattctatgcaatgtttccttcttgtgcaactcaagggtgattcattcagtggcttaaaaaaatacttttctgagaggataaagggagtgatactggaagttttcaaatcacttcccggtttaagttccgagaaatccctttcccagaacctgcgagttacgtatttccagtgcacacaggagcctagaactgttacctttcaaggctgtgtgacccctctgacaaggcacaggtcattggaaccacagaatggtggtttgttttgttttgttgagacagagtctcactctgtcgcccaggctggagtgcagtggcaggatctcgagtcactgcaacctccgcctcctgggttcaagtgattctcatccctcagcctcccaaggagctaggattacaggtgtgcaccgccacacccagctaatttttgtatttttagtagagacggggtttcaccacgttggccaggctggtctcaaactcctcacctcaggtgatccaccgcctgggcctcccaaagtgtcaggattacaggcgtgaaccacagcgcccagcaatatgctatgtttttttgttttatccctagctgttaagtttcctatctttaagtctatgcctcagagagaaagacgaaatataatccaggcaggatttctgacttgcgggggcacctgctgccctaaaaaccaacttggggaaagcagcagattcaggaacgaggcttctcctaggcacaggcaggctccttccctccttgggcagccgggtgtggctgggccagcttctctacctggtcgccaaccttagattcggccccatctcaggaacgggccacacccctccggcctgcttttccttcctaagacgactgcaaacagcatcacaaatgagcaggtatgtggccttctctgcatgccgtcccctgtggcaaccggattaaatctaccatctctgcccagaaaaatgcacgaacgcacggacctgcccgtcactcggattttggaaggtggcctggcggaccctcctgctacatctcctctacaggtggagcccaggctgtgatgcaccggctcagcgagcggagtggaaagccaaggtccgcaggatctgagctgtccaaggtcactgcacgcccggctgcgccccgcccccgtcctcgcccgggaaccgcggcccgggatcccggctggcgcccgctcccaagtctccagcccgagccggccccgtcctcgccctccccgggcgggggtccctccaggggccaccctcagcggccaagccccgcccccgccccgcctcacccggggccggttgccggtgtccagctcgatggccccgttggcaagcttcatggcgctctgcagcggcttcaccgtgccgtccccggccgcagcggccatggcgccgagcgggggaggcggcggcggtagccgaggggctggacgggcgaccggaggcccggaacgcagccggcgctggtgctggagccgcccgagcagcggaccgcaggaagggacgcggccgcacttccggcgacgggccccctccgcgcgtactgcgggccccacgggtgttagtggcgggggcggcagagtccgggtgggttgtcgcgacggagccgggcctcttcgccgtcttgagacggggctggcgagaagggcccctcacggagttgccatgggcgtctaaccgcggcagccaggcccctctctacgtgagaccccggcccccctcccctttctgca

SEQ ID NO: 16806 - DNA, 2300 bp, Homo sapien
caatgtttccttcttgtgcaactcaagggtgattcattcagtggcttaaaaaaatacttttctgagaggataaagggagtgatactggaagttttcaaatcacttcccggtttaagttccgagaaatccctttcccagaacctgcgagttacgtatttccagtgcacacaggagcctagaactgttacctttcaaggctgtgtgacccctctgacaaggcacaggtcattggaaccacagaatggtggtttgttttgttttgttgagacagagtctcactctgtcgcccaggctggagtgcagtggcaggatctcgagtcactgcaacctccgcctcctgggttcaagtgattctcatccctcagcctcccaaggagctaggattacaggtgtgcaccgccacacccagctaatttttgtatttttagtagagacggggtttcaccacgttggccaggctggtctcaaactcctcacctcaggtgatccaccgcctgggcctcccaaagtgtcaggattacaggcgtgaaccacagcgcccagcaatatgctatgtttttttgttttatccctagctgttaagtttcctatctttaagtctatgcctcagagagaaagacgaaatataatccaggcaggatttctgacttgcgggggcacctgctgccctaaaaaccaacttggggaaagcagcagattcaggaacgaggcttctcctaggcacaggcaggctccttccctccttgggcagccgggtgtggctgggccagcttctctacctggtcgccaaccttagattcggccccatctcaggaacgggccacacccctccggcctgcttttccttcctaagacgactgcaaacagcatcacaaatgagcaggtatgtggccttctctgcatgccgtcccctgtggcaaccggattaaatctaccatctctgcccagaaaaatgcacgaacgcacggacctgcccgtcactcggattttggaaggtggcctggcggaccctcctgctacatctcctctacaggtggagcccaggctgtgatgcaccggctcagcgagcggagtggaaagccaaggtccgcaggatctgagctgtccaaggtcactgcacgcccggctgcgccccgcccccgtcctcgcccgggaaccgcggcccgggatcccggctggcgcccgctcccaagtctccagcccgagccggccccgtcctcgccctccccgggcgggggtccctccaggggccaccctcagcggccaagccccgcccccgccccgcctcacccggggccggttgccggtgtccagctcgatggccccgttggcaagcttcatggcgctctgcagcggcttcaccgtgccgtccccggccgcagcggccatggcgccgagcgggggaggcggcggcggtagccgaggggctggacgggcgaccggaggcccggaacgcagccggcgctggtgctggagccgcccgagcagcggaccgcaggaagggacgcggccgcacttccggcgacgggccccctccgcgcgtactgcgggccccacgggtgttagtggcgggggcggcagagtccgggtgggttgtcgcgacggagccgggcctcttcgccgtcttgagacggggctggcgagaagggcccctcacggagttgccatgggcgtctaaccgcggcagccaggcccctctctacgtgagaccccggcccccctcccctttctgcagcccgcccgccacctgcgcgccgcgtggcctccgccggcgcctgcccgccccgcgcctccgtctcccacggtaagaggcggtgagggccgcgtcgcctctccctggaggactcgtcgtgaggtgtcggcgagcccctccgcccaccgccccgccccaggccagcgctccattggcgacagaggcgggcacggccgccctcgggcccgagaggggagcggtacgagcgggggcgctggcaccgcgggtggaacctcggccggcggggtcccgcccctggcccctggcccgccccgcccgcctcgctttgcttctcgctccgcccctcccccgccccgcctcgcttccagcgcgccgagcggagcctaacgccgggtcctctaggaacctcgggccgggcagcacccgcgggattctgctggcgtcctccgctgccatgaagcgggaccggctgggccgcttcctgtctcctgggtcgtcccgacagtgcggggcctcggacggcggcggcggcgtcagccggactcggggccgcccttcccttagcggtgggccgagggtggacggg

SEQ ID NO: 16807 - DNA, 2300 bp, Homo sapien
gaccccaccgggccccaggcgcgccgcgccgtcgccccgtccaccctcggcccaccgctaagggaagggcggccccgagtccggctgacgccgccgccgccgtccgaggccccgcactgtcgggacgacccaggagacaggaagcggcccagccggtcccgcttcatggcagcggaggacgccagcagaatcccgcgggtgctgcccggcccgaggttcctagaggacccggcgttaggctccgctcggcgcgctggaagcgaggcggggcgggggaggggcggagcgagaagcaaagcgaggcgggcggggcgggccaggggccaggggcgggaccccgccggccgaggttccacccgcggtgccagcgcccccgctcgtaccgctcccctctcgggcccgagggcggccgtgcccgcctctgtcgccaatggagcgctggcctggggcggggcggtgggcggaggggctcgccgacacctcacgacgagtcctccagggagaggcgacgcggccctcaccgcctcttaccgtgggagacggaggcgcggggcgggcaggcgccggcggaggccacgcggcgcgcaggtggcgggcgggctgcagaaaggggaggggggccggggtctcacgtagagaggggcctggctgccgcggttagacgcccatggcaactccgtgaggggcccttctcgccagccccgtctcaagacggcgaagaggcccggctccgtcgcgacaacccacccggactctgccgcccccgccactaacacccgtggggcccgcagtacgcgcggagggggcccgtcgccggaagtgcggccgcgtcccttcctgcggtccgctgctcgggcggctccagcaccagcgccggctgcgttccgggcctccggtcgcccgtccagcccctcggctaccgccgccgcctcccccgctcggcgccatggccgctgcggccggggacggcacggtgaagccgctgcagagcgccatgaagcttgccaacggggccatcgagctggacaccggcaaccggccccgggtgaggcggggcgggggcggggcttggccgctgagggtggcccctggagggacccccgcccggggagggcgaggacggggccggctcgggctggagacttgggagcgggcgccagccgggatcccgggccgcggttcccgggcgaggacgggggcggggcgcagccgggcgtgcagtgaccttggacagctcagatcctgcggaccttggctttccactccgctcgctgagccggtgcatcacagcctgggctccacctgtagaggagatgtagcaggagggtccgccaggccaccttccaaaatccgagtgacgggcaggtccgtgcgttcgtgcatttttctgggcagagatggtagatttaatccggttgccacaggggacggcatgcagagaaggccacatacctgctcatttgtgatgctgtttgcagtcgtcttaggaaggaaaagcaggccggaggggtgtggcccgttcctgagatggggccgaatctaaggttggcgaccaggtagagaagctggcccagccacacccggctgcccaaggagggaaggagcctgcctgtgcctaggagaagcctcgttcctgaatctgctgctttccccaagttggtttttagggcagcaggtgcccccgcaagtcagaaatcctgcctggattatatttcgtctttctctctgaggcatagacttaaagataggaaacttaacagctagggataaaacaaaaaaacatagcatattgctgggcgctgtggttcacgcctgtaatcctgacactttgggaggcccaggcggtggatcacctgaggtgaggagtttgagaccagcctggccaacgtggtgaaaccccgtctctactaaaaatacaaaaattagctgggtgtggcggtgcacacctgtaatcctagctccttgggaggctgagggatgagaatcacttgaacccaggaggcggaggttgcagtgactcgagatcctgccactgcactccagcctgggcgacagagtgagactctgtctcaacaaaacaaaacaaaccaccattctgtggttccaatgacctgtgccttgtcagaggggtcacacagccttgaaaggtaacagttctaggctcctgtgtgcactggaaatacgtaactcgcaggttctgggaaagggatttctcggaacttaaaccgggaagtgatttgaaaacttccagtatcactccctttatcctctcagaaaagtatttttttaagccactgaat

SEQ ID NO: 16808 - DNA, 2300 bp, Homo sapien
accctcctgctacatctcctctacaggtggagcccaggctgtgatgcaccggctcagcgagcggagtggaaagccaaggtccgcaggatctgagctgtccaaggtcactgcacgcccggctgcgccccgcccccgtcctcgcccgggaaccgcggcccgggatcccggctggcgcccgctcccaagtctccagcccgagccggccccgtcctcgccctccccgggcgggggtccctccaggggccaccctcagcggccaagccccgcccccgccccgcctcacccggggccggttgccggtgtccagctcgatggccccgttggcaagcttcatggcgctctgcagcggcttcaccgtgccgtccccggccgcagcggccatggcgccgagcgggggaggcggcggcggtagccgaggggctggacgggcgaccggaggcccggaacgcagccggcgctggtgctggagccgcccgagcagcggaccgcaggaagggacgcggccgcacttccggcgacgggccccctccgcgcgtactgcgggccccacgggtgttagtggcgggggcggcagagtccgggtgggttgtcgcgacggagccgggcctcttcgccgtcttgagacggggctggcgagaagggcccctcacggagttgccatgggcgtctaaccgcggcagccaggcccctctctacgtgagaccccggcccccctcccctttctgcagcccgcccgccacctgcgcgccgcgtggcctccgccggcgcctgcccgccccgcgcctccgtctcccacggtaagaggcggtgagggccgcgtcgcctctccctggaggactcgtcgtgaggtgtcggcgagcccctccgcccaccgccccgccccaggccagcgctccattggcgacagaggcgggcacggccgccctcgggcccgagaggggagcggtacgagcgggggcgctggcaccgcgggtggaacctcggccggcggggtcccgcccctggcccctggcccgccccgcccgcctcgctttgcttctcgctccgcccctcccccgccccgcctcgcttccagcgcgccgagcggagcctaacgccgggtcctctaggaacctcgggccgggcagcacccgcgggattctgctggcgtcctccgctgccatgaagcgggaccggctgggccgcttcctgtctcctgggtcgtcccgacagtgcggggcctcggacggcggcggcggcgtcagccggactcggggccgcccttcccttagcggtgggccgagggtggacggggcgacggcgcggcgcgcctggggcccggtggggtcctgcggggacgcgggcgaggacggcgcggacgaggcaggtgggtccgcggcccgggcgtggcgggttggggtcgcggcaggggttgctcgtgggaggagccgcactgacgcccggaagccggcgcggcctctcctccacccggccaagggcgtagcggactcggggctgcgtcgggataggcgctgggcggccggctcggttttcctcgcgctccgtgacgccggcgtcgccggcccggcctccccggccgcgggctcggccagaagggacccggcgtgaggagcgctgtcaccgcgggcaggtcgccctggggtgcccgcgcgtgggaatcgccctcccctgcttcgtgccctcgcggagccggaaaggaggcggcacctgcaattggcagacaggaaaccgcggcgtttcctggagggcgcagcgcctgccccgggtctcgcggtcgctgggaggagggtgcagttccaggtttcactcttgaagttgcttcgctggagaggccttagaggcctttgaaatttgaaagatttcttggaccagcggccacatcccccacagggcggcttgtcccgccgagagccgcgcgcccgagccgcttgctgtgtccgggagccgcgcgaagggcgctgcaggcgctgccctcggacctggagtccgggacgccctgtgctcaggagcctcctttgccagctgctaacacttcctgccgctctgtgcaggagcaggccgggctctcgccatgggtcactgtcgcctctgccacgggaagttttcctcgagaagcctgcgcagcatctccgagagggcgcctggagcgagcatggagaggccatccgcagaggagcgcgtgctcgtacgggacttccagcgcctgcttggtgtggctgtccgccaggaccccaccttgtctccgtttgtctgcaagagctgccacgcccagttctaccagtgccacagccttctcaagt

SEQ ID NO: 16809 - DNA, 2300 bp, Homo sapien
gcggatctcccgagcccagtgaaacgtggcttccctcagtgagcgggaggcgggggaggggcaggcgggcaggtgagaaggtgggtcctcctggtgctttggagctgggacctggtctcggcactgtgaggctgcctcagagtcccagcagtggatggcaggtgtctctgtcgacagaaccccgccttgcttgagaaggaggctcttacgtcccttctgccggtcctgccctgggttcacaccccagtgtacccccgaagcccccaacccgtcgcttctgctttgtgtgcgtccccagaggcccgaggacccagctctgtcatcctcccagttctgaccccatcactgatgtccatggccaggcagccacggtccacttccctgttgaatgacttctgtgagcttgttttgactttgtttttagggatttttattttctctcttcagttagaacacaggccctggtagtgagggctggttttcacttgtgctgttttctttgcagccctatacccagcagtacccagaacactcccaggtagttggtgactgacccagtccctgtccttgagcatttcacagcccagaacaaaggtccagagggcaggtggctctgagcaccaccgtcagccactagaaccctgctgtgcagactgagaggtcaacggccttttttcatggaagttctgatgctgttaagttctgaaaagagaaacgggagcagtggaggaggcccggagagagatgcgaagcagagggcaggactgagccagaggggctgcagcagcttcagcatgaacagaaaactggtcaggcccagaaaaggtgcccgggggtccctacccccaggcttgttcccaggagtcatggctgggagtgccgcctgaggctgctgtacggaagcccccactccgtgaccctccgggttgagtctgaatcccaggacacctgagaatgtgtctctggcttgctgcccagaaggtctggggctgctggtgtgaggagggctgggagctgggatgggaggagccaggcgagccttttccggatcgaggcagattcaggaggggagggtcctctctgctgagcccctgctgctgtgacagggacagcacactcagactgtgtcactagtccctctgggaccccaggagtgcagacaaagacgtgctttggaacagagacacgggagatacgttttcagaggtctctaataaaaggggtgacttcagtggaaaccgctgcgcaggaggcaggactgggtggtagcaagcatggcctcctgactgcggcgagtaccaggggcacttggttccccagctgccaccgtgagacccccctgggaacccagaagggcctctgcacagcccccggcccgtgtgctgcctcccagtcttgtcaaccctgaccttggagttctagcgggcgtgcccgcctgtgtcctcagctgggggcgcatgagaagagacttctgtgatgtgttaatgaggggtcagtggttcccgccagaggggaaggccagggcctgcacccccatggggaaagaactgacaggcagcagtgaggcctgagcccagcccacccggtccgcaaagattcccgtcccaaacacgagggcacagagactgcgggtgctctgaagcctcctgtgctgaggaggtgagtggtcattgtgggaacggcatggccagccactcacaaacaaggggccacccaatccaggcaggcagggcaggtgagggggacatgtggctaggtcatgaaaaccagttattagggacagggagagaaggcgcagcctgtgcgaagtcaacagttcttctcagtgcgtttttgtcttgtttctgagatggagtcttgctctgttgcccagactggagtgcagtggcacgatcttggctcactgcaacctccgcctcccgagttcaagtgattctcctgcctcagcctcctgagtagctgggattacaggcatgtgccaccatacctggctaatttttgtatttttagtagagatgggatttctcccacgttggccacactggtctcgaactcctgacctcatgatccgcccgcctcagcctgccaaagtgctgggattacaggcgtgagccaccgcgccggcctcaatgcactctttaaagagaagggcagttagcgacagggtctcatgttgttgcctaggctggggtgccctggcacgatcatggctgactgcagccctgtgcgctcaagtgagcctctcacctcagcctcccagggtgctgggactgccaacatgagccactggactcggcagt

SEQ ID NO: 16810 - DNA, 2300 bp, Homo sapien
cgtgtcatttgtgaatagggagaatttgtctttgttttctttttcttgcccagttactctggctagggcctccagtgctgccctgagagcagtggtgagagaatccgtatcttgttcctgaccttggaggaagagctttcagtccttcacagttgagcgtggtgtctgctgtgggtttcatgtagaggttttatcgtggtgaagaagttcctttctgttcttgagatatttccttaactattcttacctggatccagaaaggaaccacaagtgcgtctctctctttaagtctccgatagacgcacactggaagctgctgcatttgctggtccctcagggacttgccagaccaactaaaatgcacgaccccagacttttggaggacaaggtctcctgcccaccatggtcccagccagcagctccaggaacacaggctgggctccctgcagtggaggcggggttgaggaatgctggggtggcagctactcaccgtgtgcttcccagggagcatcacctgttcctctgaagccctgcctgggtggcttgagcttggaatcaagctgacccattttgagagagtggattctgagctttttcctagcgtaaggtcgttttgataaaggagtggtcctttggacatccctgttctgccgtcctgatacctctagttgtgggttttatgtgtagcacagggtgaagctttagttctcagaacccacccctgctgtaccctgtgccctcgccctccgctgtgtttgccctgaccctcctgtaccctgcgtcctcgccctctgctgtgctcacccgaccctgctgtaccctgcgccctcgtcctctgccgtttgcccctgaccctgctgtaccatgccctcgccctctgctgtgttcaccctgaccctgctgtaccctgcgccctcaccctctgctgtgttcacctgaccctgctgtgtcctgcgcccttgccctctgctgtgctcgccctgaccctgctgtaccccgctgtaccctgcgccctcgccctctgctgtgttcaccccgaccctgctgtaccctgcgccctcatcctctgctgtgccctccccctctgctgtgttcgccctgaccctgctgtaccctgcgccctcgccctctgctgtgtttgccctgaccctgctgtaccctgcgccctcgccctctgctgtgttcacccctgaccctgctgtgtcctgcgcccttgccctctgctgtgctcgcccctgaggcctcctgtccagagttgctctggctttggtggcttcaggtagattctgagggtcagtcagcacagaagcaactcagggaagcttcagaaaagaccatttctcaggttggagagacaaaaaacattttgcaaatggagatcagaaaccattgaatttgggaacctctttttttcagagtctctggtaagaagagtgaaagcaaagaagccaagaagtctgaagaaccaagaattcggaagaagccgggacccaagcccggatggaagaagaagcttcgttgtgagaggtgatgcctgcaacgcgaggctcgccctgcctgtcggggccggggctccatgcatgctcttcattgcagggaggagcttcccaccatctacaagtgtccttaccagggctgcacggccgtgtaccgaggcgctgacggcatgaaggtgagcactggctgtgcctgacccaggcccggcagctgtcagtgtgaacctgggggaggtagcaggtgtttctgcagcctaactcagacttgcgcccaaggacactttgacctaggttaaccgagacctgaagcagtcctagccagtgccatccttgggggtagatgtgaggccagactttcacttgagacaccccccggggggtctagaagtttcttggagtgaagctgtgaaggagccagtggtgtcgctggaggaggagttggatctgccttccaggggcctcagctgtcacctactgagggctcgtgccatgtggcccgggtgcggctctgagggtctctcaccgagtctctccttcagaagcacatcaaggagcaccacgaggaggtccgggagcggccctgcccccaccctggctgcaacaaggttttcatgatcgaccgctacctgcagcgccacgtgaagctcatccacacaggtacgcctatcgccagtgtcgcccacgcgggtgacagccaggggcacgtgacctgctttccagtcttcctcatacccatccccgccccaagagttgggggtgcgtgaaggtggctcatggggtctttggtactcagtcacgttggta

SEQ ID NO: 16811 - DNA, 2300 bp, Homo sapien
gtagtggctcacgcctgtaatcccagtactttgggaggccgagatgggcagatcacgaggtcaagagttcgagaccagcctggccaacatagtgaaaccctgtctctactaaaaatacaaaaattaggagggcatggtggcgcgtgcctgtagtcccagccactcgggaggctgagacgggagaatcacttaaacccgggaggtggaggctgcagtgagccgagatcaccccactgcataccagcccaggctacagtgtgagactttgtctcaaaaaaaataaatgaaaataaaaaataaaaataaaaaaaattcaagatctgtgcataaacacaacctgtgtgtaagtaatgcttccctactgggctattttcctttttttcttttttgagagggagtctcactgtcgtccaggctggagtgcaatggcgggatctcactcacggcgacctccacctcccaggttcaagcgattctcctgcctcagcctcctgagcagctgggattacagacacctgctaccatacccggctaatttttgtattttaagtagtgacggggtttcaccatgttggtcaggctggtctcgaactcctaacctcaagtgatctacccacttcggcctcccaaagggctaggattacaggcgtgagccaccacgcccggctttttttttttttttttttttttttttttttgtgagacagtctcactctgtaatccagactggattgcaaggggcgtgatctcggctcactgcaatttctgcctcccgggtccaggttcaagcaattctcctgcctcaggctcccgagtagctgggattaaaggcgtgcgccaccacacccagctaatttttgtattttcagtagagaccgggtttcactatgttggccaggctggtctcgaactcctgaccctgagtgatccacccgccttggcctccccaaaagctgggattacagccctgagccacggcgcccggcctgtttttttgttgttgttgttttgtttttaataaaagaggcggggtctcaccccgttgcccaggttggtccagaactcccgggctcaggcgaccctcccctctgcgggccaggccaccgcgcccgccgcctcgggtgttttcttaggaaagctgtgcggtggctggactcaaaaaccccgaacctaaatctgcccgcagacggacaccagcttcctcttacctcaagcaaaagggcattcaggtcctgatggcttcgcaggaggcgcacagctgattcctttaatttctgtgccctttcaggattatatttttccctcttgacccttcccgctacggagagaagtcggttcgaaaccatcacagcacaattcacacacggggtccccggcccgacgcgcaggtggacgccgcggagaaacccaccagcgacaccctcccgaagaggggccggggctcctccccagggcgcaggtctcgggaaactaacggagacggccccaccgcggacgccggggaagacggcccaggagggcccgaggcaggggagcccggggacggctggcgaggggcggcctctgcgctgaggggagccccaggccgcgcaccccaggcccgcctgacagggcggccggcgggggcggcgttcgggaaagaagggagcgccccgcgggcggcggctgggggcgtccgcccaggcgcaggaggggccgggtccgaggcagccgcgccgccccagccgggcgcccaccccgcacagccccccgggcgcggcgtccggggatccgaccggcggaggctctggcgggaagggatcggggaaccggcgaaaccgtcccgggccggacgccgcccactcccgcggcctgccgcgcccacctacccagcagctcggcccaggccctccggcggccccctgggtcctggcccgaggcggagttcgggacccacgagtcggacatggccttggcgcctacagccccggcggcggctccctgcgcccgagcccgcgctgccttcctattggctgcggccaggcgcgcacacccgttggctggcggcggccaggccacgcccctcaggtcgaggccttgcgtcgtggccatgttggtcctgggggaggcgcctgcgcgcggtgaggtagtttttgcgtttggctttgccgccgcggtgtagtccgcgggggcgtctcgcgcgggcagactgccgcccctcaagcgtggttcctgccgggaatgactggggttggtcctgaagagaccacctggccaaccaagccgaggcaggctcagagcgccgcggggagcgcaaagcc

SEQ ID NO: 16812 - DNA, 2300 bp, Homo sapien
tctccataatttgtattatgactgttcttattgtaacgattttattatactgaaatagtttgtgccttcggtctcttgcctcggcacctgggtaattctccgcccacaggactacaggctcgtgtcaccacactgggcaatacaaaaaatacaaaaaaaaaattttgtattttttgtagagacgaggtcttgccatattgcccaggctggaattcttacctttgttactgtatttaacgtatctttttcctccggccatcttcatggttttctctctgatttccacagtttgaatacactgcatgtgtcaggcaggggctcatatttatcaagttttgtgtgtgctctgagctcaggtctttcattattttgggaaaattattggtaattttctcttcaaacattttttatgatttgttctttcttcttcttttgggagtcctattacatgcatatgatatcatttgatattttcccacagttcttggatgctttttttaaaaaaaaactttttttcttctttattttccaacgtgggtaattcctatttttctcagctgtgttgatcctactgctgccccatcagaaaaattacctgttatcagcgttcttcctttcttataatttgatgagtttcctcctcatgcatattgttcacctttcgtacaagagacctccacatattaatcacagttaatttaaatttccagcctgtttcaatttctcgatcacctctgagtctagtcctgttaattgcttagtgttattttttgtttttgaaacagggtcttgctctgttgcccaggctggagtgcagcggcgcgatctcaggctgttccctgagttcacaccatccccctcaaccagcagattgcaaagtgtccgagtcgggccgtgcaggagtctttgtgggggtttcatggactccgaattctcatttctgctccatccccatctcatgaatccaaggccccactctgtgcctcggctcttcgtttgtggtgctgaacgtcatctacgtcatctacgccatctacgtaatcaacacaataaagacgcctgccgggaacgcggcccttcggctgaatcccttcggtggttccaaggccactgccagaggatgcggacgggtctccagggcctctacttacccaggactttgaggcacattagcttcgcctaggcactcgcttttacgaattcttatgtttggttttgttttgagacagagtctcgctctgccgcccaggctggttaaaagatagggtctcagccgggtgcggtggctcacgcctgtaatcccagcactttgggaggccgaggcgggcggatcacctgaggtccggagttcgagactagcctgggccaacatggcgaaacgctgtctctactaaaaataacaaaaatcatccaggcgtggtggcgcgcacctgcaatcccagctactcgggaggctgaggcaggagaatcacctgaacccaggaggcagacgttgcagtgagccgagatcgcgccactgcactccagcctgggcgacagagggagactccgtctcaaaaaaaggaaaaaaaaaaaaaagaaaagaaacaaaagtgatggggtctcgctctgttgcccaggctagtctggaattcctgggctcaagcgaccctccagcctcggcctcccaaagcgctgggaatacaggcgcggctaccgcgcggtctccggctgccgaaacaccgccctgcgcgcggaccgttcggccgccgggaggaacagcggctgcccggagctcagaggcgcgcgcggctttgcgctccccgcggcgctctgagcctgcctcggcttggttggccaggtggtctcttcaggaccaaccccagtcattcccggcaggaaccacgcttgaggggcggcagtctgcccgcgcgagacgcccccgcggactacaccgcggcggcaaagccaaacgcaaaaactacctcaccgcgcgcaggcgcctcccccaggaccaacatggccacgacgcaaggcctcgacctgaggggcgtggcctggccgccgccagccaacgggtgtgcgcgcctggccgcagccaataggaaggcagcgcgggctcgggcgcagggagccgccgccggggctgtaggcgccaaggccatgtccgactcgtgggtcccgaactccgcctcgggccaggacccagggggccgccggagggcctgggccgagctgctgggtaggtgggcgcggcaggccgcgggagtgggcggcgtccggcccgggacggtttcgccggttccccgatcccttcccgc

SEQ ID NO: 16813 - DNA, 2300 bp, Homo sapien
gcttggggaaccaacaaaagatgtgaatgttgccccgctgttgattataaaaactttaggcatggctgggcacagtggctcatgcctgtaatcccagcactttgagaggccgaggcgggcggatcatgaggtcaggagattgagaccatcctagctaatacagtgaaaccccgtctctactaaaaaaatacaaaaaattagctgggcgtggtggcaggcgcctgtagtctcagctactcaggaggctgaggcaggagaatggcgtaaacctgggaggggagcttgcagtgagcagagatcgcgtcactgcactctagcctgggcaacagagcgcgactctgcctcaaaacaaacaaacaaacaaactttaggcacaattcgtcatcatcagcctcctttctgcttacagatgaaaagtccagctggacgggacgacatggctcatgcctgcaaccccagcaccctgggaggctgaggcagggggatcacctgaggtcaggatttcgagaccggcctggccgacatggcgaaaccacccaaaaaattacccgggtgtggtggtgggcgcctgtagttccagctactttgaggctgaggcaggagaaacgcttgaatctgggaggtagaggttgcagtgagccaaggttgcgccactgcactccagcctgggcgataagagcaaaactccttctcaaaaaaaaaaaaaagaaagggaaagaaaagaaaagtccagctggactgggcgcggttgctcacgcttgtaatcccagtactttgggagaccaaggtggcctgactgcttgagcccaggaattcaagaccagcctgggcaacatggtgagatcccatctccacaaaaaataaaaacaatcagctgggcgtggtggttcatgcctttagtcccatctactcaggaagctgacgtgggaggatcacttgaccccaggaatttgaggttatagtgagctacgattgtaccattgcacttcagcctgggtgagaccttgtctctaaaaaaaaaaaaagaaaaaaaaatcattgtggaacttcttttctgggatgggatctcactgtgttgtccaggcaggtccagaactcctgggagaccagcgaactttaagtgccccaagtttcacctcggacctgcatcagaatctccagccctggagcccaggaatctgcatttcttgcccccgggtggtactggcagcacccaggcttgggaccgtttatgccccaactgcattttcttgcccacttattcagatctggcacaactatgaagaggcctcgggatgagccccagccgagttccccttgcgtccctcaggcaaacacccagtgtccaggagtgacccggcctgaagacacaaacacgccccaaatgcgatgcacgccatcactggccaaccgtgtgtgtttatttttcacggacaccctggagacgtcactgcaggcacattccctgctaggcagaggcatttattaagggcttcatacccgaaggccggatgcggggagtcgccctcaccccagccaccctgcgacaacccctggaggtcaccttgcccggggctcggggaggccactgcgggctttgtctgctcagctcctcccggctccctcccgcgttcccagcggcaaacctcccaggccccccgcggtcaccgcagtgtcccgggctggatgccggcccgggcttttgtgggcatcggccgtctgggtctgcgggggagcgccgggggtgtcaccgcgtgtccgagcgcgcgggccctggcccatgtctgcagcccccaaccctccccccggtcctgcccagcaccccggaggggttcgcaccccggcctcggccccgcgcccccgcgtccccagccctgagccccagcccctccgcacctacccgcgccccgccctgcccctcacccgtccccctccgggcctctccccgcgcgccctccactccccgccccgccccgcgtccctccccctccgcgccccgccccccgcgccctccgcgccccgcccccgtcgccgccccgcccccaacctgaggcgctcgcgcggggcggggcggccaggctgaccctgcgcggcggaaggcgcggctgcatggacgcgggtccggcgcgcgggaggcgatgacggccccgccatggcccgggcgggcagctgcggcggcgccgcggcgggcgcagggcggccggagccctgggagctgtccctggaggaggtgctgaaggcctacgagcagccgctcaacgaggagcaggcgtgggccgtgtgcttccagggctgccgcg

SEQ ID NO: 16814 - DNA, 2300 bp, Homo sapien
tgagcccccggctggggttcccccattcccctggtcaggttgcacattggaaggtggcgtctccctgagggcgcctgaacccatggaagacacagaacatcttaatttttgaggcacacaggcttttgaaactcagattacttggggataaaaaatttaaattaaattaaaattatatatatatatatttgtttgagatggagtcttgctctgtcgcccaggatggagtgcagtggagcgacctcggctcactgcaacctccgccccccgggttcaagtgatgctcatgcctcagcttcctgggcagctgggattacaggcacgtgccaccacgcctggctaattttttttttttttttttttgtagttttagtagagacggggtttcaccatattggccagactggacacaaactcctgggctcaagtgatctgcctgccttggcctcccaaaatgctggcattacaggtgtgaaccactgcacctggccaaaaataaaaaatgatgaggctgggctcagtagctcatgccttgtaatcccagcattttgggatgctgaggcgggaggatcacttgagcccaggagatcgagaccagcctgggcaatatagtgagacctcatctctgccaaaaatttcaaagaaaaattagccaggtgtggtggcacatggctgtaatcccaggtgctccaggggctgaggtgggaggattgcttgaacctgagaagttgatgccgaagtgacccatgattgcaccactgccctctagactgggtgacagagtgagacctcgtttcaaaaaaaaaaaaaaatcactttttatgcctctcattaaaaactttacaaggccattggaatttcctatatcttttttttttttttttttgagatagggtatcactctgtcaccccggctgtagtgcagtggcaccattatagttcactgcagcctcaacctctcaggctcaagcaatcctcccacctcagcctctcgagtagtgtgatgacaggcatgcaccaccacgcccggctaatttttgtgttttttgtagagacagggtctcactctgttgcccaggctggtgttgaactcgtgggctcaagtgatccttctgcctcagcttcccgaagtgctgggattatgggtgtgagccaccattccctgcctaacatgatcttataccctattgtcctggtcttcacctgtatttgccactctacatagtttacaatagtatgacatatttcagcatttagaagaaaatagaataaaagcaaatttttaaaatgtttttcttttcttttccttttttttttttgagatggagtttcgccctttttgcccaggctggagtgcagtggcgctatctcagctcactgcaacctccacctcctgggttcaagcgattctcctgcctcagcctcccgggtagctgggattacaggcacgcgccaccacacccagctaattttgtatttttagtagagacggggtttctccatgttggtcaggctggtctcaaactcttgacctcaggtgatccacccgcatcagcctcccaaagtgcagggattacaggcgtgagccaccgcacccagcctagttcttcttctttttttttttttttttttgagacagagtctcgctctgttgtccaggctggagtgcagtggcgtgatctcggctcactgcaagctctacctcctgggttcacgccattctcctgccttagcttcccgagtagctgggactacaggcgcgtgccaccacgcctggctaattttttttgtattttttagtagagacagggtttcaccatgttagccaggatggtctcgatctcctgacctcgtgatccacccgccttggcctcccaaagtgctgggattacaggcgtgagccaccgcgcccggcctagttcctcatttttttaaatggctggctagccctcagtttccccttctgcaaagtcagggaattaagccagctggtgcacacaaagctgtcagctcctgcctgctgtctccccgttcactggcccgtcctgcctcggctcccgtctccccagggtttggctctctgccctgcatcctcaacgcctgctccggagatgccaagtccacctcctgcatcaacctgtcagtcacagatgctgggggcagcgcccagcgcccgcggccccgcgtgctgctcaaggcgcctaccttggctgaaatggaagagatgaatacatctgaggtcagaacccatggggattcctgaaaagagaccaggaatgggaggatgggggccaaggaag

SEQ ID NO: 16815 - DNA, 2300 bp, Homo sapien
tcctatatcttttttttttttttttttgagatagggtatcactctgtcaccccggctgtagtgcagtggcaccattatagttcactgcagcctcaacctctcaggctcaagcaatcctcccacctcagcctctcgagtagtgtgatgacaggcatgcaccaccacgcccggctaatttttgtgttttttgtagagacagggtctcactctgttgcccaggctggtgttgaactcgtgggctcaagtgatccttctgcctcagcttcccgaagtgctgggattatgggtgtgagccaccattccctgcctaacatgatcttataccctattgtcctggtcttcacctgtatttgccactctacatagtttacaatagtatgacatatttcagcatttagaagaaaatagaataaaagcaaatttttaaaatgtttttcttttcttttccttttttttttttgagatggagtttcgccctttttgcccaggctggagtgcagtggcgctatctcagctcactgcaacctccacctcctgggttcaagcgattctcctgcctcagcctcccgggtagctgggattacaggcacgcgccaccacacccagctaattttgtatttttagtagagacggggtttctccatgttggtcaggctggtctcaaactcttgacctcaggtgatccacccgcatcagcctcccaaagtgcagggattacaggcgtgagccaccgcacccagcctagttcttcttctttttttttttttttttttgagacagagtctcgctctgttgtccaggctggagtgcagtggcgtgatctcggctcactgcaagctctacctcctgggttcacgccattctcctgccttagcttcccgagtagctgggactacaggcgcgtgccaccacgcctggctaattttttttgtattttttagtagagacagggtttcaccatgttagccaggatggtctcgatctcctgacctcgtgatccacccgccttggcctcccaaagtgctgggattacaggcgtgagccaccgcgcccggcctagttcctcatttttttaaatggctggctagccctcagtttccccttctgcaaagtcagggaattaagccagctggtgcacacaaagctgtcagctcctgcctgctgtctccccgttcactggcccgtcctgcctcggctcccgtctccccagggtttggctctctgccctgcatcctcaacgcctgctccggagatgccaagtccacctcctgcatcaacctgtcagtcacagatgctgggggcagcgcccagcgcccgcggccccgcgtgctgctcaaggcgcctaccttggctgaaatggaagagatgaatacatctgaggtcagaacccatggggattcctgaaaagagaccaggaatgggaggatgggggccaaggaagtgagaagggctaagctaagccgggggcagcagcaattgcggtgtctcctgtccaggagccctcccttgaaactgacatcctgccgtaggaggaggcctgtggggatcggggaccctgccatcttggccgctcagaagggtgactgggagagggcctgggctgcctcctcccacagacgatggaaggctgacagcggaagtgcctcgctgtcccaggccccggaaactgagcccctggctagttgatgtgaaaaggtggacccagcgaggctccctgcccaccctggctgccctgtgaatgggacgctcctctcttcacaggaagggctggtgatggccttgttgggggccatcccagagggctctgcctccgtctgacactagacctgtccctttccggaaggcctggggaagggcttggttactcgggtgcttgccacgaactgtccagaggcgggcaggctgggaagtgggtggaggctgccccacatcgcagcagaccctgcggcacccctgggtcctctgcttcattccaggcatgggcaggaggcactggcgggcattgtcagggcagggccgcgtctggtgtgtccacaggaagaagagtctccgtgtggggaggtgacgctgaaacgggaccgctccttctcagagcatgacctggcccagctccgaagtgaggtggcctctggcctgcagtcggccacccaccccccaggagggacggagccaccacggccccgagctggcagtgcgcatgtgtggaggcccggctcccgagaccagggcaagtgctgcttctcacccccgtaccctccttcgcccccaccccgatccatcctgtgggcaccatccctcca

SEQ ID NO: 16816 - DNA, 2300 bp, Homo sapien
tacctcagttgattaaatcctgcaccagaactcaggtccacgtgggcctcaagatgtcagcaaaggtgagctcttcacaattacaggtcagataagaaaccgagggcagaggggctgagcagtaccgtggcggcgtcacggccagagtcaaggtctcgacccagtgaacccccctcacactgacctccaggcacagggcacgcaggttcaccgtctgccctaaccccacactgaacccttcaattagggaccaggctccggggccgcagtgcagtgcggttcggccccagcaggcggcagcagagaccacggccccagaccagcagctccaccactggtgccccatgttcagaccgcgcccccccagacggacgctcaggccacaccccccagacaggtgctcagacccatctcccagacctggctggcggcgggaaggtgggtgcaaagacgccccctgggccgccctggacgacaatcgcaccctcactcaccagccacaggtgtttggcatcgggggtcatggaggcctcgggtctgtcccccgaggagccccggttgctgagtagggggtggctggggtcagagacactcgcgggacaggtacctgggggagagcagaggctccatcaggactgcctggcaggagctgtggtaaagaggactgtgcccaggggatgatagagatggtggagggctccaggggaaccaagcaaaaggtcaaggggagaagcggccgggcagtagctacacgggcagttctagcacttaggaggccgaggcgggtggaaccttgagcctaggagcttgagaccaccctgggcaacgtagcgagaccctcagctctatagaaaaatataaaagttaggcaggcatcgtgaaacatgtcggtagtcctagctactcaggaggctgaggcgggaggattgcttgagcccaggaggccaaggctgcagtgagctataatggtacctctgcactccagcctgggcagcagagcaagaccttgtctcaaaaagaagaaaaaagcgaagagggtggctccaacattaggacattcatcggggcccatgtggtatagagggtccacaggaccccggaagggcccccgtgtctgagccccagaatgagctggcatgggcagtcccacagcagcagtgagccagaccctcctcctgcagtccacacctcacactggagctggggtcgacctccctccctccaccaactcccagaggctgaggcacagctccaggtgggggaggccgaggttaagtaagtgtgaggtttggaactggcctggcctggacctcttaacactgggaaggggctgtaagcaccaaacacgattgtcccgagactctggccccacaggcagacaaggaggcctggccgtgcctgctgggatgtggtggtggggagacaagaaccctgagtcgcgagggctctccgtaaagttcagccctcacggtggtaggaccagccctgcacagccagcaagaatcgttctgtgctcagcagcgcgaaaaggagtcgaaggaatcacggctcaggttccagagccatgtgctgcgagcccagccggctccccacggacacacggctcccttcccagaggactagaagggtctatcactcatctagttagctatctttctatatcccaaagttaattatgtctaggtaatagaatcatgagaattctttttaaatattaaaaaatatttttataataaatatgcattacttagtaagttttcaagttaaacaaaaggagatgcctgcctgaggtggtgccgtcttgcaggcacgagctccctgggtccctgggagctgcctgctcaggaagatgtgggctgaggtggagggatggtgcccacaggatggatcggggtgggggcgaaggagggtacgggggtgagaagcagcacttgccctggtctcgggagccgggcctccacacatgcgcactgccagctcggggccgtggtggctccgtccctcctggggggtgggtggccgactgcaggccagaggccacctcacttcggagctgggccaggtcatgctctgagaaggagcggtcccgtttcagcgtcacctccccacacggagactcttcttcctgtggacacaccagacgcggccctgccctgacaatgcccgccagtgcctcctgcccatgcctggaatgaagcagaggacccaggggtgccgcagggtctgctgcgatgtggggcagcctccacccacttcccagcctgcccgcctctggacagttcgtggcaagcacccgagta

SEQ ID NO: 16817 - DNA, 2300 bp, Homo sapien
gtctccccaccaccacatcccagcaggcacggccaggcctccttgtctgcctgtggggccagagtctcgggacaatcgtgtttggtgcttacagccccttcccagtgttaagaggtccaggccaggccagttccaaacctcacacttacttaacctcggcctcccccacctggagctgtgcctcagcctctgggagttggtggagggagggaggtcgaccccagctccagtgtgaggtgtggactgcaggaggagggtctggctcactgctgctgtgggactgcccatgccagctcattctggggctcagacacgggggcccttccggggtcctgtggaccctctataccacatgggccccgatgaatgtcctaatgttggagccaccctcttcgcttttttcttctttttgagacaaggtcttgctctgctgcccaggctggagtgcagaggtaccattatagctcactgcagccttggcctcctgggctcaagcaatcctcccgcctcagcctcctgagtagctaggactaccgacatgtttcacgatgcctgcctaacttttatatttttctatagagctgagggtctcgctacgttgcccagggtggtctcaagctcctaggctcaaggttccacccgcctcggcctcctaagtgctagaactgcccgtgtagctactgcccggccgcttctccccttgaccttttgcttggttcccctggagccctccaccatctctatcatcccctgggcacagtcctctttaccacagctcctgccaggcagtcctgatggagcctctgctctcccccaggtacctgtcccgcgagtgtctctgaccccagccaccccctactcagcaaccggggctcctcgggggacagacccgaggcctccatgacccccgatgccaaacacctgtggctggtgagtgagggtgcgattgtcgtccagggcggcccagggggcgtctttgcacccaccttcccgccgccagccaggtctgggagatgggtctgagcacctgtctggggggtgtggcctgagcgtccgtctgggggggcgcggtctgaacatggggcaccagtggtggagctgctggtctggggccgtggtctctgctgccgcctgctggggccgaaccgcactgcactgcggccccggagcctggtccctaattgaagggttcagtgtggggttagggcagacggtgaacctgcgtgccctgtgcctggaggtcagtgtgaggggggttcactgggtcgagaccttgactctggccgtgacgccgccacggtactgctcagcccctctgccctcggtttcttatctgacctgtaattgtgaagagctcacctttgctgacatcttgaggcccacgtggacctgagttctggtgcaggatttaatcaactgaggtaaggggagtgtgcggcccgtgggccacggtggcagcatgcaggtgttggagggatgtgaacggtgtggttgctgtcactatttgaggttttatccagcggctcagatgagaacagatgttaaaatgctttgagaactatgagccttatataaatgcaaggcactgtgcgtatccccaccgaaacgcagggcctgccctgttagcctaggtcgtatcccaccgaaggcagggcttgccccgttagcctaggattagctatatatcactgcatcaaaagttacctcaaaatgcagcatcttaaaataacaaatatatattatctcacagtttctgagggttgggactccggcagtgtcttagctgtgtggccatggctcagggtctttcgtgaggctgcagttaggatggcagtggggcctgatctcgactgaagggtcaaatcggggctggaggagccgtctgaagtggcgtcttcacccagctgtgagcaggaggcgtgagtcccttgctgtgtaggcctctctcgggctgcttggggatccccacagcgtggtggctggcgtcccccagagcacgtggttcaagagtgagcgcagtgaaagccactgagtatttatgaccaagtccagcagtgccacattgtcccaactcactaggaatgagtcactaagtccagcctattctcaaggggagggagagaattaaggcccacttctttttttttttttttttgagacaagagtctggctctgtcgcccaggctggagtgcagtggcgccatctcggctcactgcaagctccgcctcccgggttcatgccattctcctgcctcagcctcccgagtagctgggactacaggcgcccaccaccgcacccg

SEQ ID NO: 16818 - DNA, 2300 bp, Homo sapien
cctggccaccatggtcagggctgcatgcggacggcacagactactgcccatcagctcctctggccacacctgctggcctggggggtactttggtctcatttcccagatccgtattctcgttctccagggagaggatccacaggggcaggaggtgtgactgcaggctctagacaggccctgtgccgagtgctgtctgctcacctgcgcccggctcagcctgttaacggggccctgccctgctcctccgtgacgttctgccgtcatcttaccttacagatgagggaactgaggctcaacgaggtcaaagaatttggccaaagatacacagctcacccagaactttgactccaggctgtaatgctagccgtggggcctggaggtcagaagggacaggacttgtaactgatgggcctgcgggagaaaatactcctgtcagctggggtccaggaaatccaaacacacaaaattagagcccccagtaaaaacagccagcttctagcatgcgtgtaagcatttcacggactctctggcctgtatttttattcctgtttaaaaataagaaaacaggcacagagagggtcagggaactcctccggtcacacagccagcaataagctaatgtgtagtgcttggtaaggacgacggttgttctggttctacggggactcacactccctatcatggggagactgggttgtaattcatacaggaacacttggaaatgaaagcccacgttaaaaccctaaaccacggcaggtgcagtggctcacacctgtaatcccagcacttttggagggtgaggtgggcagatcacttgaggtcaggagttcgagaccagcctggccaacatggtgaaaccccatctctactgagtacaaaaattagccgggcatggtggcacatgcctgtagtcccagctactcgggaggctgagacaggagaagtgcttgagcctgggagatggaggttgcagtgagccgagattgcgccactgcactccagcctgggcaacagagcaagacctcatctcacaaaataaaataaaaccctaacccatcctgggaggggccaggccggctcaccagggctgctgcttgtgctcatgaagccgcagtaagtcgggcaggaggctgctggcacctgtcttctctatgccctcctgtccccatgtccccaaccccaggcacaggaagctgtgccctccgcccactgaacccagcactgtctcagcctcatctactttatttttttcatttttttgagacagggtctggctctgtcgcccaggctggagtgcagtggcgcgatctcggctcactgcagcctcagcctcccgagtagctgggattacaggcgtgcgcagccacgcccagctaatttttgtatttttagtagagggagtttcaccgtgttgcccaacctggtctcgaattcccgacctcaggtgattcgcccaccttggcctcccaaagtgctgggattacaagcgtgagcaccgcgcccggcccttagatcgtgacaaacgcgggcggcctgtcctagaactgtcagaaccactgtccctaaagaggcctcgggcgggcagtaagggccgcgtcactcaatgctgctcgaggggcggcggctccagggcagaggcgggcatcgacggctagatcactcgaatgacaccctgacacgaaaaggaccaactagcaacgtccgggacgcagctgaaatgctgcaggcacggtgcggggacaggccccggcgggcagaacgcggctgcgggttccgggccacatggatgggcaaggccgggcagggccgactgtcgccggctgcgcgcccgttaccccgaatcgaagcccgtcatccccgcggggcacctctccatgcccggtgcgcacggcgcgcagacacccagctctccagagacctggcccggaccccccggagcccgcccagacgccgccgctgaagcgggaaagttccggagagccgcgacgcgcaggcgccgcagccaggtcctgcccccacccctcgcgccaagagtgcgcaggcgcgcagccagctcccccgcccccgaccccgcgcgaagagtgcgcaggcgcgccgacagccgagttttctgcgcttccttctccctctctccagacgtcgtggtcgttcggtcctatgtcgcgccgggccctccggaggctgaggggggaacagcgcggccaggagcccctcgggcccggcgccttgcatttcgatctccgtgatgacgatgacgcggaagaagaagggcccaagcgggagcttggtgtccggcgtcc

SEQ ID NO: 16819 - DNA, 2300 bp, Homo sapien
gtgagggtgaaatccctccttaagatgggcctcctccgaggggctgtgaggggtgagggtgaaatccctccttaagacgggcctccggccgggcgcggtggctcacgcctgtaatcctagcactttgggaggccgaggtgggcggatcacgaggtcaggagatcgagaccatcctgactaacacggtgaaaccacgtctctactaaaaatacaaaaaattagccgggcgtgttggcgggcacctgtagtcccagctacttgggaggctgaggcaggagaatggcatgaacccaggaggcagagcttgcagtgagccgagatcgcgccactgcactccagcctgggcaacatagtgagactccgtctcaaaaaaaaagaaaaaaaaaaaaaagacgggcctcctccgaggggctgtgaggggtgagggtgaaatccctccttaagacgggcctcctccgaggggctgtgaggggtgagggtgaaatccctccttaagatgggcctcctccgaggggctgtgaggggtgagggtgaaatccctccttaagacgggcctccggccgggcgcggtggctcacgcctgtaatcctagcactttgggaggccgaggtgggcggatcacgaggtcaggagatcgagaccatcctgactaacacggtgaaaccacgtctctactaaaaatacaaaaaattagccgggcgtgttggccggcacctgtagtcccagctacttgggaggctgaggcaggagaatggcatgaacccaggaggcagagcttgcagtgagccgagatcgcgccactgcactccagcctgggcaacatagcgagactccgtctcaaaaaaaaagaaaaaaaaaaaaagacgggcctcctccgaggggctgtgaggggtgagggtgaaatccctccttaagacgggcctcctccgaggggcggtgaggggtgagggttatttgcgtgcagctagtatacacacattacgtgaccactcatcgcctattaggatgtcctggaagcagcatccctttctcggttctgtgggtttccagggctctgtctgggccccgaggaggcccacggcgtggggttgggcagcttctagcacaggcagaaacgtgccccccagaggggcctggccaggcctcagtctgctcgctgaccccaaaagtttcgtcccctgtgtctaagaagcacctttgtcctcctctggggctgcatgcagctggccatatgctccaccagtgcagccgtgtctggaaacgcggctgggaggccctgtcctttgtggcagagctgtgctgctgtgtcacaggctgtagcgtcagcacctcccttgaaggcaggtgggctgccaagaagccgctgccacttaccccagaacactggagatcactgcaggctctgccctcggggcccgttcccctacatggcggcctctgccctcaacctgcagtgctggctcttccactgggcacaggtggcctccgctcccaccagcctgccatggggtccagtctttgtgattaaaacatccaaccggccgggcacggtggctcacgcctgtaatcccagcactttgggaggccgaggcaggaggatcgcttgagcataggagttcgagaccagcctggtcaacacggtgaaaccctttctctaccaaaaatataaaaattagccgggtgtggtggcggacgcctgtaatcccagcactttcggaggctgaggcaggtggatcacctgaggtcaagagttcaagaccagcctggccagcatggtgaaaccctgtctctactaaacatacaaaaattaaccggggcgtggtagtgtgcgcctgtgatcccagctactcgggaggctgaggcaggagaatcgcttgagcctgggaggtggaggttgcagtgagccgagatttcgccaacgcactccagcctgagcaacagagtgagaccctgtctcagaaaaacaaaaaaaaacccaaccccatgtgtgtggagggtggtgggtgagtcttcccttggatgcaaatgggggccctggcagcctccttggggctggtgtgaaggagacccccagcctcagaccctgggcacgccagcagcagcaactcagaataccacccggaagcaagccgctggccctgcagactctccaccttagaacagctgtgtctgtgacaaggacctcgctgtgtcccttactgccttgggggctaggagtggctggggtgtgtgctgagggcccccacagagcctccgcttcccctgcagtcctcctgcccctgctcgagtcttgcagtgtg

SEQ ID NO: 16820 - DNA, 2300 bp, Homo sapien
tccctccttccagttcccacctcccagctcccacctccctcctcccagttcccagctcccagctcccacctcccagctccaaccttccagctcccagctcccacctagcagctcccggctcctggctcccacctccctcctcccacctcccacctcccagctcccacctccctcctcccacctcccacctccctcctcccagttcctacctcccatctcccagctcccagctgccacctcccagcttctgcctccctcctcccagttcccacctcccagctcccacctcccagctcccgcctccctcatcctagttcccacctcccagctcccagctccctcctcccacctcccacctccctcctttcacctcccacctgccacctcccgcctcccaccttccagctcccgcctcccaccttccagctcccgcctccctcctcccagttcccacctcccacctcccagctcccacctcccaactccctcctcccacctcccacctcacctccctcctccctccttccaattcccacctcccagctcccagttcccacctcccagctcccgcctcccacctcccagctcctgcctccctcctcccagttcccagctcccacctccctcctcccgccgcctagctcccacctcccagctcccgcctcccacctcccagctaccgcctccctcctcccagttcccagctcccacctcctacctcccagctcccgcctcccaccttacagcccctgtctcctccctcctcccagttcccagctcccagctcccgcctccctcctctcacctcccctgccacctcctgcctccctcctcccagctcccaccttccagctcccgcctccctcctccaagttcccaccttccaaccccgcctccctcctctcagttcccacctcccagctcccacctcccagctccctcttccctcctcccagttcccacctcccagcttcctcctcccaccttctagttcccacttctttcctcacagttcccacctcccagctcccatcttccagctcccagctcccacctccctccttccagtttccacctcccagctcccacctcccaccttccagttcccacctccttcctcgcagttcccacctcccagttcccacctgccagctcccacctctttcctcgcagttcccacctcccaccttccagctcccacctcccagctccctcctcccaccttccagttcccacctctttcctcgcagttcccacctcccagctcccgcctccctcctcccagctcccacctcccagctcccacctcccacctcccagctcccacctcccagctcccacctccctcctcccagctcccacctcccgcctcccagctcccacctcccggctcccgcctcccagctcccagctcctgcctcccacctgccagctcccagctcccgcctccctcctcccagtttccacctcccagctcccacctcgcagctcccagctcccagctcccacctcgcagctcccagctctctcctgcagctctgaggtcagggctttggggctcacagggactggctgcctctttcagacccagatgctgagagatggggctcagggctaagtgggtctttcccctcacaggaagggagaggaggagaggaacagtgttatttgggggtcacagctctgcgtttgcaggccacgttctttcccatctccaccgaatgtacaagcgcttgcgtgtcggcctctgtggcaggtgcgagtgacacagtggaagcaggtgtgcagtgaagtggggaaaacatattaattttagaatgtagaaataaacataaaatcaaaactgcaccagcctggccaacatggcaaaccccgtctcaactaaaaatacaaaacttagccagctgggtgcagtgactcacgcctgtaattccagcagtttgagaggccaaggtgggcaaatcacaaggtcaagagattgagaccagcctggccaacgtgctgaaaacccgtctctactaaaatacaaaaaaattagctgggcgtggtgccgcacacctgtagtcccagctacttgggaggctgaggcaggaaaattgtttgaacccgggaggcacaggttgcagtgagtggagatcgtgccactgcactccatcctggcgacagaggaagactccgtctcaaaaaaaaaaaaaaaaaaaaaaattgggcgtggtgggttgtgcctgtagtcccagctactcaggaggctgaggcaggagaatcccttgaacccggaaggagggggttgccgtgagctg

SEQ ID NO: 16821 - DNA, 2300 bp, Homo sapien
catgctggaagcacagcgtgagggggcaaaggtcatgggaggcaaaaggctgggctgaggccgaggctctgtggctgtggccggataccaggtcctgtggtggtgtgggcagggcgcgctctctcctctgagcagcctggggctgcgtgtgtgaacagaaacaggcctgccgatttgaagatggtttgaccaagtctcccaaagctgaagagaggtccctgcccatgtcccccgggtggcaatccacagacgcacctgtgtccatcagacggtatcgttgatagggagtctgaagccacccagacgtggtctgttcacgccgtggacaccacggtctgaggcagacggttacagccaccggcataggcgaatctcagccagagagagtgaactgggacaccattcacgtgatgggccagatgggctggcagcggctcgctggagccgtccgggtgggaacgctgtgtctgttggtctggtgctgcttatgtggctggttcaggtctgtcatccgtcaacctgcatatttatcactggtgcattttcatgtatgttgtacctcaattaaaacattttagggccgggcgcggtggctcacgcctgtaatcccagcactgtgggaggcggaggcgggaggatcatgaggtcaggagatcaagaccgtcctggccaacatggtgaaaccccatctctactaaaaaaaatacaaaaatttgccgggtgtggcggcacgcgcctgtagttccagctactcaggaggctgaggtatgagaattacttgaacccagtaggcagaggctaccgtgagccaagatcatgccactgcactccagcctgggtgacagtgagacttcgtctcaaaaaaaaaaaaaaaaaaattaaagcagatggggtgtgggggctcatccctgtaatctcagcattttgggaggctgaggcggaccgatcacctgaggtcaggagttcaagaccagcctggtcaacatggtgaaacctcatctctacaaaaaatacaaaaaatagccaggtgtggtagtgggtgccgtagtcccagctagttgggaggctgaggcataagtattgcttgaatccagaaggtggaggttgcagtgagccaagaatgcaccactacactccagcctgcgcgacagagtgaaactgtctcaaaataaataaatacataaaaattatatgtatatatatatatatatatatttttttttttttgagactgtatctctgtttcccaggctggagtgcagtggtgtgatctcggctcactgcaacctccgcctcctgggttcaagcaattctgcctcagcctcccaagtagctgggattataggcgtgcgccaccacgcctggctgatttttgtatttttagtagagatggagtttcaccatattacccaagctggtcttgaactcctgacctcatgatccgcctgcctcagcctcccaaagtgctgagattataggggtgagccactgtgcccggcaataataattttttttttttttgagacagagttttgctcttgttgcccaggctggagtgcaatggtgcaatctcggctcacggcaacctccgcctctcatgttcaagctattatcctgactcagctgggattacaggcacccaccaccacacctggctgattttggtatttttagtagagacggggtttctccatgtcggccaggctggtctcgaactcctgacctcaggtgatccacccgccttgggctcccaaagtgctgggattacagccctgagccaccatggctgacaataataaaaaattttaaagcaaaactaaagatttataaattgtaaaatgcggttgtaacaagtatttactgtaccagtaaatatgaaaaatattaatgtcctcacacacatggaggtggcttgtgagtggtgtgagcatttcatggtcagagtttggcagttgggcgagagacaggatggattttaactcgaacatcgcagacacaaaactgaaaaccctgatgcggtgcctgcaccgttgcctcctttcctgcagctgtaaatgggacgagtaattccatccccctcccgcttccacccttcagcacagacgcagtcttcagcaaggaagtgctgggaacgccctggagtgaacccaggaagatgcctgcagtgggtgccagggcccctctccaccgtccctgctgggcttcggggccacgcccgactgctgtgaacggcctgcggagcaccacgtgcgacggctggaggcgagaggtctgcctttgatgtggctgttggtgcaggg

SEQ ID NO: 16822 - DNA, 2300 bp, Homo sapien
aggacgagcaggtgcagcagggccccagtcccctccactcttgacgctgtcctagctgcagaagaggcgggttcccagccttccctgtgaccacatgtgacctcagccgggacacatccctttgctggccctggccctgagtccctccagccatgatgagccgtgaatgggaccatccctgtccactctgagatgcctggaagggggctcagtgcaggtgggctgggggctgggtctgctgtctgcccagcactgccattctgggagtaggcaggtggggaaggggtcgggggtggagggtctgtgttcagccagtcctgggaaatgcttgatgtgaggcttctgaagatggcagtgaggcagaggcccagccggcggagaagtccctgggagtgagtacctggggatgaactatgctgcctggtgctggggagcagtggcgcccctgggccatccctctgctgaaacctgggcgtctcgctgaagagaccacctccatttcctctgcagagactgagcactcagtcagcccccttcctgggacaggctcaatggaggctgcagggccatcagccgactcctacgcaggctcagtcagcagccccctggccagccccacccctgactgccggcctcagaactgggagctgcttcctggcagggcccgcctctgctgggagaccggacggtgagtcagccttaagcccggcaccagacccctctgaggatggagcaggagctggctgccctgaggctgcaaaacttcttccctcgtggagacagggaggcacctcagacactcaccccggactcccttgaacagggacagggaggaaccccaggcagctagaccccagcagcagccacacgagcacactgtggggcagggaggggcatctcttgagaacaaaagatccatttctcgactttccaaactggagagcttcttgagagaaaagagagagacaggtacaggtccacgccacccacacacagccctgtgcacacagaccggacacaggcgtccacaggcaagttcgcagctgctcattttgtgaagtgaatgctgatttgggggccgggtggggttcgtctgtacatcgtgcactgtcagacccttcctgaaggatttttgttactgaagtatcagaaggcccttgttctaaggtggtggcactgtaatatctggcccaggaggaggtcagtgccgtgccggcgagtcctttgctcccttccttctctgaccagtaaacgcatctccagtcgctcccccgaggcccccctgcacgcagtctccgacctcagagagtgagtcagatagaagccgctgcccaccctcccccaccctggccgggttcttgcctggcttgtgcgtccttgtgacaattcctgacacggatgcgcaccgggcagtggcacgtccaggtgctgtgcgcgcccgggcccacaaagctcctttggacgctcatggcagccccttggtggaggaggtcgggtgcccaccccctccccgcccactgcggaagccggcgacccacggagctcgctctcggccgccgccacccctctgtgttcgcgcccttccgagctctgatccgacgctttgtttcttctcagtgggttcagggcctgggccagcctttacctacctcccccacccaaaaccggcaaaagctcagagcaccttgtctgccaaaagacagggagctgggatggtgcgggttggtctctaaaccggcgtggggaaaaaagaccctccgtacaaagccgcagggtggggctgtcgcaagggcggaaccgagagggtagctgggggcggggttcccagggccaagaggggccattgtcctccctggagcccggcgcccccacagccagctcctctgggagacagcccctcctttcgaatgcgcggggccctcagaccgcgcccggcccagcgctgggggatccttggctgcgggaggggcgccgcattgcgcgcggcgggcggggacgcgcggtgcggagcctgcgggccgggcggggctctgcggcggcgcctcccgattggccacccgcggtgacatcagccgatgcgaagggcggggccgcggctataagagcgcgcggccgcggtccccgaccctcagcagccagcccggcccgcccgcgcccgtccgcagccgcccgccagacgcgcccagtatgagggagatcgtgcacatccaggccggccagtgcggcaaccagatcggggccaaggtgaggctgcgcgccccggcctgtcccgggccccggggcgggaggagggaggcgcc

SEQ ID NO: 16823 - DNA, 2300 bp, Homo sapien
tatgagccaccatggccagctgatttttttgtttgtttgtttgagatggagtctcactctgtcactcaggctggagtgcagtggagtgatctcggctcactgcaacctccacctcctgggttcaagcaattctcctgccttagcctcctgagtagctgggattacaggcacccgtcaccacactggctaattttttttttttttttttgaggcggagtctctatctgttgcccaggctggagcacggtggcacaatctcggttcactgcaagctccgcctcccaggttcacgccattctcctgagtcagcctcccaagtagctgggactacaggtgcccgccaccgcgcctggctaattttttgtatttttagtagagacagggtttcactgtgccagccaggatggtctcgatctcctgacctcatgatccgcccacctcggcctcccaaagtgctaggaccacagacaggcgtgagccactgcgtctggcctaatttttgtatttttagtagagatggggtttcaccatgttggtcaggctggtctcgaactactgacctcgtgatccacccgccttggcctcccaaagtgctgggattgcaggcgtgagccaccgcgcccggccttttttttttttttttttaagatagggtttcactcttgtcccacaggctggtgtgcagtggcttgatctcagctcactgcaacctctgccccctgggttcaagcgattctcgtgtctcagactctgaaacaactgaaattacaggtgcgcgctaccacgcccggctaatttttgtatttttagtagggacagggttttgccctgttgtccaggttggtcctgaactcctgacttcaagtgatctgcctgcctcagcctcccaaagtgctgggattataggcatgagccaccacacccagcctgaatcatttttgtaatttaaaaatttaacgcaaaaagaataaaacttagcaataacaaaaatgcacaaaagatggaaagaaatccacccctgacctttgtggagagatgacctctgataacagtctcagggtgaacgggcacctctgataacagtctcagggtgaacgggcatcccgagacactgttagcagaggtggtccatgtccatgctgtccgcgttacaataattacactatgtttattcttaaggttttaaaaacatttatttttaacaaattttctttgaaaagctaccgtgtgcacgtgagaaaatctcaacaagaccacagggcacccgtgagaagaagctcctcccagtctggggcccctccccaggcacagccttccacacatctaccagaggcacccacgcatagagaagcacccacaagcagttttctttctttcttttatttgagacggtgtttccttctgttgcccaggcttgagtgcagtggcatgacataagctcactgcaacctccacctcccgagttcgtgtgattctccgcctcagcctcccaagcagctgggattacaggtgctcgccaccacgcctggctaatttttgtatttttagtagagacagggttttgccatgttggccaggctggtcttgaactcctgacctcagatgatccactgcctcagcctcccaaagtactgggattacaggcgtgagccaccgtgcctggcacaagcagttttctccccttccttccttccttccttccttccttccttccttccttccttcctctctctctctctttcctttctttcttccttcattccttccttccttccttccttcctttctttctgacagtctcgcactattgcccaggctggagtgcagtggcgcgatctcgactcaccacaacctctgcctcctgggttcaagcaattctcctgcctcagcctctcgagtagctgggagtacaggtgcgcgccaccatgcctggctaatttttgtatttttgggagagatggagtttcactatgttggccaggctggtctcgaactcctgacctcgtgacccacccgcctctgcctcccaaagtgcagggattatgggggtgagccaccgtgcccagctatgagtggttttgtttctatttatttattattattctatgagacagagtctcactctgtcgcccacgctggagtacagtggtgcaatcttggcttactgcaacctccgtctcctgggttcaagcaattcttctgcctcagcttccggagtagctggaacgtgtgagccaccacccctggctaatttttgtatttttagtagagacaggctggtctcgaactcctgacttccg

SEQ ID NO: 16824 - DNA, 2300 bp, Homo sapien
ccggagtagctggaacgtgtgagccaccacccctggctaatttttgtatttttagtagagacaggctggtctcgaactcctgacttccggtgatctgcccacctcagcctcccaaattgttggtattacaggcgtgagccaccgcacctggcctctatttatttatttattttgagatggggtcttgatatgaattcctagactcatgcttctcatgcttgctaccacccagtcctgcctcctgcacagcagtttccactaaagtcacccctttacgagaggcatcttttttttttttttgagatggtgtctcactctgtcgcccaggctggagtgcaatggcatgatctcagctcactgcaagctccacctcctgggttcaagtgattctcctgcttcagcctcccgagtagctgggactacaggcacccgccaccattcccggctaattttttgtatctttagtagagacggggtttcaccatgttagccaggatggtctcgatctcctgacttcgtgatccacccgcctcggcctcccaaagtgttgggattacaggcatgagccactgtacctggcctactagaggcatcttaaaacacatctcctgtgtctccattccaaagcgcatctttgtctacactcctggggtcctcccacgtcagcctcccaaagtgctgggattacagtcatgagccactgtgcccggccccaccaaattgttttctaacctgcttttttcttgaggaatcttctgcagcacatgactcacatgtagagccccttgtttcttgaggccttcatacccgtcagctcatctaaaagtcactcctgaggagtaagggcaaggggcattgggagaggtcaggcagccctgggaagcctcccagcgtgtgtcccaggaggcctgctgcctgcagacactgctcccagacgcagcggcctcggccatcagagcgtgtcccacgatgaggtggcaacttccctgaagggcttgctctcacccaggggtgtggttctccgtgtgcacacagatagatagttctacgtttgccatataccatttatatgcctcacacagattaacccactttcatttcaaaaagacctcctgtcatcgtgcccattgtacagatgaggacactgagacacggaatcctagtgacctgtgcaaggtcacacagctgggaagggtgagggaagcgtctgtgaacccagcaggcccagcccctgagtctaggctccgctcggcagctgtcatgggagcagagtccgagaagcactgcaggcacctgctctagggggagagaggtggaggtggcaggtagagagaggacgacccctgggagctgagacgatgccagcctcacacggacaggctgggtgacctcaggcaagtcgcttcccatttgggaccccaaggacccttctgcagacccagctgggggtccccgatgagactggctctcagagtccctgtgagtcccgtcagctgaggccagtaatgtcctggcaccatcactggacatggtttgctctcccatggaggggcaggtgtagcagccaaaagcgatcctgagctctgggcctctgaaccctgctctgccagctactgtgggtgtctctacccgctctgtgtctcagttccctttcctgaaaagaggggatagtaaaaactaaccctcaaggtgtttattaccaatgcccttcatggaggaatccgctgctccaggcccttgccagcagctgcacagctgggcctggggacctgggtgtgggtctgttgaaccttggcccaccctggggctgtggtcggcctggacgtgtaggtgtggaggtgcatatttattatggcaattttctgacaggtaacagagtgtggggctctcttctgaatggggctcgtggaggccgtgggtcaaaagccctaattttgtagtgagggctaaaaggcttcacaagggaaagggcctggctggggctatgggccggtgccgaccccccctctcccactttgtttgcagttctgggaagtcatcagtgatgagcatggcatcgaccccagcggcaactacgtgggcgactcggacttgcagctggagcggatcagcgtctactacaacgaggcctcttgtgagtgcctgccccagcctccctatcccagccctggactgaccaggtctcagcgtctgactgaccaggtctcagcacctggactcaccagctctcagcatctctgtcctcccatgggttaggttggctgagatgccagcaggcgtaactggatgtcaggcatcca

SEQ ID NO: 16825 - DNA, 2300 bp, Homo sapien
gggcaaggggcattgggagaggtcaggcagccctgggaagcctcccagcgtgtgtcccaggaggcctgctgcctgcagacactgctcccagacgcagcggcctcggccatcagagcgtgtcccacgatgaggtggcaacttccctgaagggcttgctctcacccaggggtgtggttctccgtgtgcacacagatagatagttctacgtttgccatataccatttatatgcctcacacagattaacccactttcatttcaaaaagacctcctgtcatcgtgcccattgtacagatgaggacactgagacacggaatcctagtgacctgtgcaaggtcacacagctgggaagggtgagggaagcgtctgtgaacccagcaggcccagcccctgagtctaggctccgctcggcagctgtcatgggagcagagtccgagaagcactgcaggcacctgctctagggggagagaggtggaggtggcaggtagagagaggacgacccctgggagctgagacgatgccagcctcacacggacaggctgggtgacctcaggcaagtcgcttcccatttgggaccccaaggacccttctgcagacccagctgggggtccccgatgagactggctctcagagtccctgtgagtcccgtcagctgaggccagtaatgtcctggcaccatcactggacatggtttgctctcccatggaggggcaggtgtagcagccaaaagcgatcctgagctctgggcctctgaaccctgctctgccagctactgtgggtgtctctacccgctctgtgtctcagttccctttcctgaaaagaggggatagtaaaaactaaccctcaaggtgtttattaccaatgcccttcatggaggaatccgctgctccaggcccttgccagcagctgcacagctgggcctggggacctgggtgtgggtctgttgaaccttggcccaccctggggctgtggtcggcctggacgtgtaggtgtggaggtgcatatttattatggcaattttctgacaggtaacagagtgtggggctctcttctgaatggggctcgtggaggccgtgggtcaaaagccctaattttgtagtgagggctaaaaggcttcacaagggaaagggcctggctggggctatgggccggtgccgaccccccctctcccactttgtttgcagttctgggaagtcatcagtgatgagcatggcatcgaccccagcggcaactacgtgggcgactcggacttgcagctggagcggatcagcgtctactacaacgaggcctcttgtgagtgcctgccccagcctccctatcccagccctggactgaccaggtctcagcgtctgactgaccaggtctcagcacctggactcaccagctctcagcatctctgtcctcccatgggttaggttggctgagatgccagcaggcgtaactggatgtcaggcatccagacgcacagaacagacaataaatcacagtcacaaaagtgagagccaaacatattagtgccatgagggcctgtgcgtgtccaggggcacagacagggatggggcaggccagagactttggaggccataagagggcctagagaaggggtcacctggagggcttagtcaggggctctttagcaactggtgtgaagtgatttccatatcaaagtggtgatacacccacctgcccacatggacatgtgatttaaaattttatttaatttaatagagacagtctcgatatgttgcccaggctggtctcgaactcctggactcaagcgatccacctgccttggcctcccaaagtgttgggagtgcagacacgagcccctgcatctggtggacgtctgactgaatcctgcctgtcctgctccgtcctgtcctgctccgtccttaaacacagtgaggcttaagggtgaagaaagttgctgaagcttgcctttggtccaggactctgacttcagagtacaggctcttaggatgtgagcaggaggatggcaggcgggcacagaattcagaaagaatgagggagaggctctggccctctgtgacccgaatcaccgagcccctctctcccctcagctcacaagtacgtgcctcgagccattctggtggacctggaacccggaaccatggacagtgtccgctcaggggcctttggacatctcttcaggcctgacaatttcatctttggtaagttccccctgctccaagctctgatggcagaccccatcacaggcaagcccaggtcggtggacggggacggctgtgagaaacaaggaatggtcagctcctcacatgat

SEQ ID NO: 16826 - DNA, 2300 bp, Homo sapien
ccagagatcactgaggactgctgagcagaggcaaggaggaggtgttggggttactggggaggactgctccacagaggctcagccaggcaggggccccggtgggggtgggcctggcttgttggggagacgagccaggaggtgaaggtgggggtgggggtgggcctggcctgttggggagaggagccaggaggtgaaggtgggggccgacttcttcccagggtccctctcactgccaggctgaggatgtactgtggggcccaggtgggagctgagatggggaaggcctttccagaaggaggagctgggagagaggccaggtggacgtggaatctctaggactggggaccttgaagcagcagatagagcggcggctcagggcagtctccctccaggtctgagtgcatggagggacacggcgtccgaagccaccctaagctggggtggaatctcactgcaccctttctgagcgatgtggccttgggggggccgatggagttgcctgtcctgtaggtgactgctggcccccaggcttccgtagggttaaatgagatggtgttggcaacacgccccccaaaacctggccataaactggtcccaaaactggccataaacaaaatctctgcagcactgtgacatgttcatgacggccatgacgcccacgctggaaggtcgtgggtttaccagaatgagggcaaggaacacctggcccacccagggcggaaaactgcttaaaggcattcttaagccacaaacaatagcgtgagcgatctgtgccttaaggacatgctcctgctgcaggtaactagccagacccatccctttatcttggcccatcccttcgtttcccataagggatacttttagttagtctaatatctacagaaacaatgcttatcactggtttgccgttaataaatacgtgggtaagtctctgttcgaggctgtcagctctgaaggctgtgagacccctgatttcccactccacacctctctatctctgtgtgtgtgtgtctttagttcctctagcgctgccgggttagggtctccccgaccgagctggtctctgcaaggtggtgtgtggctcccacttgggaggcctccagttactggcactgtcatcaccatgcccactgaacaaagtggaccaagccccagaggcagccaaaaccacacctttctgcagggagggtaaactgagcccgcgagctcagggcaagcgcaccaggcgcatatgctggccttcatctgtcctcagctcctccctgcgggcacaagcgggggcagctgaatcttccacgcgagaagcctaagagtagggatacgggggcggggagcagcaggcctgctctgtgtgtaaacaacgggaaagcaggaataacgccagggcccgcggacaccagctgcctccgaagtcccgctgcccggcgcctgcatggagcagcctcctgagcgcagtgtggcgcgtcctcctgtgtaaagagggtagagccgcgccgggtccctccctctgcagccgtgaagcccccgcggggccctgcaggtggctggcggcacctgcacacggtggttctctgttcctttttcctcctcaaccactgaggttaaaaaaagtgttaaaagccaccctttttgtttttttgagacggagtctcgctctgtcgcccaggctggagtgcagtggtgcgatctcggctcactccgagctccgcctcccgggttcacgccgttctcccgcctcagcctcccgcgtagctgggactacaggcgcccgccaccgcgcccggctaatttttcgtatttttagtggagacggggtttcaccgtgttagccaggatggtctcgatctcctgacctcgcgatccgcccgcctcggcctcccgaagcgctgggatgacaggcgtgagccgccgcgcccgcccattttttttaaacgtgttggggtttgggtttcagccacaggccttctgcgatgagaggaaacccaggacgcgcagccccaggtcaggcccgcggaacagccgggcggactccggggctcgcagactcgcgacccgcgtgccatgaacctccgcgccggaggcggcagcagcgagcgcggggctggatccagcgtagcggggcggccgggcggatccagcgcagccgggagacagatgcgaggcggcggtcaggtgagcggcgcggggccggcggggtcggggccggcggggacggggccggcggggacggggccggcggggacggggtcggcggggtcggggctgggagggacggggccggcggggacggggtcggcggg

SEQ ID NO: 16827 - DNA, 2300 bp, Homo sapien
ttaccagaatgagggcaaggaacacctggcccacccagggcggaaaactgcttaaaggcattcttaagccacaaacaatagcgtgagcgatctgtgccttaaggacatgctcctgctgcaggtaactagccagacccatccctttatcttggcccatcccttcgtttcccataagggatacttttagttagtctaatatctacagaaacaatgcttatcactggtttgccgttaataaatacgtgggtaagtctctgttcgaggctgtcagctctgaaggctgtgagacccctgatttcccactccacacctctctatctctgtgtgtgtgtgtctttagttcctctagcgctgccgggttagggtctccccgaccgagctggtctctgcaaggtggtgtgtggctcccacttgggaggcctccagttactggcactgtcatcaccatgcccactgaacaaagtggaccaagccccagaggcagccaaaaccacacctttctgcagggagggtaaactgagcccgcgagctcagggcaagcgcaccaggcgcatatgctggccttcatctgtcctcagctcctccctgcgggcacaagcgggggcagctgaatcttccacgcgagaagcctaagagtagggatacgggggcggggagcagcaggcctgctctgtgtgtaaacaacgggaaagcaggaataacgccagggcccgcggacaccagctgcctccgaagtcccgctgcccggcgcctgcatggagcagcctcctgagcgcagtgtggcgcgtcctcctgtgtaaagagggtagagccgcgccgggtccctccctctgcagccgtgaagcccccgcggggccctgcaggtggctggcggcacctgcacacggtggttctctgttcctttttcctcctcaaccactgaggttaaaaaaagtgttaaaagccaccctttttgtttttttgagacggagtctcgctctgtcgcccaggctggagtgcagtggtgcgatctcggctcactccgagctccgcctcccgggttcacgccgttctcccgcctcagcctcccgcgtagctgggactacaggcgcccgccaccgcgcccggctaatttttcgtatttttagtggagacggggtttcaccgtgttagccaggatggtctcgatctcctgacctcgcgatccgcccgcctcggcctcccgaagcgctgggatgacaggcgtgagccgccgcgcccgcccattttttttaaacgtgttggggtttgggtttcagccacaggccttctgcgatgagaggaaacccaggacgcgcagccccaggtcaggcccgcggaacagccgggcggactccggggctcgcagactcgcgacccgcgtgccatgaacctccgcgccggaggcggcagcagcgagcgcggggctggatccagcgtagcggggcggccgggcggatccagcgcagccgggagacagatgcgaggcggcggtcaggtgagcggcgcggggccggcggggtcggggccggcggggacggggccggcggggacggggccggcggggacggggtcggcggggtcggggctgggagggacggggccggcggggacggggtcggcggggacggggctgggagggacggggccggcggggacggggccggcggggacggggccggcggggtcggggctgggagggacggggccggcggggacggggtcggcggggtcggggctgggagggacggggccggcggggacggggccggcggggacggggccggcgaggtcggggccggcggggacggggctgggagggcggcccgcccggcgcaggggcctcgagacctcggccgccccaccccggggacgccgccgctgctccggcgtccacaccagctgcgtgcggagcacccgggcggctcaggggacccgcgtggccgtgcccccgccctgggctgctccgagcctcagtttccccctcggtggaacgggtgggtgggagagacctgcccccgaggagcccgggagaccgggcgagctcccgcgggtgtggtgggtggggaggcacagtgctggggtggcttctccctgcagcaggtgccgaacccacggccaggcttccgtggccagcagccctagaggaatggccatcctgtccctgcgagcccctgggccctggcaggcgatgcaggtatgggcagacaggacgctgttgactccgcacaccggggtgacttctcaggttctcggggtggcagctgcagtgatgacaccgcttcctggtggtcacgccgcgg

SEQ ID NO: 16828 - DNA, 2300 bp, Homo sapien
gtgtgcccagtgaggccaggcagtgcgactacaccggccagtactactgcagccactgccactggaacgacctggctgtgatccctgcacgcgttgtacacaactgggactttgagcctcgaaaggtgggggttggaaggtgggggcatccccctggggagggagagcaggaagggggttggggtgtggagccggtgtacccctggttgggtgttgcccgctgcacgggccctgggtgggtgtgagaggtgtcacccggccgtgcctggcaggtttctcgctgcagcatgcgctacctggcgctgatggtgtctcggcccgtactcaggctccgggagatcaaccctctgctgttcagctacgtggaggagctggtggagattcgcgtgaggctggggccatggaagtggggggcgggggcgctgtgtcaggtgggccctagggccgggccagtaccctcttctcctctgggccacgggaggttctgagcagaggagggaggccacctgcttagggtgagccaggcgccgcggctgcccttttggttgaaggtgctggagcggtgtcccgtagtgatctgatgccaggtgtgaacacaatattaaattttgtaatagccacgttaaaaaagtaaaaagagctgggcacggtgctcacacctgtaatcccagcacttgggaggctgaggtgggtggatcacttgaggtcgggagtttgagaccagcctgaccaacatggtgaaaccccatctctactaaaaatacaaaattggccgggcatggtggtgtgtgcctgtatcccagctactcgggaggctgaggcaggagaatcacttgaacccgggaggctgaggttgctgtgagccgagatcgcgtcactgcactccagcctgggcaacaagagcgaaactctgtctcaaaaaaaagtaaaaagaaacaagtgaagttaatgttaatagtatattttatttagcccaatatatccaaaatgttatttcaacatgaaatcaatgtacatttttgagatatttgctttctttttcttttttgtgccacgtctttggctccagcatgtagcctctgctaagtctcactgcacagcggccactttgaggtgctctgtggctgtgcagggctggtggccactctcttagccagcggtgagggaggaggtagggcgggagccgagggcagacgggagctgcagtcctggcaggacatgatggcgtctcacgccaggtagtgaaaggaggcaggtcccattttacccgggaggagactgtggcagcacgttgagttgccaaggccagggctggggaggcagctgggatttctccggaagtttggcttggtcctgaggctgctggttcctagacagttgtgtgcctgtggggccgggtgagggcagagggaagggagggttttctggaccacggtaagtgagcctcacggtcctgcccagcctgggagctgtgattttgggttttggtgaagcactcagatctcggcccttcgtggggaaccaacccctcctggccctgccgtggccccgggtgtgcggcccacacaggggccgccctgtgtcctggctgaggaggcctgcctgctcccgccttgtttgcagaagctgcgccaggacatcctgctcatgaagccgtacttcatcacctgcagggaggccatggaggctcgtctgctgctgcaggtcagactgccagcaggactggcccccgatgggaagcgcagccagggtggtgaggcacctcaggctcaggttttttccggacagcttgtgcgtggagtgcctttagcagagggtcgcctcaccacggtcccaaggaacaaagcaaacaggtgttctgcctacaaaagagttctccagtcagttccgtttggcaaaccctgcagcccttatgtgaatctccatggggtgggtccagcccagccctcgtcaggcaggttgaccacaaaacacagttttcaaggttcatctaattatgtgctcaacagatacagatgttctagattctggaacagtgaacgaaacagacaggaatgcttgcccttagtgcctttcaagtagggaagacaagaaaaatacgttgtgtgctggggtggtgaactctgtgacaagatagagaaggaagggtggggaatgtgggaagcgtggggagtgcggggatgcggtgtggctgggaggggctgccttagggagtggagggcggggggctacacaggtcaggaaacgtggcccgggtccatcttcccctgtcggcttcctggggctcctggattctactc

SEQ ID NO: 16829 - DNA, 2300 bp, Homo sapien
ttctccaaaattccctgatcatagctgtgtcctcaccatccgctgcttctaggatgtgctgaaaagtccttctcagataatgagctttcaaggtcgagattacaccttgacacgtggtccggattgagtcagctgtactgtcatgaaggtattatactcttgtacttcttttttttcttttttttttttgagacggagtttcactcctgttgtccaggatggagtgcaatggcgcgatctcggctcaccacaacctccgcctcccaggttcaagcaattctcctgctttagcctcccgagtagctgggattacaggcctgcaccaccacgcccggctaaatttgtatttttaatagagacggggtttctccatgttgaggctggtctcgaactcctgacctcaggtgatccgcccgtctcggcctcccaaagtgctgggattacaggcgtgagccaccgcgcctggcctgaaggtattctactcttagttatcagaaaggtcgctcaaatttacagagtggcatgacgcactgtctagtatgagcagtgctttgttggtgagattattttgggcactgtatttttcaacggcaaaaaaagtaagtgaaccattcatgaaagatgctcctggtcacccaagcctttctgttggagcgccaaatcacgggcaaactgggcttcaagaacccttcagagccttgcgggtttctgagcggtacaccagtaagggcttcaacttaaagtccccagctgcactgccaccaagcagcagcatcaagcgatctttggatgacttaaaccctggctcagcattctcttcctcggaaataaacgttcctttgggcattctcttccaatcaagtctcgtctcatctacgttaaagacacctggggggtgtactcaccttcttcgatgatgcttttcagcatttctgtgtacatgtccttgttgctgggagctgcgctgttcatcttgaagtggggcaaacagtggcactccttgaatctcacaagccacccttgacttgcatgaaacctctccgtttgagaaccttcgccatgttcacgctgtaagtcatcaaactcagccttctcctgaacgatggcggcgctcaaggtcgcatttggctggctctggtcttccagccacaagctcagcagctgctccatgctctccatcactgcacttcgatggcgagtcaaccgagaggctctcagaggagtagctatttgtgaactcgctttgattttttctttactatctcgaatggtcgccactgtagagatagcaagatctaaggcctttgcgatctgactgagcttctcacccgcttcaaatcgtcgtaacacttccaatttgaggtcaagggtaatcgctttccgttcccttttggcactagggatgacagttgcatctgtgggcctttccccaggcatttctgcctccaaaatgtcagaaaatcacagcggtctcaagcgcaagaacgctgtggttcctctacgtccccttgcagaactcggtcaacagaaaacgaggctgcgaagaggctcaggctgatgtcctggagacgtggacgggtccccatgggcaggcccagccccactgcctagcccagctgctgcttcactgtccactccgaggaggccgcgcgggtctcccggtaccgctcgaagtccgcgtgttggggccgtgcggccgcaggcacatacaagcggcctgggtcctggggctccagagaacaaccgaccaagcagacaaacggaactccgtgagggggacactgcggcagaaacgtccaggggcggttttccagtgcagcggagggcggaccgggcgggtgttgtttcgggagctgctttccatggaggaccccagaaataagtgttgatgccgatgcccgatttaagataagtctaaaggcgctggctatccccttagggcccagctgtctgggcagggcgaggctgcgctggcgatcaaaccctcgaacggtcaggcgacggcgtggacacccaagacggggccccagccggcgccgcgcccctgccgcgcctgcgcgagtcctccctgcgctcgcggggccctaggaccgctctcccattgcgcatgcgcgcgcccgggcggcgcgggatctgggtctggggatgtggtaccggctgctggcggcggccggcagtagagcggtggccaggccgctggccttgctgtggcgatgtggtggcccaggaggcggcaggacggccaagaccagcgcgagggccctgggcaaggcccgacaggtgagcggggaggcgctctc

SEQ ID NO: 16830 - DNA, 2300 bp, Homo sapien
gtctcactcccaggctggagtgcaatggtgcgaccttggctcactgccacctccgcctcccaggttctaagcgattctcctgcctcagcctcccaagtagctgggattacaggtgcgtgccaccacaccgggctaattttgtattttagtagagacggggtttctccacatcagtcaggctggtctcgaactccccaccttaggtgatctgcccgcctcagcctcccaaagtgctgggattacaggcgtgagccatcgtgcccagccgtctctactaaaaatacaaaattagccgggaatggtggtatgcgcctgtaatcccagcttctcgggaggctgaggcaggagaatcgctttgaacctgggagccggaggttgcagtgagccaagattgcgccattgcactccagcatgggcaagagggaaactccgtctcaaaaaaaaaaaaaaaatgcaaattgctgccacctctccaacctctgcatgtcaccctcagtccacaagtcataaagctctcaaaagagagcaagccagtggggcagagcccttgcctgtcgtgttcaccaagatattccctggtaaatgattaacagatctatctctaataaatgagaagcagatgaatgatccagtccgggaaggaactcaaagatcattcaacgtccgtcctcccttcataaaggggtctatagcagttcaatgattcaaaactctcctgggctatattaggctgtacacaccgatattgcatatcgctgactttcaatatgtgttagcaaccaggaggacctctgcaatgctgatgccacatggccaaagctgaaagactgctttcactcatattgctagcaactaaaccatcatacactttcccaaatgaatggagatggcgggggggggggggagttcattcctgaagacaggacagaaatactcatgggatccttcttcttattttactgctgtctgaaaaccatgacagctttctgggatcaaaattcaaaaactctgcattagaaaaacaattcaacgttactgctgctcactgggatgtatcaatacaaaaataaagcaatcttaaaatgcagaatattccggtcttagaccctaaccctataaaacagggttatgagcagggcacggtggctcaagcctgtagtcccagctactccagaggttgagaaaggagaatcgcttgtgcccatgagttcgagatcagcctagacaacacagcgagactccggccccgctcccaaatttttaaaaataatataataaataacaatagggttatagcgatatctacctatagggcgggtataagacttagataatccgcgtaaagcccttagctctcagcattagctgttaacgacagtgactggtcgctgtataaagaacagtttgcaaaaccctttcacgcctcttatcgtgtctggttcactgagtaactgcgaggtggataaagccgaacgccgccgagcccaggaggacacgggctggcacgcggggccacaaagctggttcgcgaggaggtgggactcaagcgcaaatcgctcaacgcccggcgctttacaaagccgagcaaggaggctggaggtcccggttccgatgtccgaggggaccgggcatccagtaaacagcgggaattccgcaagaagtgggtggaagaggtagcgaggagaagagcaggagtttggagacggaggaggcgggggggcgggaagctctggccaggtgctgtcggcctcactgcgcggaccaggtcagggccgccgccctcccgcgctcccccgcggccggcgcaggcgaatggcgtcacgcggcgtccagagcagaccagccgcccggcaccggcggagagcgcctccccgctcacctgtcgggccttgcccagggccctcgcgctggtcttggccgtcctgccgcctcctgggccaccacatcgccacagcaaggccagcggcctggccaccgctctactgccggccgccgccagcagccggtaccacatccccagacccagatcccgcgccgcccgggcgcgcgcatgcgcaatgggagagcggtcctagggccccgcgagcgcagggaggactcgcgcaggcgcggcaggggcgcggcgccggctggggccccgtcttgggtgtccacgccgtcgcctgaccgttcgagggtttgatcgccagcgcagcctcgccctgcccagacagctgggccctaaggggatagccagcgcctttagacttatcttaaatcgggcatcggcatcaacacttatttctggggtcctccatgga

SEQ ID NO: 16831 - DNA, 2300 bp, Homo sapien
gcccagcctggttctaatattttagaagacagaatcacaccaagaaaagcaaccgtactgtcaagacgatatagagaaagtgagagagacgccagttttccctcctcctgcctctcttcttgcttcatacaatcggcatgagccctcaggtcctaacactgagggaagtgcagggagcaccttctactctgtggagacacagggtctccaggggcttcagtgaacactgtccctggacacaaagcacaaagcacaggtccatggcctacagaaggactccaagtgggcaagtgtgctctgaggtaatgccagtctgcacattgtttctgttctgctttccaaacatgaggcttagctggtcctcagagtcagatacgcagaaaccaaggtttgttcccataccttccaaaagattcatctagcaccttcctttggaaagagcttttctctcaccagctttagtgagatatcaacaccataaagacatggagaaggtgctggatgttgtgtggctcgatatggaagccaggaaggggtaggatggggcggggtggagtggggtgtgccctgagttgtctggaccctcgccccctggtcactcactgtagaagtcacactctgaggaagccactcagttcctgtaaacctcatgctgttaatgatggtggatgaaagacaggtacctttgggtggttttgaacacagccaccaggaaaataacgtcggtcttgcctgcagagtcagcttctgaacgtggatcccctggaagcactggaacaggaggccagatgagctttcctagcttcttctgcaatgcaacaccgcacattctcactggccataaccactggagcaagcagggtgaggtgtgagcttatcgccttaaataccccattagaaatatgattcaatagagtaaacaggagcaagctcactgcagaaatgcactgcaaatgtttatagctatagcctccaacagcaagaaaaaactcccccaaaaaacaaaaaacacggcttagaaactgaggcaatttatttagtaacttgaaatattgcagcttcaaaaacaagactgtaagactaaaacataaaattgtgtaaaatttaaatactgaaatacactatgactcatctttggtcgaccaagagcttaatttcttttctttttttttttttttgagacagagttttgctgtcgcccaggatggagtgcagtggtgtgatctcggctcactgcaacctctgcctcctgggttcatgccattctcctgcctcagcctccccagtagctgggactacaagcacccaccatcacgcccagctaattttatatttttggtagagatggggtttcaccgtgttgattaggctggtctcgaactcccaagctcaggtgatctgcccgttctggcctcccgaagtgctgggatgacaggcatgagcccagcctttttttttttttttcaagatggggtctcattggagtgcagtggctattcacagcagggacaacagacaggtaatacagcatccagcaagaggtaaaagtttttgtcaggccaagaaaacaaataatttttccagaagctctgtattttcttcagtcttcaaggaggaaaacgtcggccaggtgctgtggctcatgcctgtaatctcagcactttgggaggccgaggcgggaggatcacttgaggtcaggagttcgagaccagcctggctaacatggtgaaaccccgtctgtactaaaaatacaaaaattagccgggcatggaggtgggcgcctgtaatcccaattactcgggaggctgagtcaggagaattgcttgaacctgggaggcgaaagttgtattgagccaagatcgtgccactgcactccagcctagcgacagtaagactctctcaaaaaaaaaaaaaaaaaaaaaaaccacacacatacacaaatattaaaaaacaaaatctaagcactcaataacccagtactaactgtatccaacaaaatcccaacataaccagtgaatttatattgtccccaatattttattttatttttttgagacagagtcttgctctgtcacccaggccggagtacagtggcgccatctcagctcactgcaacctccgcctcctgggttcaagcaattctccctatctcagcctcccaagtagctgggattacaggtgcacaccaccacactggctaatttttgtatttttattagagacagagtttcaccatattggtcaggctggtcttgaactcctgacctcaggtgatccacctgtctcagcctcccaaagtg

SEQ ID NO: 16832 - DNA, 2300 bp, Homo sapien
ggtttcaccatgttagccaggctggtctcgaactcctgacctcaagtgatcctcccgcctcggcctcccaaagtgctgagattacaggcatgagccacagcacctggccgacgttttcctccttgaagactgaagaaaatacagagcttctggaaaaattatttgttttcttggcctgacaaaaacttttacctcttgctggatgctgtattacctgtctgttgtccctgctgtgaatagccactgcactccaatgagaccccatcttgaaaaaaaaaaaaaaaggctgggctcatgcctgtcatcccagcacttcgggaggccagaacgggcagatcacctgagcttgggagttcgagaccagcctaatcaacacggtgaaaccccatctctaccaaaaatataaaattagctgggcgtgatggtgggtgcttgtagtcccagctactggggaggctgaggcaggagaatggcatgaacccaggaggcagaggttgcagtgagccgagatcacaccactgcactccatcctgggcgacagcaaaactctgtctcaaaaaaaaaaaaaaagaaaagaaattaagctcttggtcgaccaaagatgagtcatagtgtatttcagtatttaaattttacacaattttatgttttagtcttacagtcttgtttttgaagctgcaatatttcaagttactaaataaattgcctcagtttctaagccgtgttttttgttttttgggggagttttttcttgctgttggaggctatagctataaacatttgcagtgcatttctgcagtgagcttgctcctgtttactctattgaatcatatttctaatggggtatttaaggcgataagctcacacctcaccctgcttgctccagtggttatggccagtgagaatgtgcggtgttgcattgcagaagaagctaggaaagctcatctggcctcctgttccagtgcttccaggggatccacgttcagaagctgactctgcaggcaagaccgacgttattttcctggtggctgtgttcaaaaccacccaaaggtacctgtctttcatccaccatcattaacagcatgaggtttacaggaactgagtggcttcctcagagtgtgacttctacagtgagtgaccagggggcgagggtccagacaactcagggcacaccccactccaccccgccccatcctaccccttcctggcttccatatcgagccacacaacatccagcaccttctccatgtctttatggtgttgatatctcactaaagctggtgagagaaaagctctttccaaaggaaggtgctagatgaatcttttggaaggtatgggaacaaaccttggtttctgcgtatctgactctgaggaccagctaagcctcatgtttggaaagcagaacagaaacaatgtgcagactggcattacctcagagcacacttgcccacttggagtccttctgtaggccatggacctgtgctttgtgctttgtgtccagggacagtgttcactgaagcccctggagaccctgtgtctccacagagtagaaggtgctccctgcacttccctcagtgttaggacctgagggctcatgccgattgtatgaagcaagaagagaggcaggaggagggaaaactggcgtctctctcactttctctatatcgtcttgacagtacggttgcttttcttggtgtgattctgtcttctaaaatattagaaccaggctgggcgccaccgtctgtaatcccagcactttgggaggccgaggcgggcagatcacctgaggtcaagagttcgagaccagctgggcaacacggtgaaaccccgtctctaccaaaaatacaaaatttagctgggtgtagtggcgggtgcctgtaatcctagctactcaggaggctgaggcaggagagtcacttgaacccggaaggcggaggttgcagtgagccgagatcgtgccactgcactccagcctgggtgacaaagtgagactctgtctcaaaaaaaaagaaaaaaaaaaaaaagaaatactagaacctcatcattttgtccctcagggtttgagaaatactttaagaggagtggaaggaacacaaactgagaaacatcaacagcaccaaaaaaaggtaaaagggccagtttgaaaaatcagactgtgaagttttacagttgagtacttttaaagcattcactgaatgggctgatctccttgggaactgataagcaggtgggcctgtgagtgtgtgatggtgacatcgtcttccctgagcttgctcctgggcggtacccatccttcccag

SEQ ID NO: 16833 - DNA, 2300 bp, Homo sapien
tggaaagcagaacagaaacaatgtgcagactggcattacctcagagcacacttgcccacttggagtccttctgtaggccatggacctgtgctttgtgctttgtgtccagggacagtgttcactgaagcccctggagaccctgtgtctccacagagtagaaggtgctccctgcacttccctcagtgttaggacctgagggctcatgccgattgtatgaagcaagaagagaggcaggaggagggaaaactggcgtctctctcactttctctatatcgtcttgacagtacggttgcttttcttggtgtgattctgtcttctaaaatattagaaccaggctgggcgccaccgtctgtaatcccagcactttgggaggccgaggcgggcagatcacctgaggtcaagagttcgagaccagctgggcaacacggtgaaaccccgtctctaccaaaaatacaaaatttagctgggtgtagtggcgggtgcctgtaatcctagctactcaggaggctgaggcaggagagtcacttgaacccggaaggcggaggttgcagtgagccgagatcgtgccactgcactccagcctgggtgacaaagtgagactctgtctcaaaaaaaaagaaaaaaaaaaaaaagaaatactagaacctcatcattttgtccctcagggtttgagaaatactttaagaggagtggaaggaacacaaactgagaaacatcaacagcaccaaaaaaaggtaaaagggccagtttgaaaaatcagactgtgaagttttacagttgagtacttttaaagcattcactgaatgggctgatctccttgggaactgataagcaggtgggcctgtgagtgtgtgatggtgacatcgtcttccctgagcttgctcctgggcggtacccatccttcccaggtcaccagcaccttctcaaccggtttagatcctaagcctcgacaaatcatttaaaaattatatcatggtgtgatggtgtggactgggttttgggattggcgaagtcagtattttgtgtttcccctgtgaaatgtctcctgcttgtgtaccggtgagcatggggtgaagaaacacgtaagtcatattgggaggtgtggtgacttgccttgctacgaaaggaatgtttctttttttttttttttgagacagagtctcactctgtcacccaggctggagtgcagtggcacaatctcggctcactgcaagctctgcctcctgggttcacgccattctcctccttctcctgcctcagcctcccgagtagctgggactacagccgcccgccaccatgcccgggtaatttttttgtatttttagtagagacgggttttcaccgtgttagccaggatggtctcgatatcctgacctcgtgatctgcccgcctgggcctcccaaagggctgggattacaggcatgagccactgcacccggccaaggaatgtttctttgaagactcatgtttgtccttaaaattttgcaaatttttactccatcttgtaatatgtttgccattcctggggtcaccttggccttctctggcctttcatggtgttattttgcagctgttggagtagcactgtatttgtgaagtggacagtgtcatggcttacttgttctggaacttgtcctggaacattacaggaagaggctggtaggtccgtgggacacaaatatacgtaggaggccagattttttggaggagaggcagactctgcttagaacaggtggtttgtgttccctggttctcttgagaagggggaccacccataccagtctgtcttaacattttcttcctttctttctttcccctaataacagccagttttgggactgttaccccaaaaaagtttactattaaagctcaatatgaagccagcgaggtgaaattttagggattttagatgtatctgaagctacttctcagcaatatctccccagcctcatccttttcctgttgtctctttatttccagaaggcactggtgttattaaaattgtgtgttggaaggtgtttttctgttttctgaatcttctttctctggaaaatcatatgtaattgctttgtgaagtcttactttgttttctctcagagactggtgaactagagaatgctgagtctggaggagacggaggcaggagaggagggaagcaggataacgttgcctggtggaggcggatgcagaaggtttgtgtgcatcttagtctgcgcctgctgctgtaacaatacatcagactgggtaatttataaacagggtacatttactgctcacagttgtggaggctggaggtacaa

SEQ ID NO: 16834 - DNA, 2300 bp, Homo sapien
caggctggagtgtagttgtgtagtcatggctcactgcagacttgaactcccaggcacaagcaatcctcttacctcagcctcctgaggagctggaactacaggcacacgccaccatgcccaactaatttttgtatttttactagagacagggtttcaccaggttgtttaggctggtctcgaactccttacctcaggtgatccacctgccttggcctcccatagtgctgggattacaggtgtgagccgccacacccggtcatttttataaatttttttagagacggagtcttgccacgttgcccaggctggtcttgaacttctgggctcaagagatcctctcaccgtggcttcccaaagtgctgggattacagacgtgactcaccgtgcctggcatgaaggtgctatttctgacctcctgagtgtgacaagtagttctcttggattttccagctctttcttgtgaagtctggtgcccacccttctcctggttggcattctcgtctatgctgccaggaggggccttatgggatccaggcgcagtagacgaggagggggcctcttcggtgttggtgagacagcagccaagatcttaaaaagcaacatcgatgtgttatttgcagacgtagctgggtgcgaagaatcaaattggaaattatggaatttgtgaatttcctgaagaatcccaagcagtatcaggacttaggagcaaaaattccaaaggtattgattttggaaaacatagtaatactctgagctccacatagatggctgtgggtcagagtcggttcttactcctgttttattaatttaatattaattacatagaacaacaggtacaacttgtatgaacaggcttgggatcagatgtagttgcctcttggtaagcccgtgacccagccagcggctaggtgtgtgcagccagacggcggctacgtgtgtgcgggcagtcagccagcgcgttgcaggtggtgtgggtcagggtgctggatctggctgctgggcacacagagcaagtttatctcttcgtgccattttggggtcatgactctttgggggcctgagagaagccatggattttttttcccagaaatatttgcattcacagaaactcgattcacacacccttttaactcacctctgggctttggaccaggctgacatccagatccttgcagtggccttgcacccccaccccccagcacctcccgatggggtgggcattcactgggcagtttgttccaaacaacaaataatgattataccaagcaccgggaacctggggcggagccagaaggtgacagacctgttttccactttgatgagcatgaggctgggaagcaggtgtgtgtgacagatgtgcagagcctggggccttctgctcctgttggagctccactggcagctgccattcacctcagctcatagtcaggtgctgcagtgggtggttctctttgcctttcagaatttttttttttttttttttttgagacggagtctcgctctgtggcccaggcgggagtgcagtggcgcaatctcggctcactgcaacctccacctcccgggttcacgccattctcctgcctcagcctcccgagtagctgggactacaggcgcccaccatcacgcccggctaattttttttgtatttttagtagagacggggtttcaccgtgttagccaggatggtctcgatctcctgacctcgtgatccgcccgcctcggcctcccaaagtgctgggattacaagcgtgagccaccgcgcccggcctttttttttttggagacagagtcttgctctgttgcccaggctggagtgcagtggtgcgatcttggttcactgcaacctccacctcccgggttcaagctattctcctgcctcagcctcctgagaagctggaattaacagttgtgtatcaccacgcccagctaatttttgtaattttagtagagacaggatttcaccatgttggccaggctggtctcaaactcctgacttcaggtgatccacctgccttagcctcccaaagtgctgagattacaggtgtgagcgatcgcatcctttttttttttttaatttatatctattgctgctgaacaaattacagtttttttttcatatgcatgtatttgctggggaaaatctgtatgatggagtgggtgaggcagtcaggtaccaagaaaggcccctcacgtggtgtgttggtccccctttcccagcaggcaggggctcctgcgagagggggctctgtcagcttctgtgttacatcacaggcctcgtgctctgctgtggatgtcaggaa

SEQ ID NO: 16835 - DNA, 2300 bp, Homo sapien
tggcaatagttgcactacgtgatcagtttattaaaaatcgttgatgtgtgtgtgtaaaatgggtggattttatggtttataaattataccttaataaaggttaacaaaaaatgtggctaaatagtggtgactgatggacacctcccattacctttaagttctctactgaagttcagccttggcctctctgctggagattttccttaacaactgatctgggtcaagctccagcggccaggagcagcactgactgttggctattccttcctgggtctggtgctgatatttcgaatgtttgcaatgaagcagccctgattgctgcctggcatctgagttcttctgttcaggagaaacactttcagcaggccattgagagggtcatcggaggtgagcctgggagcccttagggagggaggggtgtttgcagctctgggcctggcaggctcaccccctggccccagtttcaattctgcatgcaggccgggcgcagtggctcacacctgtaatcctggcactttgggaggccgaggcgggtggatcacttgagttcaggagtttgagaccagcctggccaccatggcgaaaccctatcttgatttttaaatacaaaaattagccgggcatggtggcacacacctgtagtcccagctactcaggaggctgaggcaggagaacctcatggacccgggaggcagaggttgcagtgagccaggatcgtgccactgcactccaatctgggcgacagagcaagactccgtctcaaaaaaaaaaaaaatcaattctgcctgcaggaaccaattttctaaaccaacatatgggacttgggattttccaatagctttcatgccccttctgggagcaacatttagaaattgaaagagatgggccttccaggccgtcagaggcccaaggaggcatattagaaccaggtttgaatgcctcctgtggagggcaaaggagccttcttccctgaaggtaatggatgagatttcctgggaaaagcctcctggaagctgtagggaccttcccgggcctcctcaggacagtactgttgtgaaaggagtgaacaaagtgaatttccttttttcctttttttttttttgagacggagtttcgctcttgttgcccaggctggagtacagcagcgtgatctcggctcactgcaacctctgcctcctgggttcaagcgattctcctgcctcctcatcctgagtagctgggattacggtcacgtagcaccacacctggctaatttttgtattgttagtagagatggggtttcgccattttggtcaggctggtctcgaactcctgacctcaggtgatctgcccacctcggcctcccaaagtgttgggattacaggtgcgagccactgtgcccagccttacagtgcatttgctttagcttggtggggagcagtatccgtctctgtcttcagctcagcagactgtagagtgggctggatcacacagcctcctgcagcttagggaactggagtcagctgtgaggaagggtctcctggggctgccagaccaggcaatgccaacacggtcttgcttggcctggctctccctggtgctgttctgagggtggagaatagggaggtggccagtagccatccttcatggtccaccctaagctgtgagagctgacgttggtcaggtggaagagcattctagctgctgctgctttatttaaccatttatcgaagtataatgtatacataaagtacttatgatatcgagtatcccaaagcaaacaccaaaggtgcttttttttttttttttttgtctgaaatgaagtgatggagtctcgctctgtctcccatgctggagtgcagtggtgcagtcttggctcactgcaagctccgcctcctgggttcaagcgattctcttgcctcagcctcccaagtagctgggactacaggtgtgcaccaccacgtccagctagttttttgtatttttagtagagatggggtttcaccatgttagccaggatggtctcgaactcctgacctcgtgatctgcctgccttggcctcccaaagtgttgggattgcaggtgtgagccactgctcccagcccaaagctacttatttttatttaacttgaaaaaattttaaaaaattttatagaggtggggtcttgctatgtagcccaggctggtctcaatctcctgagttcaagtgattctcctaccttggcctccaaagttctaggattccaggtgtggtcactgtgtcctgccaccagagcctcctgagggctgtcctggtgtgattagagggctctgagcagggc

SEQ ID NO: 16836 - DNA, 2300 bp, Homo sapien
agccactgtgcccagccttacagtgcatttgctttagcttggtggggagcagtatccgtctctgtcttcagctcagcagactgtagagtgggctggatcacacagcctcctgcagcttagggaactggagtcagctgtgaggaagggtctcctggggctgccagaccaggcaatgccaacacggtcttgcttggcctggctctccctggtgctgttctgagggtggagaatagggaggtggccagtagccatccttcatggtccaccctaagctgtgagagctgacgttggtcaggtggaagagcattctagctgctgctgctttatttaaccatttatcgaagtataatgtatacataaagtacttatgatatcgagtatcccaaagcaaacaccaaaggtgcttttttttttttttttttgtctgaaatgaagtgatggagtctcgctctgtctcccatgctggagtgcagtggtgcagtcttggctcactgcaagctccgcctcctgggttcaagcgattctcttgcctcagcctcccaagtagctgggactacaggtgtgcaccaccacgtccagctagttttttgtatttttagtagagatggggtttcaccatgttagccaggatggtctcgaactcctgacctcgtgatctgcctgccttggcctcccaaagtgttgggattgcaggtgtgagccactgctcccagcccaaagctacttatttttatttaacttgaaaaaattttaaaaaattttatagaggtggggtcttgctatgtagcccaggctggtctcaatctcctgagttcaagtgattctcctaccttggcctccaaagttctaggattccaggtgtggtcactgtgtcctgccaccagagcctcctgagggctgtcctggtgtgattagagggctctgagcagggccagctgtgccatctgtgcttttcctttgtcctgttacctacccttgcactgggccgttagggcactgagatcatccctctccatcctgtcatgctgtgctgtcatctttagtcaagccagaggatatggtgcttcgctgtgtttcacacacagctgttcccattggcttcaaatgggcctgtttagttaaggctttgtgtgaagtatgtgggaagtgggtttcactttcaagaaggcagcatggagctggggcttggcctctgctgtctggtatagaggagcctggggatcaggtgtagctgcagatacagctgggcgcagagggagtggcctcatttcccagccacctactcctgccgtgcctcactcgccggggaatgtgatgtgtaggtcttgagaagaaggcccaggtcctgcagcccggtgaaaagacaactgtggcctaccacgaggccggacacgtggtggtaggctggttcttggagcacgtggaccccctgctgaaggttggtcctcccaccctgagtgagtccacctggcaggcttgggcctggtatctctgggccaacctgtggtcatgtgggcatggtacattcaaggattggccctttagctttttaaggaataaactgctctagaatttgtcaaaagatcccttcggggtgggaaagcagggcagtgggttccaaatggggccttggccatgcgactccagggagcagcctcagtgttaaacccgcctgactcctgagctctggattcgaccgttggcctctccagagactctgcagggtgggcagagcgtaggtggtttccacgtgaagctcccaaaggcgggtgcacttcttggggcatccccatggtgtatggggggcctgggtcaggctgtcttctctcctgttccagtagaaggacctgtggtcagagctagggtcaggtggcctggccgctccagggtggctcctggaggaagtggggacagtgtttggggtgatgagggcatgtgtcctgtcctcaggtgtccatcataccccagggcaaggggctccgctacgcacagtacctgccccgggagcagcagctctacacccaggagcagctcttcgaccgcacgtgcatgatgctcgggggccgggtagccgagcagctgtgctccgggtagatcactatgggggctcaggacgacctgaggaaggtcacccagagtgcctacgcccaggtaagggtgggcatcccccggcacgggccgcaggaggctctgttgggcgcaggctcatcctgggttccgcactggcaggttgtgcagtttggggtgagtgagaagctgggccaggtgtccttcgacttttcccgacacggcaagaccct

SEQ ID NO: 16837 - DNA, 2300 bp, Homo sapien
tgtagccttcctcagctggggatcctgagagcagggcctcctggccggtgacgtacatccctgcaccttggttccccactcgtacctgctctcagggctctgggtcagccatgccagagggacagcgcctgctctgtcctggacctggcaggtctgaggcccctgccgcaccctcagggccggctgcagcaccctcctgagactcgaggctaggacagggctacgccctctgcagccacggccactgctctgagctgtgtggaagcattttggaattgtgaccacagcacagtccagcaggacatgaacacactgtgggcgggggcctggggctttggtctacactgtctctccttgaggaagggcccaagggccaggctgggtctcctggagtcccctctcctgggcaccccctcagcgctatggacaatggtcaagcaggcttcttcctgctggtgtccgggaggtccccctgctcacagccttagaacagagtccacatctcaccccctgtcccctgtgccctctgggcggagaggtatccctgctgggcttgggggtgggccaggacaccagtaacttgaccctttaggatgctcagaaacctcattccagatgccagtggaaaggtggaaaccagattccgcgagagccccgtccagcccgcccaacccccaggcctgaaacgggccatgccatgacacagcactcggcttctcagacaggaggcaggtgggccacacagaatgaccacacggccgacggggcgaggggacactgtcaggccacagggctgcccccaggcacagcctaacactcggctcgctgccaggccacctgcccacaaccacactgcccagctcttaagccactggggacctcccagccctgcaccggtgcccctcactcaggaggccgggcacctgcgggcctcagctcccttggctctgctggggaggggtgggggtgcaccgggacggacgctccaggcccacctggcagtatctaggctgccagctagtgccacgggggaggacaggcccacccctcacaggcagctgctggcgctgtgaaccccagctgcagccccctcagcaagagcctcatggcagcagctgctcccctcggcttcaagcacacccagctacgatcagtgctcaccgctgggggctgccaaaaataccccacagggtcctcagggtgctgctggcagcaacgggaaggcacctatccatctgacaagcgtgcgctgggcacccactcaggtgggaggtgctggtgtccccagaaggcccctgccatgcagggtccaggaagcagctgagggaaggagggccatctggaaacaggttcctgcaggggcaatgggtggggggaaggaagccagcgctttgtctcttccctgagagatagacccacagggcctagggccaaaggggggcatgcacccagggacaggcctgactctgactaacaggactcactggctgcctgaggcaagtgaggtggccgctaggacggcgtggccctggatgagagggtgagcagctgaggaggggctgaggggatctgtggagggatggacataagactcgccaatgtccccggctttgggtcagcagccaaggggcctcctgctctcatctgacaaaacaattgttaagtatataaaagaaacagttgggccaggcacggtggctcatgcctataatctcagcactttgggaggccaaggcgggtggatcacgagtaaaaatacaaaaaaaaaaaaaaaaaattagctgggtgtggtggcgggcacctgtagtcccagctactaaggaggctgaggcaggagaatcgcttgaacccgtgaggtggagactgcaatgagccgagatcgcgccactgcactccagcctggtgacagagcgagactctgtctcaaaaaaaaaaaaaaaaaaaggtagttacgtttgtgaaaaaaaatgaggccaggctcggtggctcacaccttgtaatcctagcactttgggaggctgaggcgggcggatcacctgaggtcaggagttcagcctggccaacatggtgaaaccccgtctctactaaaaatacaaaaattagccgggcgtgctggtgcatgcctgtaatcccatctactcagggggatgaggcaggagaatcgctcaaacccaaggggcagaggttgcagtgagccgagattgcaccactgcactccagcctgggtgacagagcgagactccatctaaaaaaaataaataaacatgggagaaacctggaagaatatttgctcaactgtg

SEQ ID NO: 16838 - DNA, 2300 bp, Homo sapien
aacatcttcttaaaaagtggtcatctacttgggaggttgaggtgggagaatcgtttgagccctggaggtggaggttgcagtgagccaagatcacaccacttcactccagcctaggtaacagaatgagacctgagaccctgtctcaaaaaaaaaaagaaaaggtcttgtagcagatcttgttctcccatgtgtctggggatgaagagtacagaatccatgctcgtagaaagttgtgctgggggcaaagtgtgagaaatgaaagaaggcctggtggacctaggtcttcctgtccagctgggggaggaagttgccacatgagctgggtttgctcaggcctcaggcacccacacagtggtgggaatctgagaaccactgtgatgagagacttcctgtttgcccacctaagtcctgattgttcttggagaggagcagccagttggaagaactgcattggctcagcttgcacaaagcagtgatttatttatagtaagccctgaggcctctgtgaagtctggctggtcactgtgcctgggcaaccaggagccagcatcactgtgccagactcccttggcctgagaggggcctcctccccctgggacagggtggtcagacagtgacgctggagagcacagtgggggtaattattataatttaacacttacttcacaaaaccaatatgctagcagcttcatgctgattggctttttgcttcagaagtctggatgagtgtcctgaattaaatagctgtattaacaataattcctttcagcaaaaagggcaagaataggagggttagctcaggatagcctagacagggtactcatttttcacaagctaagagcaatcctggtctgtcggtgtgggctgcagagatgaatcattcagggagccctgaattgcggctccctgggatcccgacagggcccactgcgacctgttcttttcatattgaattcgagttcagatttttagaaaagagccttttcttcacatatgtggcttaagatactttcattcagtgtcaagctgtgcagctcagaaacccagataaatggcatctgagtttcctgcaaaatcccagagcaaatgttaatacaaacaaaccgactgccctctgtctgatgtctgatgcttcctgccacccactatccaccaggtaaaccgcctcaggccacggcatcaactcagtgaaggcctggatgctgggttaacaagagtgtttatgaagactagactttttcttttcttttcttttcttttttttttttgagacatacaatcatagctcacggcagccttggactcctgagctcaagctgtgctcccacctcagcctcccaaagggctgggattacaggcatgagtcaatgctcctgcaaacggactttctttgagagataaatattgaagtacttacaaatgcaatgatctaatgtgtatataatttgcttcaaaatgacccagcagtggagggaagtgaatgaggacagagaagcagtggcccaggccaggagctggcaatcgctgaatctgggcgatagggacatgggggtcagtttcatcgaaactgccttggcgctctctgcagcccgggcccgccgccctctccttacctcccatcccccatcccgccccttccagcctcccaagcacacgccctcgcccccacccgccccccgcgttaattcgcgccatccagggcgctctgtgagtctgtcattacccagcgcgagtcaggcccctcctgtgcccctcgccagccccgaggggcgcccgcacacagtcggcgccccacacgcaagtacctggaagagaacaagaggacgccagcgggcgcggccgccaagtgagtgcgcaggagccccggacgcccggccggggtcgggagggcgcagccaggtcccggtggtgtccgcggcggggcgcggcccgcgagggaagggtcggcgggggaggggtccgctgggccaggggccagcagggggcgcgcgcgggccggggcggggccgcacctgtcctgcggctgggggggcgccgggagggggccggggcccgggagcagctgcgcgccccgccccgccccgcgggctcctccctgccgccgcggccccccggttgctgccccgatgcgctgcgcccggagccggggccgagtcgctgccgcagctgttggggcgcccgggccaggcgacgccgccgtcgcccgtgcccctcccagaccgcaccggccgcatggagcccccggagggcgccggcaccggaggtgagttcagccccagcccccgagacccccgcgcagc

SEQ ID NO: 16839 - DNA, 2300 bp, Homo sapien
tccttttctaactaatctcttgttctgaaaactgctagccattttacaatttctaaaatgaatctgccatccgtgaaaccaccctgttacctacatacaaccatctatgtcacccagaaagctgagtttgtcataaacaggtgcttttttttttttttttttttggagacagggtctccttctgtcgcctaggctgtgatcacaactcactgcagcctcgacctcctgggctcaagcaatcctcccacctcagcctcctgagaagccaggactacaggtgtgagacaccatacccagcttttttttttaagtttttaatagagacggggtcttgctttattgcccagagtggtctcaaactcctggcctcaagtgatcctcctgcctcggcctcccaaagtgctgggagcacgtgagccccacgcccagccctaagctctcatctttaacatcttcttaaaaagtggtcatctacttgggaggttgaggtgggagaatcgtttgagccctggaggtggaggttgcagtgagccaagatcacaccacttcactccagcctaggtaacagaatgagacctgagaccctgtctcaaaaaaaaaaagaaaaggtcttgtagcagatcttgttctcccatgtgtctggggatgaagagtacagaatccatgctcgtagaaagttgtgctgggggcaaagtgtgagaaatgaaagaaggcctggtggacctaggtcttcctgtccagctgggggaggaagttgccacatgagctgggtttgctcaggcctcaggcacccacacagtggtgggaatctgagaaccactgtgatgagagacttcctgtttgcccacctaagtcctgattgttcttggagaggagcagccagttggaagaactgcattggctcagcttgcacaaagcagtgatttatttatagtaagccctgaggcctctgtgaagtctggctggtcactgtgcctgggcaaccaggagccagcatcactgtgccagactcccttggcctgagaggggcctcctccccctgggacagggtggtcagacagtgacgctggagagcacagtgggggtaattattataatttaacacttacttcacaaaaccaatatgctagcagcttcatgctgattggctttttgcttcagaagtctggatgagtgtcctgaattaaatagctgtattaacaataattcctttcagcaaaaagggcaagaataggagggttagctcaggatagcctagacagggtactcatttttcacaagctaagagcaatcctggtctgtcggtgtgggctgcagagatgaatcattcagggagccctgaattgcggctccctgggatcccgacagggcccactgcgacctgttcttttcatattgaattcgagttcagatttttagaaaagagccttttcttcacatatgtggcttaagatactttcattcagtgtcaagctgtgcagctcagaaacccagataaatggcatctgagtttcctgcaaaatcccagagcaaatgttaatacaaacaaaccgactgccctctgtctgatgtctgatgcttcctgccacccactatccaccaggtaaaccgcctcaggccacggcatcaactcagtgaaggcctggatgctgggttaacaagagtgtttatgaagactagactttttcttttcttttcttttcttttttttttttgagacatacaatcatagctcacggcagccttggactcctgagctcaagctgtgctcccacctcagcctcccaaagggctgggattacaggcatgagtcaatgctcctgcaaacggactttctttgagagataaatattgaagtacttacaaatgcaatgatctaatgtgtatataatttgcttcaaaatgacccagcagtggagggaagtgaatgaggacagagaagcagtggcccaggccaggagctggcaatcgctgaatctgggcgatagggacatgggggtcagtttcatcgaaactgccttggcgctctctgcagcccgggcccgccgccctctccttacctcccatcccccatcccgccccttccagcctcccaagcacacgccctcgcccccacccgccccccgcgttaattcgcgccatccagggcgctctgtgagtctgtcattacccagcgcgagtcaggcccctcctgtgcccctcgccagccccgaggggcgcccgcacacagtcggcgccccacacgcaagtacctggaagagaacaagaggacgccagcgggcgcggccgccaagtgagtg

SEQ ID NO: 16840 - DNA, 2300 bp, Homo sapien
tttgcaggaaactcagatgccatttatctgggtttctgagctgcacagcttgacactgaatgaaagtatcttaagccacatatgtgaagaaaaggctcttttctaaaaatctgaactcgaattcaatatgaaaagaacaggtcgcagtgggccctgtcgggatcccagggagccgcaattcagggctccctgaatgattcatctctgcagcccacaccgacagaccaggattgctcttagcttgtgaaaaatgagtaccctgtctaggctatcctgagctaaccctcctattcttgccctttttgctgaaaggaattattgttaatacagctatttaattcaggacactcatccagacttctgaagcaaaaagccaatcagcatgaagctgctagcatattggttttgtgaagtaagtgttaaattataataattacccccactgtgctctccagcgtcactgtctgaccaccctgtcccagggggaggaggcccctctcaggccaagggagtctggcacagtgatgctggctcctggttgcccaggcacagtgaccagccagacttcacagaggcctcagggcttactataaataaatcactgctttgtgcaagctgagccaatgcagttcttccaactggctgctcctctccaagaacaatcaggacttaggtgggcaaacaggaagtctctcatcacagtggttctcagattcccaccactgtgtgggtgcctgaggcctgagcaaacccagctcatgtggcaacttcctcccccagctggacaggaagacctaggtccaccaggccttctttcatttctcacactttgcccccagcacaactttctacgagcatggattctgtactcttcatccccagacacatgggagaacaagatctgctacaagaccttttctttttttttttgagacagggtctcaggtctcattctgttacctaggctggagtgaagtggtgtgatcttggctcactgcaacctccacctccagggctcaaacgattctcccacctcaacctcccaagtagatgaccactttttaagaagatgttaaagatgagagcttagggctgggcgtggggctcacgtgctcccagcactttgggaggccgaggcaggaggatcacttgaggccaggagtttgagaccactctgggcaataaagcaagaccccgtctctattaaaaacttaaaaaaaaaagctgggtatggtgtctcacacctgtagtcctggcttctcaggaggctgaggtgggaggattgcttgagcccaggaggtcgaggctgcagtgagttgtgatcacagcctaggcgacagaaggagaccctgtctccaaaaaaaaaaaaaaaaaaaagcacctgtttatgacaaactcagctttctgggtgacatagatggttgtatgtaggtaacagggtggtttcacggatggcagattcattttagaaattgtaaaatggctagcagttttcagaacaagagattagttagaaaaggaaagtggcagctgtttgttttctgcagggcctgtcgggaagcctctggtttcttttcatccgtgaggagtggggaggaggcctcttcaggaagagcagtttatttttgtgaaaggaatacttactgatttcaaacatttggaactaaactggaacgtatttttctttccgatttctgcgtttttgaggtgtgtgtaaacccaccagcgcagcagctgggagggcccttcaaaggtgggcgggtggggtgagtgaggcccaggggatagagtgtttgcccagatttgaatctcatttggggaaagtttcagaggcttgggtggctgattgatcattccttcaatggtccttcatcagcacgtctttactgagcacgtgctgtgtgctgttctaggcgctgaaggatagaagtgaagggttcccccctcgtggagcttaggttccagcaataagcaaaacatgccctgcagcgaaaggcttctgggctgccggcgacattttcccaacgttcacaaccgggttccttccggacgcccgtctctagggacgcactcccgcctttggcagggccgctgcccggcggagtctcgcgaggatcttgtgacttatcgcggcatcgcccagcggttgccgggaaacggcgtggcttccgggggcgggcgccctggtcccggagtcgccgctgggcctgtccgctggcgtcatggtgagcaggggcgggagcggggctggggtcctcggcaggggcccggagacctcggggcagggaggcctcggtaca

SEQ ID NO: 16841 - DNA, 2300 bp, Homo sapien
gtgcttctccaaatgcaacaacaggatgtgtgtgtggtaaagggtgggaacactcagggcaatgatgtgctccaggtgagcagaagggagagaggttccagaaccttctctgccaaatgttcctgggagcaaatcagagccagccaagaaggggaagctgttagagtctctcttaccccattatttccaccaaaggcaccgaaaaagaaagggaagaaaggcaaagccaaaggcaccccgattgtcgatgggctcgctccagaggacatgagcaaggagcaggtgagcagagcgggctgtggcccagtccccgggtgggcgtgggcgggcaccacgcagggtgcctacgccgagtgtccatcttgccatgtggatccacccttctgtccaagccagaacacgccccccgcgtggcccataattcccatcagcggcaaagctttcggctgcaccatgtcttttcagaaaggtagtgcagcctgtgaaagagctttgtaacagggtggtaggagtgtggaaggacatgcttttctgatctaaaagctgtttttaatttcgtgtattctctttcaatcttaccctttttttgcacctgatgtgtatagacttatcgtagaacacacatgtagcattctcctttattttattcaccattaaacattatgtcaaaaaggaagtttttgaaagaaggatgatttacttcaaatcacatctgaatctgattaatcgttcatttttttttttttttttttttttttttttgagacggagtctcactctgtcgcccaggctggagtgcagtggcgcgatctcggctcactgtgagctccacctcccgggttcacaccattctcctgcctcagcctcccgagtagctgggactacaggcacctgccaccacgcctggctaattttttttttgtatttttagtagagacggggtttcaccgtgttagccaggatggtctcgatctcctgacctcgtgatccactcgcctcggcctcccaaagtgctgggattacaggcatgagccaccacgcctggccagtcattcattgtttttgataaaagtcccaacaaggagtaacagcatcagggctgcctttttcttgttgcttattttggggaggaggtgatgtttttatagtttctttgtaggagttagtttaagtctcttcttcatttggatgtagttaagggctacagaacataattacataattacaattttacctaaaaggctcctggagacggcagtgtgtggcaagcacggtgcaccctctggcctctgccctcatggacgactgcctgtgagcacctgacatgggacatgagggctgtgtcaactctgtgttattgttaataaatcttaccttcttttgatagttgtaagataaaaaatcaatacgaaggagactgaaagagtctcatgacctgaagttggagctaggcagaggtccttgaacaatggtaaagaatggctttattttacatgcaggcaaaccattggcagtttaagccagtggctaagcagagaggtgatggggtcaggtttgtgttctggaaagatgtctggagctgctggatggagaatggattgaacactgcgttgtcccagcatgtgagctgctgcccgtctccctgtccgcttcccattcctgtggagacaggccttgtggggcagtggccatggagcctacggggcagcctacggggcaggctacggggcagcttacggggcaggctatggggcagcctacggggcaggctacggggcaggcccttgcactgcacatcgcacgttgagccacagactcagaaggcttcttcagggtccaggcaggtggggagggatgggggtgacctggagactcctgccccgcagcagaggacagtttcatctgttcactggggagtgccttgtgggcctaggagttcagtgctgtttttttctgattttccaagagaagctggaaatctggatatttataagaaatctgaatattgagtgatggcaaaatctcaacaccatgtgagccaaacagaccagtcaggagccctggttcaggctctgcccaggagcctctaaaggtctgtgacgtgaagacatttgtcgttgtgccgaggcactggttggattcgggggtgcgtgtctccctcatgtctgcccggcatcctcggctcagaacccctcctgctgctccttcttgtttgctcgttgtcttgtcttcttttgaggtgagaaatgtgttttccctgtggggaatgtggtgttgagaaagaaaaaggctcacagtaa

SEQ ID NO: 16842 - DNA, 2300 bp, Homo sapien
cttgcacctacctgctcacctgcacatacctgccccacgtgctcacctccccacacctcacctgcacatacctcctcacctggccacgcctcctcacctgcacacacatgctcacttgcatccacctgctcacttgcatgcctcacctttacacagctacacatgcctgttcacctatgcaaacctgtacacttgaggcacagagcaggacaccaaggctgggaggtgaggtgcatccccagctcatggggtattaagtggcagagctgagttgcaaacaggccagtctgcccccagagcccatattccttccatgttgtggaggcagcattttaaaccctcaggacctgcagggtctctccctcaggcttttataaaaaacacctttaaggctgtgactcccaaagccaagaacagaaaatgtcccacctgcaccctcactggatccagctcctctggggctctgtggtgaccaggttagcacgtgcaggccggccccactcaccttgatctccacctggtgcctctcctcggcttcttccatctcccggtctttgttccgcagctcagccttcttctcctccagctgcctccgtgtgatctcccagaaggtgtggatcttgtcccgctccagctggaagtagtttcgttcctcccgctcgcggtccagctcctcccggatgcggctgacatgctcctccacctggccaggtgcagtgggtcaggtgaggcactgagcaggggcccatgcacggcaacggggcgtgtggccggcgaaaggcaaggaagaaagagggaggactcaacttcacctaaaaataaacagctaaatgtaaaaagttaaaatataaggctaggaagctccggagacagaatgcattcagcaggtggcagaattctcttcaatttggccaataatcataaaataactagatcctttcatccattcctgagaattgatgcctaaaaaatttctcaaaagaaatataagagcatcttgctcaaagatattacccacaccattattacaacagcaaaaatatcaaaaaggaaataacctaagaccagtttaaacagggaaataagcgaggcgcggtggctctcgcctgcaaccccagcactctgggaggctgaggttgaaggatccctcgcgcccaggagctgaagaccagcttgggcaacatagcaagaccccatctctgcaaaaactttttttcattaactaggcatgatggcacgcacctatagtctcagctactgggagagctgaggtgggagggtcactcaagctcagggggttgaggctgcggttagttatgatcatgccactacactccagcctgggtgacagagtgagaatctgtctcaaaaaatacacaaacagccaggcatggtggctcccaccactttgggaggatcttttgagccccagagttgaacagcctaggcaacatggcaaaaccctgtctctacaaaaaaaaaaaaaaaaaaaaattagccaggagtggtggcacatgcctatagtcccagctactcagaagactgaggtaggaggatcgtttggacctgggaggtcaaggctgccgtgagccgtgatcacaccactgcactccacctgggtgacagagcaggaccctgtctctaaacaataaataaataaatatggaaatggttgaaaaattagagtatatcaactaggagaaatatcacattaacccaaaaaaaatatgcaaatgatgtagcagcatttaaacaaattcatatcataatgctaaatgaaaaaaaattcacctttgaagatataatgttaagcaaaaaatatacaaaaccagtagactctaaaatctcaagagggttcaattgcgaatctgcaaataggttaaaaaaaaatgtaggacaggcttccagctttctcgggagctcatttcccttaagaatcagttactgccaggcgcggtggctcacacctgtaatcccagcactttgggaggcagagacaggcagatcatgaggtcaggagatcaaggccatcctggctaacacggtgaaacctcgtctctactaaaaatacaaaaaaattagccgggcgtgatggcaggcacctgcagtcccagctactgggcagcctgaagcagcaggatggtgtgaacccaggaggtggagcttgcagtgagccgaggtcgcgccaccgcactccagcctgggccacacagcgagattccgtcagaatcagttacttttcgggcacagccccaggccacttactgtgagcctttttctttctcaacaccacattcccc

SEQ ID NO: 16843 - DNA, 2300 bp, Homo sapien
ttaggaaagccagttcctagcagtgggattgttgagtctgagggttctgttctgaggaccctgatcatctgtccagagggctgctctgagtcacacacctgccagggtgcggaggggccgtttccatcctcacctgcaccagatctgacaggtttaaacctttgcagaagtgactgggtggaaaacatctcatttcgtgggcacttccaagattcgcagtgagtggtaggggtgctcggtcctgtctctgtcccttaaagacgctccttgcctctgttcagtttcaaagttctggccaaggaccaatccctgcagcatgggcccctcaaggctttgtctgtggtgtgcggggccagggcatcttatcttgagccgcagttatatgtgctgttttgttctctaacctaattgaaatttttgaacacaaaccgttgtagtgggattcgcttctcagaaatatcccatctgtctgtcagatctagccccaccttcagagacacctcaggtcctgcacgacgtgcattgctaggctgtgccaactcttggcacctaagggaagggcacctgcaaggtagtcagtgagatcctgaggactgctgtgttagacaaggggcccttccttctccctgtgggttttgaggtggacattattgggaagaggacagcagagacgtgcctgggttggagccttgttttctgtcacattttcttccatttgaatgtggttcctgacagtgtccaagctggtgtctcttcctagagaaccgagagctcaaatttatcagcaaaatttagagaccaaggcagttatttatttatttatttatttatttatttatttatttatttttgagatggagtttcgctcttgttgcccaggctggagtacaatggcacgatctcggctcactgcaacctccacctcctgggttcaagtgatactcctgcctcggcctcccgagtagctgggattacaggcgcctgccaccacgcccggctaatgtttggtatttctgatagagacagggtttcactctgttggccaggctggtctcgaactcctgacctcaggcgatccacccacctcaccctcccaaagtgctgggattacaggcgtgagccaccacacgctgctcagggtgttcacttttttatagtcttcaacaaagtctagatttttttagaatgcacaattaataagtagaagaattaggagataaaaaagaacagttttactggctggcaggtagctggctccaaggccgtgctccagatccaccatttgtggggcggacagcacatgtgatgccaggatctggggctggccaagggagcatatcctccaaggggccccacctgcaagctcggcctgctggatgccctggatctcaaatctcacctgagcccacagccctcactcgggcaagactggcctcggccacccatgaagcagctttcagggtggggctgcttcagctcttaccaggacacttatggcttccagagacaccttcctgagagaagggcttatgctgatgtgttcctcctgccttccactgcgtggatggctctacaaagggccagggcgcaggcagtgtggacaacacactgaccccggtgctgtgggagtgggcactgttgggaggcagcgtgttccaggcaggtgcagaggtgggaggcagcatcttcccagcgagatgtccccaggtgaggggcctcatcgcccacccccagcgctgtccctacaggtgcagcaggagcgggacgagctctatcggaagttcaccgcagccatccaggaggtgcagcagaagacagggttcaagaacctcgtgctagaacgcaagctgcaggctctgagcgccgctgtggagaagaaggaggtgcagttcaacgaggtcctggctgcctctaacctggaccctgcagccctgacgctggtgtcccgcaagctggaggtaggccctagacaggctcctgaccccagtgggcggcctcatccctgtggcaagagtcttcagttctgtgctgctcctcggataggcacagagacccctcggtcggccactgaggaggggcattcatgggtttcctgtggccagtttcgggccagttgggaactgtggaagggctgggcaggggaaccagatcagggcccactctgctattgatggggagcacagggctggagggggctggttggggccagcacagaatggggacgggcagagggttggagagccgccaggaggctgagtccacaggtggggctgggaggggccgaggtgacttggtgtttg

SEQ ID NO: 16844 - DNA, 2300 bp, Homo sapien
ggcggagctgaggacaaggtaggagagaggccctgggagggggagtgccgccctgagacagatggcggggactaaggggccaggcagtgaggctggagggcggagctcaccgctgccgaccctcctctcagcccgggttgggagtgaggttaggggctctctcttctgcttctctcagcccgtttcctcctctgaaaatacagggatgaggagaggagctctttcctccctccctccagcctcaggcccctgtgaccctgatggggtgggagtgagtttctgcctctccctggcagctgtgccagggcgagggcggggggtggtggtgaggtgaggcctgaggtggcatcgaagagctcactgagatcacgggtaaccttgtgccaggcagtacgctggacattatttccactcttttcattctccatacaccccgtgggccagcaccataattcacccttctacacatgggaagactgaggtagcaagcccaggtgcgtgctgggattcccagccaggcctgaggggcagtgtgtccctcagcctccatggggtcttgcccactgccccaggcacaggctctgcgcggcacttccagaggcagatgtcacccacccaggcctcatggcccctgcgtaagaggcaggccccctcccttccagccagaaggacagggctgggcccataggatcagagagagtctgaccctgccgctcctacagtcgtgtggtccttcacaaaagctgagacacgaggggtccaggtcccacctgagcaattaggacagcactgtgtgggctgggcgtcccgtgcagggtcacagagactcattaccctcatgcacacacgctatgtttgttgttgttgttgttgttgagacagagtttcactcttcttgcccaggctagagtacaatggcgtggcatcagctcaccgcaacctccgcctcctgggttcaagcgattctcctgcctcagcctccctagtagctgggattacaggcatgcaccaccacgccagctaattttgtatttgtagtacagacggggtttctctacgttggtcaggctggtctcaaactcccgacctcaggtgatccacccacctcgacctcccaaagtgctgggattacaggcgtgagccaccacacccagcgtgctatgctctttttcttttttgagatggagtctctctgttgcccaggatggagtgcagtggcacgatcttggctcactgcagcctccacctacccagttcaagcaattcttggcctcagcctctcgagtagctgggattacaagcacctgccaccacccccggctaatttttgtatttttagtagagacagggtttcaccatcttggccagactgatcttgaactcctgacctcgtgatccacccaccttggcctcccaaagtgctgggattactggtgtgagccaccttgttcgggcctgctctttctaatcacagcagaagcgcacactttaaagaccagctggcaagaatgatgggaggttttccagaagtgactatgggcaaagccacggttattcagaaccctgataagggaccagggcacacaacacagacgctccgtggagttggacaggcccactctgtgggtgaaggtttggtagttattgacccagaaagccacacactttttttttttttttttttttttttttgagatggagtctcgctctgtcgcccaggctggagtgcagtggcacgatctcggctcactacagcctccgcctcctgggttcatgccattctcccgcctcagcctcccgagttgggactacaggtgcccgtgaccacgcccagctaatttttttgtggtagagatggggtttcaccgtgttaaccaggatggtctcgataccctgacctcatgatccgcctgtctcagcctcccaaagtgctgggattacaggtgtgagccaccacgcccagccagccatacacaatattttaagtgaaaaccacaggttataaaacaatacaaatagtataatccactttataagtttttaaacaaatatacttatgcatagagaaaatctggaaaaatatatgccagctataaagtggttcttgctcatgggataaattgtgggagactttttccctttttgcttctctgtgttgtgatttcctaaagacagggcagtggtgtccctagactgctctggaactgcaggacctaacagcctcactgtgtctgctcacccaagtctgacaggtggcagggcagtgtctgaggcccactgggatgcagacccaggaaagc

SEQ ID NO: 16845 - DNA, 2300 bp, Homo sapien
tcctgctttgtaaggtagggacaacaatacaccaggaggttgttatgaggattgaattagctaatccttgcaattcagtgaaagctagatacgaatttacaagcttcccccctcttacacactgttttgtcctttgtcactagttgtttttccaggagaattctcatcttacacacaaatgggcctcatgctttttaaagggctgcagagtaccctggcgtttatggaattttccccactggggccagtctggttgtctctggcctctggcacccatgggcatttgccataacagttgtgagcctctctttaggattatctcctataaacagaagccacaacaaatgtcgtgtgtgtggatcccaaatagatgtttcctaactagtcccaaggtagttgtagccagaatactcccaacctttgctgagaggggtctcctcccttgcctttgaatggcctaattcttaatctacaaatcacccatgccgaacacccaagaactggaaatgcagcttgacaggaagaaagaagttcccggccaggcgcggtggctcacgcttgtaatcccagcactttgggaggccgaggcgagctgatcacgaggttagtagttcgagaccagcctggccaacacagtgaaaccccatctctactaaaactacaaaaattagctgggcatggtggcaggcgtttgtaatcccagctactcaccgctagaaccaaggaggcggaggttgcagtgagccgagattgtgccactgcactccagcctaggcgacagagtgtgactccgtctcaaaaaaaaaaaaagttcccagatcccagagcaggacagccagtccaccatcatgcgggtgcagcgtttcccagattttaaatagagaatgtccgttatttcattaatacattgtggcaggtgaacgactgccagtggcttgaggataaaagaatttaccaagacagttgtatgtaagagaaggcagatttactagagaaagtaggaaaatacgttgccagagagaagacgggcagccagcagaagagaaactgactgcacagaaacaaagccttgctggagagtgtgcgttaataaccttcaggcgtctggtgagactggggcgcaggaagaatgtgttatttgccgtgtgtctggagggctgtgtgtcctggagcatgaagaaggcagactagtagcttgtctgctttctctgtttgctttcccctgcctccctttccctaatgaggacttcacatatataacatatagtcaaaatgtgttctctgtatattacgtaaggttaatacaacgatggatactcgccggcacacgcagttctatggcttttctcactttctgcagggcacgggcctccaccctgcgctcatccaccgcgcgttgcggggaggaagggcgggggggaggtcagctcagagagcttcacctacggagccatatcaacaatctgaggagtcaccactgctcccattttacagatgagaaaaccgaggcaaggtcacatggcctgtcgggggaaacttaccctgtgaggggcttccatgagaaacctgcgggcctctgagcctcccaggggagagatgggccccgcgccgtccccagtctcgcgcaggtcttcttgggacccacctggcccgcccccatcccctccatccccccatccccccgtcccgccgtccccccgccccctctcacagcggtcccgccccccgctccctctcaccgcggtcccgccccctctcaccgcggtcccgccccctctcaccgcggtcccgccccctctcaccgcggtcccgccccctctcaccgcggccccgccccctcaccgcggccccgccccatctcaccgcggccccgccccccgccccctctcaccgcggtcccgccccttctcaccgcggccccgcccccgtccccgcccccaccaccccccagcaggtcctcgcgactccgcttctgggccccaggtctgtgcgccctgattcgccaccagcgcaccttcctgggcaaagccccgctggggccctcctggtgggcacgaggtggtccggggcggggtgaccggccccgcccttccctttgcccgcgggcgtcgcagtccggcagggcaggatgagcccccgggccgtcccgcggctgctgaggctccagcgacacctaggcccccaggaggttagggggccaggcctggacctgcagggctcctgtcccctcagctgcttgcgtggggctgagcgtcgagggcccaggaaccggggcgcggaggagagcccagttccgggag

SEQ ID NO: 16846 - DNA, 2300 bp, Homo sapien
tctcagagtacaaaatgttaaagagtcaaaataaatatactccatctgcaactgcttatctcgagaggtggtcactgggatgactgttttgtgtatcctattgtgaaatattccaatatatggcctccctgtgcctcagtttcctgctttgtaaggtagggacaacaatacaccaggaggttgttatgaggattgaattagctaatccttgcaattcagtgaaagctagatacgaatttacaagcttcccccctcttacacactgttttgtcctttgtcactagttgtttttccaggagaattctcatcttacacacaaatgggcctcatgctttttaaagggctgcagagtaccctggcgtttatggaattttccccactggggccagtctggttgtctctggcctctggcacccatgggcatttgccataacagttgtgagcctctctttaggattatctcctataaacagaagccacaacaaatgtcgtgtgtgtggatcccaaatagatgtttcctaactagtcccaaggtagttgtagccagaatactcccaacctttgctgagaggggtctcctcccttgcctttgaatggcctaattcttaatctacaaatcacccatgccgaacacccaagaactggaaatgcagcttgacaggaagaaagaagttcccggccaggcgcggtggctcacgcttgtaatcccagcactttgggaggccgaggcgagctgatcacgaggttagtagttcgagaccagcctggccaacacagtgaaaccccatctctactaaaactacaaaaattagctgggcatggtggcaggcgtttgtaatcccagctactcaccgctagaaccaaggaggcggaggttgcagtgagccgagattgtgccactgcactccagcctaggcgacagagtgtgactccgtctcaaaaaaaaaaaaagttcccagatcccagagcaggacagccagtccaccatcatgcgggtgcagcgtttcccagattttaaatagagaatgtccgttatttcattaatacattgtggcaggtgaacgactgccagtggcttgaggataaaagaatttaccaagacagttgtatgtaagagaaggcagatttactagagaaagtaggaaaatacgttgccagagagaagacgggcagccagcagaagagaaactgactgcacagaaacaaagccttgctggagagtgtgcgttaataaccttcaggcgtctggtgagactggggcgcaggaagaatgtgttatttgccgtgtgtctggagggctgtgtgtcctggagcatgaagaaggcagactagtagcttgtctgctttctctgtttgctttcccctgcctccctttccctaatgaggacttcacatatataacatatagtcaaaatgtgttctctgtatattacgtaaggttaatacaacgatggatactcgccggcacacgcagttctatggcttttctcactttctgcagggcacgggcctccaccctgcgctcatccaccgcgcgttgcggggaggaagggcgggggggaggtcagctcagagagcttcacctacggagccatatcaacaatctgaggagtcaccactgctcccattttacagatgagaaaaccgaggcaaggtcacatggcctgtcgggggaaacttaccctgtgaggggcttccatgagaaacctgcgggcctctgagcctcccaggggagagatgggccccgcgccgtccccagtctcgcgcaggtcttcttgggacccacctggcccgcccccatcccctccatccccccatccccccgtcccgccgtccccccgccccctctcacagcggtcccgccccccgctccctctcaccgcggtcccgccccctctcaccgcggtcccgccccctctcaccgcggtcccgccccctctcaccgcggtcccgccccctctcaccgcggccccgccccctcaccgcggccccgccccatctcaccgcggccccgccccccgccccctctcaccgcggtcccgccccttctcaccgcggccccgcccccgtccccgcccccaccaccccccagcaggtcctcgcgactccgcttctgggccccaggtctgtgcgccctgattcgccaccagcgcaccttcctgggcaaagccccgctggggccctcctggtgggcacgaggtggtccggggcggggtgaccggccccgcccttccctttgcccgcgggcgtcgcagtccggcagggcaggatgagcccccgggccgtcccgcggctgctga

SEQ ID NO: 16847 - DNA, 2300 bp, Homo sapien
aaacaaaacaaaacaaaacaaaaccatgtatgccaacttctggatcgggaaactaaagagaaattagctaacaatacacccttattcaagcagacaagtagaattggtacaggaactaactaatctaattcaaaagccaaatattctttccaggatatggcaacatgcaactttgacttcactttcttagttgtctagatatatttttgccaatcatctctttgttctgttccgaaccttactgccctattacctcattttccagatgtgctttgtccctctgtgcttttctacatttccccttccatcaaaagtctactagtttatggaagattccctccttctctctgtaagccctcatccccttctttcacagatcttgctgattctccagctagtcttcccaagtattcttcctccttccctttaacttacacagaacgttttgagaggaagttgaaggaaagagccttaagacatgggttagagtcccagattcactacccacttagaccttgtcttttccctctagtatttagacactctaggtatttccaaggtttgaacattaactacagtcatatgaaaacatgttgcaagccgtaaagaactaaataaatgcacgttgtcttttaatatgtgattctcacattaaagggaatgcccaaggcgtcattcaataatgaatctagtttgagagaattgtcaggaacgccaaatttactgaatacaagtgactcagagcaggctcagaaaccagtgtcccctcctggagaagcaagtacctctggacagcactctagactaaaactgggtaagaaaaaatttgaggggaatttagtccctctatgtcctctagaaaggttggtgagtatggtctacctatgtggggtggactttggataggcctgggcttaagctggactcaactgtgagaccagaagttagatgcagtattttgttaaaattatttatttatttgttcactgagacagagtcttactctgtcacccaggctggagtgcaatggtgagatctcggttcactgcaacctctgcctccacgaaaatagcgattttcatgcctcagtcacccgagtagctgggattataggtgtgcaccaccgtgcccggctgatttttagtagagacagagtttcaccatgttgaccaggccggtctcaaactcctggcctcaagtaatctgctcagctcagcctcccaaaatgctgggattacaggcttgagccaccatgcctagccttggatacagtattgaatagcatgtaagatcattaactttgaagtcactcacttgggttataatccacacagaagcattggggccttgggcaaatcttataaattccatgggctcctgaatggtaatctgtaaaatgagaccaagtatatagagctcatgtattgtttgaaatcattaaattaaatataaatgaattcatacatgtgaggtgtccaataagtacctctctgataatatatattcttttgtgcgtttctacatttccttttccatcacatgtcaactagtacatagaagatcccctatagagactatactttcttagtgttgtatgtccaggcctttgttcaatgcctaagatgtaatgaactctcaaaaaatattttctgaataaataaatgcatgaatgaaccattttgtaagcagaaaggctgggaggttaatgggataatgagaacagctagaaactaaaattgaataggcatctacagtcagtgtgggtgtggggtctaagtctctctgaagcagtaaacagagggagactagagtatgtagaaaggtagatgctaatttgatggtaggagatttcacattttcttatgaaacaaggacaaacaccccagactcccaattttacccatctactcttctccaacctagaactcaggaggaaggagactgaaggaaagatgtatagcctgcgagaaagaaagggtcatgcatacaaagagatcagcgagccacaggatgatgactacctctgtgagtgaccctttcagccactcacacagcttgctgttatgtcctggtacaataatttcatcatttggcccacaaatcattcccttactcgaatgaattaaagtacaggattggggctaaataatgtgagtgccacgctctttctgaagctcttatatcaaggaacatgcattacaactttcctaatccctgcttccctcacttccagattgtgagatgtgtcagaacttcttcattgacagctgtgctgctcatgggccccctacatttgtaaa

SEQ ID NO: 16848 - DNA, 2300 bp, Homo sapien
ccctagggtataatattagggtgagagactcagcccaaagttagagacctgggggtgtcatactcagattagaggccaagcccacagggttagaggccctggggaatattgagaagaatggatttggctaaacaagatgtttgccactttctctttttggactgtccaccttgtgctctgtgtccctcacctgagtgctctgcatattgttgcctttctgctcaccgcctccgttttgcagtagcctggaggctgccccaggaaagaggccctaaacagtttagcttttactttcctcagcaatcctctgacttttaggcttgatgtcttagagctattgctgctaccacttttctagttggcaaagctaataaactaacattagaacagcacctacaggtttttgaccccacaccaagggaaggtggtcctagaagctaaagggcaccagtggataataggagaatatttatgaaagtgtgaggccttattgctagaccgaccctccagacataacccttaaagcctggcaaaccataaacccactacttacctgtcagagtccacaggtgctcccagcctttctggcatacaggttgtattagtctgttctcacgctgctaataaagacatatctgaggctgggtaatttataaaaaaagaggtttaattgactcacagttgcacatggtcggagaggcctcacactcatggcagaaggcaggtgaggaacaaagtcacatctcttacatggcagcaggcaaaagagcttgtgtagggaaactcccctttataaaaccatcagctgtaatcccagcactttgggagtccaaggcagtggatgacctgaggtgaggagatcgaggccagcctggccaacatggtgaaactctgtctatactaaaagtacaaaaattagacaggcatggtggtgggcgcctgtaatcccagctactcgggaggctgagacaggagaatcgcttgaacccgggaatcagaggttgcagtgagtcaagatcatgataatgcactccagcctgagcaacagagcaagactctgtctcaaaaataaataaataaataaataaaccatcagatctcatgaggcttattcactgtcatgagaacagcatgggaaagacccatcccctgattcgattacctcccactgggcccctcccacgatatataggaattatgggagctataattcaagataagacttgactggggacacagccaaagcatgtcacaggttatgaaacaaatttattctagcaggccagacgtaggagagatgagccccttgaccatcccaaggaagagtggttaacagatgcaagttgttttatgcatcaggaaaacagggctagatatgctattagtagtcagcacaagagaatcaaggcacaagccttgctggcctcgacctcagctcaaaaagctgagttaattgaacttactaggcccctgcagttggaaaggatttaaaagttaacatttacactgattccaagtatgattttttagtgcttcatgcttatgctgcaatttggaatgggtggggactcctgaccccaaagggcttttccatacaacatcattcagattttgagcttgttagaatgctgctttgctgccaaaaagtgactataattaattgcagaggacatcaaaagagagactgaccatgtaaaaggaaatgcccttgtagatgccacagccaaggcccctgcactgaaagggccaatgaagcttgtgggcgttctggtcagcatacatagaactgggccggaacactctgaagaagaacagaaatgggccagggattgcatttcagtccagggcccctcgggctgaatgatggtaataaattactaatgccaagtaccagtcacaggagtataactcagcactttcatgattcttttcactctagaagggattctttgtttctgttaatgtctcatttgttcataggggtaaatcttttcaagacactaaaacaggtgactcagccctgtgagctctgtgcctgacatgacccaaacggccagcaattttctccttctccagttaaacctgtccaaaatggaggaacctatctacatgagaactggcaactctaatttaccccgaagcctttctgcaggagattcaaatatttgctaatgcttactgataccttcactggttagatcgaggcattccccaccccatctgaaaaatgtttaccagaagaaataactcctcagtttgggtaatccaaaagcctgtaaagtgacaatggcccagctttc

SEQ ID NO: 16849 - DNA, 2300 bp, Homo sapien
tataaaagttattctaagttatgtcagtctttgagggtaaatgtagagtatttaaaatagcttatatttggaaaactgaacagtgtttgttgtcatgattttactttgttcttgaccacattggtcccagagaaagtcaaggtcttcagccacggattcaagattcttgtggcagctgctgatttcttttccaacaatgcttgggcctcatcagcgtcatgtttgtgcactacctcagccccaaccacagacatgggcaggaggaacagagctctaccgtgtagcgtcactgccagtaagagtctggctctcccatgaagcattactcttcctctgcatgtatcttagaatttcaaaagccatttggcctccatttctttagattgtggataagatccataaacttgtactggggtcactgttcctccagcctctttagcacgtatctgcagtctcatttccaggctgtttcctctatgggccactgcctgcagaattcccagatgaatccactgcccattccctgtagccacatctccaaatccacagccgttctcagcagctgcctgcacactcacatcccagaggtcaagttgccacagctggtgtgtgtttccagccactaggcaaccccaggtcttcatctgagcacccagggccagaagtctcaccctgtcccccgtaccatcccttcccagccagccacagtttccttccttctgttgcccacacagtgctctcagccccagatgcccttcctgacacttcctcccaaggaaacccaagtcctccgtcagggtccacccaaatgtccacaccctctggtagcctgcccagccccagaggctcccctgagctcccttcccccattagagcctacagaggcagtgctgcccagcagacatctcggctgggagtcaaacagagcaaggctattttggtccctctctccactctatgtgaccctgaaatgtgccctggccttaggaaacattcagctacatcagagaacgtgagtatgcatgtggtttgtataacacaggcaagacatggtttttagatacgttcagaatagatagttacagagaacaggtatgttacatgtgggaaggaagagacacaagggccaagagatacttaatatgcatgaggctcctgggcactaaatgttcaattcacaatgtgcctttatacaagagacacctaaacatgcagaaccatggggcctttgttcaccaccattcctggtgcccattctggtcccatgcgtcctctgcccaagaaacacgtagaacccatggcagtgcgacagctgcttcttggcaacgccaccatgatcaggcacacttgtcccatgtctgtcccgttgagccggtgtgtgtcataagcccttaagctgtgagcactcttgcccagacctcggctctggtcctcgtggtcacacctgagtgggtgaggttgactagcagagaaagaagagaaccgatgaatgttgacagcacaggaatcaggtcatacggccctcccatctccttccctcagcttcttgctgtgttttacgaatggattttataaacctgtgatttgagcatcctcagttgcttctcgagcctttccgctccatgaactctgggacagcttgcctggtactgcaactggaggacatcattgcatccagagagcttcccacatgacagtctgtgagcaagggacttcgcctccctggatggtggttttcttttatgtaaaagatgtgatcgtagtctctatttctcaagggtgctgtgagaaacacacagaataagtccacgtgaaagtgtgtggcaggtagcggatgctcagtaacgtgaagcctgcccttcccatagcctttctcttcctccactgggtctagacttcacattgtcccatggttccagatccttggttcatcccgagtcttatcatcatcccagaagcttggagggagctcctggggaaatccagcttcacggtcccacactgatcacttcccctgggcatggcctggtaaatgcagctcagatccgctccccaggcaagtcaaggaagttgctgcccagaaaccaagtgaggacatttacaagaactggcggcggcagcagcagcagcagcagcagcagcagcagcagcagcagcagcagcaactggatttgctttttcaccagaggatccagatttccctgtggcctcgcaaacaaaaaagaaggaagacggagcagcacagtcattcctttgtgaaaaaggcattcaggtaactgagtgactcagcaagcctgggt

SEQ ID NO: 16850 - DNA, 2300 bp, Homo sapien
cagctacttgggaggctgaggtgggaggatcacttgagcccagggaggctgagactgcagtgagtcatgatcaggcctctgcactccagcctgggtgacagagtgagaccctgtctcaaaacaacaaaaaagtagcagctaacatcaactgaccttttaccaggtgcctattgataccatagtttaatttcttataactgtttcttatttcacttaccaactctgtcttcagttactcccagatttttactgtgtgtgtacagatgaccttttgcttagattgaattgtctccccagaagtaagattactgtgagtcatggtgaatggacattctccttacccttgatgtaaattgacagggttttgggtgcctcccagctataatcttagcactttgggaggctaagagaggaggattgcttgaggccaagagttggaggaggcagtatggcagtatggtgagaccctgtctccattattttaaaaaattgacaggctttacccgggaaggcttatacacaatttaaccacccctcatagtataagaaagtgcccatttcactgcacctttgccagcacagggtattataatttcgtaagccattttttgtttgattattttaaatagacaaaagacctcatattactttacttgtcacatttcaacatctttcctcagcttattagctctatttcttttctgtctgtaaatggttgttgtggttttgttctttgagacagggtcttgctctgtcatccggctggactgtagtggcataatcatgcctcactgcagccttgacctcccaggctcaaacttccgcattccgagtagctgggactacaagtgtgcaccaccacccccagctaacttttttcttcttttggatagagacagggtctcactgtgtcatccagagcggtctctagctcctggccttaagcaatcctcctgcattagcttctgtaatggctggaatttcaggcatgagccaccatgcctggcctgggctagtcccatattctctagagttctctttactctgtgctagccaatctctcattatgctgttcacctgttataatgaataattctctgtattaaattttaccactttaaacttttgagtggtttatgcttcctgattggactctgactaatatgttaggaagggtcccaggaggtagacccacacagatgggatttgggcataggtttggtttcccagggggcagtgctgagctctttgccagtgggaaatgggatgctggtgatttccagtaggtgacctcacagtgactcaagctaccacttactgttgattgtgacgaaatgccagctgaggcacatgccttgggagctaagtggttgctgccctggaccactgtgaagactggtgtgggaagggtcgctttggatgcacttgagcaggggtccccaacccctgagccatggagccgcaaggagccacacagcaggaggtgagcggtgtcgagtgagggagtgagggaagcttcgtctgtatttacagccactcccctttgctcacattcccgcctgagctccaccttctcagatgagcagcagcattagatgctcataggagaacgcaccctgttgtgaaccgtgcatgtgagggatcgaggttgcgctgtccttatgagaatctaatacctattgatctgtcactttctcccatcacgctcaggtgggaccatccagttgcaggaaaacaagcttaacacgcccactaattctacattatggtgagttctataattattttattatatattacagtgtaataatggaaataaagtgcctaataaatgcaaatgtgcttacatcttttggcccagctcctacctcccggcagcctctccaggcccagaactttctccagtcagcctctacagaccaagctcatgactcacaatggcctatttaggcccataccctacgtcacggcagcctccgcagatgaggctactgcctcacaacagcctccacaggcacagctccatcgttacaatggcctctttagacccagctcctgcctcccagccttctctccaggccctgaactttctcaagtcgacctcaccaggcccagctcatgcatcttggtggcccctccaggcccagcctctgcctcccgtcagcctctacagtcccaacgtctgcctcacagcagattcttcacgcccagcatctacctcactgtggaccccccaagccaagctcccaacctttcagcagcttctacacacccagctcctgccacccagtggcctcttt

SEQ ID NO: 16851 - DNA, 2300 bp, Homo sapien
ccaggcccaacttttgtctcatggcaaccttccctggccagattcctgcctgtctcccagcagcctagacaggcccaggtcttgcctcacactggcctctctacatccagcttatgcctcacggtggcctctccacgcccaactcctgtcccaggacgtcatctccgggcccaaaacttactcaagtcagactctctagtcccaactgctgcctcctggtggcctatgaaggcccaaaatctcaagttgacctgtccaggcccagctcctgcctcctgtcagcgtctacaggcccaacctctgcctcatgggggcttttccaggcccacctcttcctcttggctgggtctacaggcacaactgctgcctcacaacagccttttttggcccagttcctgtccagctcatggcggccaatgtaggcccaaaacttcctcaagtcaaactctccaggcccaccttctgcttcccggtggcatcaacaggcccagctttgacttgagaacagcctctgcaggccctgctcttgcctcccaggggctttttccaggcccagctcttgcctcgtggcagctgcccaggccaaatttctgcctgcctgccagcagcctcaacaggcacagctcctccctcacagtggcccatttaggcccaactcatgactgtgaggccatttccaggcctagtgcctgcctcgtggctgactcttgaagcccaaaacttcctcaaatcagccttttgcccaacttctgtctactgttggactctacaggccagcctctgcctcacagtggaccctccagactcagatggtgtctcactgtggcatcctcaggcgaagctcctgcctttcggcagcctctccaggcccagctcctcctgcctcccagtggcctctttcggcccagcccagctcatgcctcccggcggccttcccaagccccgcttttgactttcggtggcctctgcaggcctcgacaaggcccagcctcctgcctcccgaaggcctgcacaggcccagcctctgcctcacagcggactctccacgcccagctagctgttgcctcactgcggcctcccgagtccaaagctcctgcctctcggccgcttcggcaggcccagctcccgcctgccagtggcctcttcaggcccatggggctcattcctgacaacggcctttccaggcccagtttttcccttccggcggcctctccgggcccagaacctcctcaagtcggcctctccagacccacttgcaccctccgggcatcctctccgggcccagctcttcttcctggttgcgtctccaggcccgattcctgcttctcaacaacctctttggactcagtgcctacccatctcctggcggccttggtcggcccacagcttcctcaagccaagctccccaggcccaggtcaggcctcacggtggcctctccaggatgagctcctgccctccgatggcatctccaggccccaaatggtctccggtcggtgggctcctccacgccaaggttgggcctcccggcgaccgccgcaggcccaagttgtcctgaagtcgggctctcccggccctgcctcccagcaagtaagcaagctcttttggctcaactcctgcccagctcccaaccgcctttgtaggccccgaactttctccagccaagctctgagggcccacctcctgcctcctggtggcctgtacagttctagcactggttagagaacagcctctgcaggccccgcccttgcctcccaggggcctctccaggcccagctcttgcccccacggcggcctcccggggccaagtccctgcctgcctcccagcagcccgcgtacggcccagctcctccctcacgatggcctgttgatgcccaactcatgcctctggcaccctgcccagaggcgtgagcccctgtctcacactggctcctcccacgctgagagaggtcagtgtgagcccttgcctcacaccggcccctcccacgcggacagaggtcagcgtgagccccttgcctcacaccggcccctcccacgctgagagaggtcagtgtgagcccttgcctcaccccggcccctcccacgtggacagaggtcagcgtgagccccttgcctcacaccggcccctcccacgctgagagaggtcagtgtgagcccttgcctcacaccggcccctcccacacggacagaggtcagcgtgagccccttgcctcacaccggcccctcccacgctgagagaggtcagtgtgagcccttgcctcaccccagcccctcccacgtggacagaggtcagcgtgagccc

SEQ ID NO: 16852 - DNA, 2300 bp, Homo sapien
cctcaacaggcacagctcctccctcacagtggcccatttaggcccaactcatgactgtgaggccatttccaggcctagtgcctgcctcgtggctgactcttgaagcccaaaacttcctcaaatcagccttttgcccaacttctgtctactgttggactctacaggccagcctctgcctcacagtggaccctccagactcagatggtgtctcactgtggcatcctcaggcgaagctcctgcctttcggcagcctctccaggcccagctcctcctgcctcccagtggcctctttcggcccagcccagctcatgcctcccggcggccttcccaagccccgcttttgactttcggtggcctctgcaggcctcgacaaggcccagcctcctgcctcccgaaggcctgcacaggcccagcctctgcctcacagcggactctccacgcccagctagctgttgcctcactgcggcctcccgagtccaaagctcctgcctctcggccgcttcggcaggcccagctcccgcctgccagtggcctcttcaggcccatggggctcattcctgacaacggcctttccaggcccagtttttcccttccggcggcctctccgggcccagaacctcctcaagtcggcctctccagacccacttgcaccctccgggcatcctctccgggcccagctcttcttcctggttgcgtctccaggcccgattcctgcttctcaacaacctctttggactcagtgcctacccatctcctggcggccttggtcggcccacagcttcctcaagccaagctccccaggcccaggtcaggcctcacggtggcctctccaggatgagctcctgccctccgatggcatctccaggccccaaatggtctccggtcggtgggctcctccacgccaaggttgggcctcccggcgaccgccgcaggcccaagttgtcctgaagtcgggctctcccggccctgcctcccagcaagtaagcaagctcttttggctcaactcctgcccagctcccaaccgcctttgtaggccccgaactttctccagccaagctctgagggcccacctcctgcctcctggtggcctgtacagttctagcactggttagagaacagcctctgcaggccccgcccttgcctcccaggggcctctccaggcccagctcttgcccccacggcggcctcccggggccaagtccctgcctgcctcccagcagcccgcgtacggcccagctcctccctcacgatggcctgttgatgcccaactcatgcctctggcaccctgcccagaggcgtgagcccctgtctcacactggctcctcccacgctgagagaggtcagtgtgagcccttgcctcacaccggcccctcccacgcggacagaggtcagcgtgagccccttgcctcacaccggcccctcccacgctgagagaggtcagtgtgagcccttgcctcaccccggcccctcccacgtggacagaggtcagcgtgagccccttgcctcacaccggcccctcccacgctgagagaggtcagtgtgagcccttgcctcacaccggcccctcccacacggacagaggtcagcgtgagccccttgcctcacaccggcccctcccacgctgagagaggtcagtgtgagcccttgcctcaccccagcccctcccacgtggacagaggtcagcgtgagccccttgcctcacaccggcccctcccacgctgcgagaggtcagcctgagcccttgcctcacaccggcccctcccacgctgagagaggtcagcctgagcccttgcctcacaccggcccctcccacgctgagagaggtcagcctgagcccttgtctcacaccggcccctcccacgctgagagaggtcagcccgagcccctcgcctcacaccggcccctcccacgctgagagaggtcagcctgagcccttgcctcacaccggcccctcccacgctgagagaggtcagcccgagcccctcgcctcacactggcccctcccacgctgagagaggtcagcctgagcccttgtctcacaccggcccctcccacgctgagagaggtcagcccgagccccttgcctcacaccggcccctcccacgctgagagaggtcagcctgagcccttgcctcacaccggcccctcccacgctgagagaggtcagtgtgagccccttgcctcaccccggcccctcccacgctgagagaggtcagtgtgagccccttgtctcacaccggcccctcccacgctgagagaggtcagcctgagcccttgcctcacaccggcccctcccacgc

SEQ ID NO: 16853 - DNA, 2300 bp, Homo sapien
tatataatgcccagtataagcaatgtgcacaaataaaattagctaacagagatagtatagagtgagaggagaggcagattaatctttgaggaaaagcacaattttatagctgaatggagaaagctgaggtggtttctaagatggagaataagatgaaaaatgtaagtatgttgtttgactgaattcaagaaagaagggtaaaagagaagaaagtagtggtcttatcattaaatgccacagagaggtaaagataaagacaacatattgttttgggttgagtaatttaagggttaccaaattccgttttggaggaggaacagattccatgtccactagaatggaatgaacaagaaatggaggaggaaaataggtagtttttcaaaagttttcaaaaatatgaaaagaagaaatgaagtggtacttggaagagattgttgaaatgggagagactatggtggcttgtttagaagcagttgagatagatccaattgagatagagatattgactatataaacaaaagaatgacaaattaatagtgtaatggataacttgactttggcaaatattgtgaatttttgtgaaagtacaactaaaaggcaatgtcactccaataatcaccagagtaatcaatttgcttattgctgtccctttaaatatagttctctggtatcaactaacatgtttttaactaatgatgcttcttaaagaaaagggaaaagacctttttctttctttcagtcttcaatgattcactgcttcatctcgctccaccaaagataaatgaaatctacatctcttatacattaacaatgcatgacaatttacaaatagctaaatttttggagctaactttaagtacctgaatggaatttaatcaacccactaatctccttctcacttctcagttatttatcaagtttatgtcaagggacaaggaaaaattatccaaacattgtttaaaacaatcaatattaattagtaacacttatccaggggggtttttaacctttcccccactcaaggattattctaatgtcagagtagaataaaaaataagtgcagcgatgctgactcttccaagcttaacatttctcacaagtcaattagctttgtactgggaggagggcgtgaagggctgcttgcggtagttgtgtagcagcagcacaatggccgcagacaaggaaaacagtttctaggaattcctcgtatataattttatatttttgacaagattaatgacccatgctcccttcctctccatttctttttttggaattctgttggtatgtagttactatattttattaaaggaaattagccttatctcttattatattttattaaagaaaattattatattattcctttatatttttattaaaggattttattattattaaaggaaattagccttatctcttattatattttttatgaccttcaaagtagtgtctctgcttaaaagtgtaccctggccgggcgtggtggctcacacctgtaattccagcactttgggaggccgaggcgggtggatcacgaggtcaggagatcgagaccatcctggctaacacggtgaaaccccgtctgtactaaaaatacaaaaaattagcagggcatagtggcgggcgcctgtagtcccagctactcaggaggctcaggcaggagaatggcgtgaacccgggagacggagcttgcggtgagctgagatcgcaccgctgcactccagcctgggcgacagagcaagactccgtctcaaaaaaaaaaaaagtataccctgaggcacacatcaagcgacatgtagagttcataaattctggccaaatggtcatacctcaaacctcatcagcagtaaggctctttacttgcactgacaaatatgaacgctggggaatttggaaatgatatataatatataatattatatatataataaatatataatatatataatacatatataatattatatatgtaatagatatacaatatataatatataatagatatataatattatatataatagatatataatattatatataatagatatataatatataactttccttgtgattttcctcttaatttttttctagctgatccatatgaattcctcttattaagaaaaataaagcatccaggattcaatgaagaactgactatcaccttgttaatcattcagaaacatgttgcaggcttaagccatttttgatatagatactgaaacaattacttgctaagagcaaacttgaaggtatggataaggccctgagtcatcttcctgagctgaatgata

SEQ ID NO: 16854 - DNA, 2300 bp, Homo sapien
tgcttattctaaaacaagtaaatgtttgcctatggtctgagattctaatccacggagttcattctaatccacattcaacactatcatgtaccagtgggcctcataacccacctagccctgtgatttttcaggttcacttttctaaacttgtgaattaaatatttattttcttagttcagaagaggaaaaaaactcttgtaattcttgcccatttcaggagaaatcttgcatatgaaaacaagagataaatatacacaactgagggctgtggtttaaacaaaatcttgagaatgttttttgaccttatacatttgtgctttagtataacaaaatgatatagacaaaggtaacttttaatagaaccagtcactaaattaaaaaaatgacaaattcttctgcttagctaagcaacagagaaggtaaaatactaattcaattcatcaatttaagcaatactcattaagagccaagtatgtgcttactgaataagctgctaaggtttggtggttacagagtgtgcggtgaaatgatgtctacatcacagtccaacattcacagagtttaaaagcctaccaagaatcaagacagacacaaatacctaacatagacgtttgtatatgataagagagccagagtacaatttaggagaagaaatattatggaaggaaggttcatttccattagaccagaaaagacagcacatttgaaggcctgaataagaaatattctggataagatattgtggctgctaccagaatggctcttgatgatctctacctcttggtatttatacccttatataatctctttcctatagtgtaagctggtcccaggtacttgtttctattgaatagaatagaacaaaagaaatgagatgccacttctgagattagattataagatactgtgaatttcttcttgtgccctctccctctctctctctctcttgccctctcatttgaatgaagccaactggcatgctgtcagtggcccagtgtaagtcctgttacaagaaattgatgattacctgtagccaaccctaagtgaagaactgaggtcctcagtcctacaaatggagagaaactgaatctagctaagaaccatgtgagtgagctgggaagaagatccaccctcagttgaaatttaagatgacatattgagcagacatactgagacacactgaaagtaagagagcaggaggaaacaaaaccagggtcatacaaagaacacaactgattttgagattctcacataagtattacaccttcagtgagcacgtgtactagaaatttaaaaaataaataaaataaaccttcaaagtgagctagcaaataaatttccctatggtctcagctctgagtggagagagaaaatgttccctgtggagtttatagccagaatccagctctcaaacaggtttcagcctgaactcacacaatctgtgtggcttccaaatttgcaagctgagaatttaattcaaagtggtctcaggttgatagcagtccaaaatgctaggtaggaaaaaaaatcctctctggacaaataaatcatcaaagcaagctcataagagcaggtttcaaaggtcatgagcttctaacacacacacaaaaatcacacacacaaaatgggggtagcagcaacatgggtagcgtattcaaacttgaaaagactttaaatatttgtattattagatgtagattatgaaacacatattttaatgtggttaatttttttaaggaatcaaaactatgagtaaagaccaagaaaattgtgctggatggccacttccaccatggctcccctcctatttaagtctgggtactgtgtcacccgaagtcttcaggcacattgttccaggtctgggtttgcctatgaaagaaactcatgagagctggaaatgaggagtgaagaggaggtcttcaaataaagcaggcttaaggattagacatagcaggtttgacagatgtgatggcttgcagaatcctttatgagctcccactgtccatctggataagatttacagacctttcagaaattcctataagcttgggttctgtgcccacactctagactgtcaggctaagatctctgatataaaatagacctcttctgattttgtctagctgcttttctaatatctattcaccaagctcttccaataatagcataaggccctaattaatattaaacttttatcattataatacataggatgtcttctgttttcctgatcaaattctgactactattaaaatataaagaattgtccagaaatatataaaaaaagaatcacacattga

SEQ ID NO: 16855 - DNA, 2300 bp, Homo sapien
taaggaaggaactcttccagtcctctttctctccttccagtagttccttggcttgtgacagcacagtgtcaattctcatatggcatcctccccgtgtgcctctctctatgtccaaatctcccttttatttaaggacagagtcacagtggattagaacatccccataacatgaagattgcatgaaattatatacataaataactcaacaacatagcttccaaatagaaaacactcagcctttgtcatctcatcattatttgtttacacctttgtattattggtatagctctagtcttttgaaaggtgcagttactcatctttgtgttttccactcctttatagctaagtgtaaggtgcttttgcaaaatccagtactgcatatttgagaaatgctttttattcctacacatactgcatatactgttacacaattcgattttgtaggtctaatgaagttggtctttctatgagttcctatggctaaaaatagtcacaattgtgtactccagtaaattgttagaatgaaggaaaatagtttgagtgaaattatcaatctggtttttctgacttcagctgtgtgtcatgtttggttagtcagagaaacatctaatgtgaggcccctggaggacagctgataagtaagcataccaagtagaatggctactggaaaaagtgtgccagctagagagagagagaaaagagagagttaatttaccatttgctcaagtaaggaatgatccacaaattcaacaaaatctaagtagtcttaaaggacatgtcattgacagatttatcttctagtctcccactttgtctaatactgcttcaaaacaaagcaatttactgaacccagtggtctcattattctggaggtttataagtttaaaaatacctggagttttgggagcagcaatagcactgaagtgggatattagtagtgatgcgtgtgtttacagcacctgtgaacacacagagactgaagcttgaaggctgatgaccctgagttaggggaaaagataaaactttttattagatttttttaatgtcgagaagaaaattatttatctccatatttcctgaatattatcctcttacaattatgtcaatgattctcaccccagttatatattaaaattacctggagatatataaaaactatcaatgttctactcttctacagattaaatcatcatcactgagggtggccctccagcaaccaggtttgagaaccactttagaccagaatttttctctgtgccattcagtaatggcaatgataactgtaggatatgcaaattgcagaaagacaagggcaaatgatttaacttatccccaaacagctgaactatcttaagcctcatggctactttagagtgaccaaatccatgtagatgccagaagttgtgtcatacacctatttcaagggacacatagaatttacctatatatacctacctcaagggtcatgtcagtttactattcccctaaacaacagcttaatagtataaactgctgaactgctgtctgcctaatatttattgtggctatacttcttcttttctgtattaaaggccactgctttcccagcttgctctttgttctccatcatctgttgtgggtcacttgtgctttctgtttttaacacccatgttgctgaagtcatttctccaattcatgatccatgaaactacttcagcagtgaaaatggcacccctcaggttcaagtcaacacttttatatttccctctaggtcaagatccaagctatggaagaaatcaggatatgtcaattttctagagcagccaagttttctaaaagtctacctagccatgtagttatgtagcctcactctcacttaaacaaagaaaattaaaaagcacaccagaaaatacttttcttgttaaaaacacatgtttattgtagaaaatatagtaaggaaaaagaagaaaatataaggcaactagaatttctctagttagagataactattatttatttgagtgtgtgtatatatctatatatatattgacattcagctcttatgtactagatacacacatctactgtttcataagcttttttcacagaatagattataatcagttatgtttgttatcaccacaacattttcttcttgaagaccttctggaatgaggcatttgcttttctatctagagaccctatcctttcaaaaggtcctttatctgtggaaagagctattctggccacagttactgccaagaaacaaggtgttagaaaaggcctaaagttaagtgcagaactgttgtgttttgatgaat

SEQ ID NO: 16856 - DNA, 2300 bp, Homo sapien
ccccttttatattttcaacctagccttggaagtcatagtgtgacactcctgatgcattctacttgtgaggattcagtcactaaggccagccaatattcaagaggaggggaattagacttactattttcaataggaggaatgttaaaaattttgcaaacatgttttaaaaccaccacgtaggccaggcgcggtggctcacgcctgtaatcccagcactttggggggctgagttgggtggatcacctgaggtcaggagttcaagaccagcctggctaacatggtgaaaccccatctctactaaaaatataaaaactaatcgggtgtggtggtaggcgcctgtaatcccagctactcgggaggctgaggcaggagaattgcttgaacccgggagacggaggtttcagtgagccgacacggagccactgcactccagcctcagcaacagagtgagactccatctcaaaaacaaacaaacaaacaaaaacccgccatatagactcaggaaccaagagtgccaaggacacaactccaaggagcataactattttggttttttttttgagacagggtctttctctgttgcccaggctggagtacgctggtgcgatcatagctccctgcagcctcaaactcctaggctcaagtgatcctcccacctcagcctccaaagtagctgggaatataggtgtgtgccaccacatctggctaatttaaaacaatattttggctgggcgcagtggctcactcttgtaatctcacactttgggaggccaaggcaggtggatcatgaggtcaagacatcaggaccatcctggacaacatggtgaaaccccgtctctactaaaaatacaaaaattagctgggcgtcgtgggggggcctataatcccagctatttgggaggctgaggcaggagaatcacttgaacccaggaggcagaggttgcagtgagctgagatcgcaccactgtactccagcctggggacagagggagactccatctcaaaaaaaaaggccaggtgaggtggctcacgcctgtaatcccagcattttgggaggccaaggcagggggatcatgaggtcaggagttcgagaccagcctggccaacatggtgaaacccggtctctactaaaaatacaaaaattagctgggcgtggtggctcacacctgtaatcccagctactcaggagactgaggcaggagaattgcttaaacccgggaggcagaggttgcagtgagccgagatcatgccactgcactccagcctgggcaagcaagactccatctcaggaaaaaaaaaaatatgtatatattgtagagatagggtcttgctatgttgtccaggctggtcttcaactcctgggctcaagcaatcctcccatttcagcctcctgagtaggtgggactacaggtacatgccaccatgcccagctaatattctttctctgcctttctttctttctttctttctttctttctttctttctttctttctttctttctttcttctttctttctttcttttcttccttccttccttccttccttccttccttccttccttccttccttcctctctcactctctttctccttttggggtctcatgttgtcacccaggctggagtacaatggcatgattatagctcactgtagcctcaaactcctgggctgaagggatcctcctagttcagcctcctgagtagctgggaccataggtgcacaccaccacacttaggtaatttaaaaaaaaaatttttttttttaaagatggggtctcactatgttgcccaggctggtctcaaactcctggcctcaagtgatcctcccaccacagccgcccaaagtgctgggattacaggcgtgagccactgtgcctggcattgttgttgatctttgttcctttacctccctgaatacacacattgtttgctatagcatatgtattcccattgcactattcccaaataaacatcattttcttttaaagaccctctgttattaggtagatatacatggtatatctatatatagaaatggtacctgaaaaaatcactattagaaggaattgatgatttttttttttttttttgagatggagtctcgctctgtcacccaggctggagtgcagtggtacgatctcagctctctgccacctccgtctcccaggatcaagcaattctcctacctcagcctcctgagtagctggcattacaggcgcccgccaccatgtccagctaatttttgcgtttttagtagagacagggtttcaccacattggccaggctggtctcaaactcct

SEQ ID NO: 16857 - DNA, 2300 bp, Homo sapien
agggcatacagagaaaaaaaaaactatgacatcacccctgggggtgttacagacctaagaaagaagcaatggccctgggcggcctacagccccaggaagattcagccatggtacccaggagacttgagggcccaaagcccagaattacccccagaggaacacctgtagaccttcggatccttagctttgcacttcccattggactgactctgtttcctgtggggcaataggcacgtgttcactgtgcacctgcagccccagtcatccttctcagagagaaatggtttgggaagtgtttggcatattggggataaatagatgagtggatagaaaaaaaaatgcaggccaggcacagtggctcacgcctgtaatcccagcactttgggaggccgaggtgggcggatcacgaggtcaagagatcgagaccatcctggcaaacatggcgaaaccctgtctctactaaaattacaaaaattagctgggcgtggtggcgcatgcctgtaatcccagctactcgggaggctgaggcaggagaatcgcttgaacctgggaagcagagattatagtgagccgagatcgcgccactgccctccagcctgagggatagagcaagactgtgtctccaaaaagaagaaagaaaaaaaagcaattacagcaaaatattaaccatagtagaatctatacagtggttatataagtgtccactatacaattctttttttttttttcctttttttgagacttgatgtttcgatcatggctcactgcaactttgacctcctcagctcaagtgatcctcttgcctcagcctcctgactagctgggatcacaggtgtgcaccaccatgcctggctaattgttttattttttgtagagacgagatctccctatgttgcccatgttggtcctgaactcctgagcttaagcagtcctcctgctttgacctctcaaagtgctgggattacagccatgagccactgcacccagtcttgctatacgattcttttttttttttttttttttttttgagatggagtctcactctgtcgcccaggctagagtgcagtggagtgatctcagctcactgcaacctctgcccctcaggttcaagtgattctcctgcctcagtctcctgactagctgggatcacaggcacctgccatcacacccagctactttttgtatttttagtacagatggggtttcgccatgttggccaagctggtctcaaactcctgacctcaggtgatccagctgcctcagcttcccaaagtgttggattatgggtgtgagccactgggcccagccactgtacaattctttaaacttttatatgtgtttggatttttcataatattagaaaagggaaagaaaaaaatgtctggcaaatagtcagcactcgtaagtataatattttgggaatatattcccttctgggagaatccacatttcgaatgcctgggaagggctctgtttgtcctgacagatggcagatttcaggtgagagcacctactaagcctagaggtgataagctactttgcccacctagagctgctggtggtgaccttaagtttactatgtttctcctggtatacggcacttggcccagagtggactccagcttgccacctgtcacccaggctggagtgcagtggcgtgatcttgtctcactgcagcctcaacgtcctgggctcaggcgatcttccctacctccctcctgattagttgaggctacaggtgctcgtcaccatgcccggctaatttttgtttttgttttttgttttggtagagatggggtctcacactcttgcccaggctgagctagaactcctggcctcaagccatctgcctctgcctcccaaagcattgtaatgacaggtgtgagtcaccatgcccagccaggaactcagagaatcttaccctatgctgtagtatctgttgactatggggtagaggcaggataaggtgttccagaccctgcctgacacctgatccgaagaggttgctcatgtttgctcaggaggtgaggttcacacaataaagggcaggaggagggcttggacctggtataaaacatctggaagtttccagggggctgctttgcatctgaaactgtcaggtgaggggtgacagagatgcctgaatctgagttgggggggaattcaaatctgagctggcgaagaggatgcctggaaggaatggcaggaaagacttgagttaattggcgcttctgggtctgcagtaatcttaggtgcaaagctgtctaggtctctgctgaaggactggggacacctgggat

SEQ ID NO: 16858 - DNA, 2300 bp, Homo sapien
agccactgcacccagtcttgctatacgattcttttttttttttttttttttttttgagatggagtctcactctgtcgcccaggctagagtgcagtggagtgatctcagctcactgcaacctctgcccctcaggttcaagtgattctcctgcctcagtctcctgactagctgggatcacaggcacctgccatcacacccagctactttttgtatttttagtacagatggggtttcgccatgttggccaagctggtctcaaactcctgacctcaggtgatccagctgcctcagcttcccaaagtgttggattatgggtgtgagccactgggcccagccactgtacaattctttaaacttttatatgtgtttggatttttcataatattagaaaagggaaagaaaaaaatgtctggcaaatagtcagcactcgtaagtataatattttgggaatatattcccttctgggagaatccacatttcgaatgcctgggaagggctctgtttgtcctgacagatggcagatttcaggtgagagcacctactaagcctagaggtgataagctactttgcccacctagagctgctggtggtgaccttaagtttactatgtttctcctggtatacggcacttggcccagagtggactccagcttgccacctgtcacccaggctggagtgcagtggcgtgatcttgtctcactgcagcctcaacgtcctgggctcaggcgatcttccctacctccctcctgattagttgaggctacaggtgctcgtcaccatgcccggctaatttttgtttttgttttttgttttggtagagatggggtctcacactcttgcccaggctgagctagaactcctggcctcaagccatctgcctctgcctcccaaagcattgtaatgacaggtgtgagtcaccatgcccagccaggaactcagagaatcttaccctatgctgtagtatctgttgactatggggtagaggcaggataaggtgttccagaccctgcctgacacctgatccgaagaggttgctcatgtttgctcaggaggtgaggttcacacaataaagggcaggaggagggcttggacctggtataaaacatctggaagtttccagggggctgctttgcatctgaaactgtcaggtgaggggtgacagagatgcctgaatctgagttgggggggaattcaaatctgagctggcgaagaggatgcctggaaggaatggcaggaaagacttgagttaattggcgcttctgggtctgcagtaatcttaggtgcaaagctgtctaggtctctgctgaaggactggggacacctgggatgttcaggagaatagaaatggccagatgtgtgttagtggagaaaagaagtgacacatagaccaggcacctggggtctaatatcttgagctggtcccgactccttctgcaacttctctgtctgtcctagttccaccagcactgcttggatactggtgctggcacagttccttctgtcaccaactttgctccccaggtaacatagaggcacctctaaaatgcttctttccttgagaccaggtggatgccagggatttaaaccatgctccaggtgccccataagccaggccaattcaccacagatgatgaggctttctttgctcagcctctgggctcagtaaactcagccatctctttgcttgggagaggtcctctactccctccttagaaaactcgtttcctggctatggccataccaacccaaatgtacctgggcttggctgacttcagaaaacttttctgctttgtgccaggatggaataaggcttaatccagatagttagagttcatcttcaggcctgagagaaaaagaggagggcttggctacagccagaccagggagagctggaggggtcagggacattgaaggtagcatcagagaggaacaggactacaggctatggacagtcctttctaagctcaagactgggtctgctaggtctaagttgaaggacgaagaaggcttggtctgagctgcaggtcaggagtgcctgggtcaatcaagtcaacaaggaagaaggtgaatcttcatttgctcttttcttcccactccagccccagaatgttgacagtcgctctcctagcccttctctgtgcctcagcctctggcaatgccagtaagtgagataccaggagcctggtaatggggactggggaaggcagccttgggcactgctgttggccaaggcttttggaggttggcttggggtggggagctgagttgtcggaggaacaggggtggtgcagagaaactga

SEQ ID NO: 16859 - DNA, 2300 bp, Homo sapien
gtgtcatttgtctaattgctttgtaagtgtagtttttcataaaatatgtaaattatgtgaacgtctaatgggtttattatttttaatgaattaacaacattttaaagattttctcagttttaatttctagtgtggtaactagcaatggtcatagcccatgtattttggagttctcaagaatatatgtatatctatatattttttgagacggagtttcgctctttttgcccaggctggagtgcaatggcttgatctcggctcactgcaacctccacctccagggttcaagcaattctcctgcctcagcctcctcagtagctgggattacaggcactcgccaccacacccagctaattttttttgtatttttagtagaggcggggtttcaccatattggccaggctggtcttgaactcctgacctcaagcaatcctcctgccttggcctcccaaagtgctgggattacaggcctcagccaccatgtctggcctgtgaatgagttataattcattttttttttcatggtctgtgtttgtgctgaagttgtaattcacatgccataaaattcacacttttaaagggtgcgattcagtggttttagtgtattcttgaaatgtgtgaccatcaccactgtctaatccagaacatttttacgaccccaaaaagaagtcctgaacccactgggagtctgttcccctcttcctgcaacccctgacaaccactcctcaccttccgtctctctagatttgcttattctggacacactgtataaacggaatcatacaatacgtggtcttttatgactggcttttcttacttaggatgttttaaagattcatccatgttgtagctggtattagcacttcattcctttttacggccaaataataatccattgtaaatcatactccattgtaaataataataatccattgtaaataataatccattgtaaatcataatccattgtaaataataatcatcgtatggatatagcacattttcctcattcatcagttgatggatattttcgttgtttctgcttttggcggtcatgaatagtgctgctaagaacgtttgtgtacaggttttggtgaggacgtatgttttgggtactcttgggtgtgtaactaggagtagagtttctgggtcatatggtaagtctgtgttcaacattttgaggaagtgtcaaacggatttcgaacctggatcttttttaagagtgtaaaggggccctgggtttgagaaccactggcctagctgggattagaccaggagagtgtggatggctcaggagagcccctcctccttgctctgggattcagataccctcggcctcatcccacactcccttcagaatgcacgcgtggcatcctcagaccaccaaagacaatcctgtcctgggaggcagggagaaagccggcacactagacagtgcacaggtgaagccctcagggggtcctggagcagggccacctccctgggggatccccaggtgccattttcatggcagtgtctatggacggctccccttggcatggtgctgggtggcaatcctggctgtagctgccaccccctgccctcttgcctgccctcgagggcattgtgatcatcggtgtgagtctgttgggaaggagagccaggtccccaggtttgggaaaggagtagggtttcccagcctgtctggccatcaccccccagcccagcccctcctgctgggtgacgtgctcagttcggcccctgctgtactgggagggggcagggagcagatggcctccagggttgagttgaaaactgctaagggtgagcctcctctctcctttctgactctaaccttttgatgccctgccagtcatgttcactcttgtcactcggccacatgatccacctggtcaccctcctagaatcatgagccttctgaagaggagccttgagggaagagtgttttgctggagagatggttcccacagtgagattccaggcatcagtggggatcgtgcatggagatggtgtggaggggcctgagggcacagagaacctgtctgccatctgtaccccagccaatgatgcacactctttcgtcttccctccttcatctcagatgtgactccccacccccagccgggtgctccgagccatggccgacaccatcttcggcagcgggaatgatcagtgggtttgccccaatgaccggcagcttgcccttcgagccaagtgagtacctctggggccccccaggccgtcccttccttctgcctccctgctcctctcctgtcttcagcaagattcattcccagggg

SEQ ID NO: 16860 - DNA, 2300 bp, Homo sapien
acaacttcagcacaaacacagaccatgaaaaaaaaaatgaattataactcattcacaggccagacatggtggctgaggcctgtaatcccagcactttgggaggccaaggcaggaggattgcttgaggtcaggagttcaagaccagcctggccaatatggtgaaaccccgcctctactaaaaatacaaaaaaaattagctgggtgtggtggcgagtgcctgtaatcccagctactgaggaggctgaggcaggagaattgcttgaaccctggaggtggaggttgcagtgagccgagatcaagccattgcactccagcctgggcaaaaagagcgaaactccgtctcaaaaaatatatagatatacatatattcttgagaactccaaaatacatgggctatgaccattgctagttaccacactagaaattaaaactgagaaaatctttaaaatgttgttaattcattaaaaataataaacccattagacgttcacataatttacatattttatgaaaaactacacttacaaagcaattagacaaatgacactgttttacatttttacaactctttttaatgtttgacttcacaaaaaacagctggaccttcatatctgatttttcattcacgcatttgtggcaggttgtttcgctgaagtccttgaaggacatccagaccctcacaaatacgtatgatggctgaaaagaggaggactttttttactttccagaaattgtaaatatttttctttgatattgcacccaaactcaacagatggtaatttcttaaagattagttcaaatgtggcatctgaaaccacatcaatgaacttctccttttctgtacatttgtgacaggataaaacccagagtcctatgactattcttatggaaacacttttgacctgtggatctccggagggtgttgggggacccccagagaggcctgggcccagcttggagaactgcttttctcggccagtgccacccatttctatgatgaccagcagaggtaacatgcagaccgcctccgcctgaccacacagggtccaggccacaaccttaaccacactggtcgctctaccccatgcacatgtccaggcacctgctcttccagatcagacctgaccctccccagtgagctgcctcagcaaagagacctgggcagccccagaccccaaacagccaagcgtggaaatcccatggccgggcccagatcacccaggacctcctcagatggaggctcaatcttctcccagatgaggctaatggacaagcaaggaaagacaggtcaaaaatgataccgtcctcaaacaactttaaatcagtgccccatcccagcctttagagcactatggtttgctttgctttttaaaaacttcagttatcttgtgcagtcacactgctccacatgggtgtacaaagcattattcttttcaaagtaaacactaaaatatactacagcccacacggggtggctcacgcctgtaatctcagcacttcgggagactcaggtgggtggatcccttgagctcaggagtttgagaccagcctgggcaacatggagaaaccccgtctccactaaaaatgcaaaaattagccaggcgtgatggcgcgcacctgtaatcccagctattcgggaggccgaggcaggataatcgcttgaacctggggggtggaggttgcagtgagctgagatcgcgccactacactccagcctgggtgacagagcgagacataatctcaaaaaaaaaaaaaagatctgtgaaattttggcttttatgtaaacttactagaagtccaggaacaagtcaactgtcttcctgagcctcagtttccccatcggcacccaacagagcttgagacaggccggagcaaccgcctcctgcaatttcaatgcctgatttggaccctgctgagttacatgagggaggcgagggaggcaagcgagggaggcaagggaggcaggcagccagcaggcaggctgctggctgctcccacgtgggaggtgggaactgagccctccccagcccagtccacaggacagagaggaggaggccgcgagaactgcttcctacatgtccccacccctctcactgctgtagcttcagggcagaagagccacagagccaaatgctgcagagatgaagggagacggaaagagccaaatgctgcagagatcaagggagacggaaggatgtcgcctccagagctggggccacgggcagcgccagggcaggttcatcactgatggcaagtctgtggctgaccacgttcacaggggtggccctgagcaaaggtcg

SEQ ID NO: 16861 - DNA, 2300 bp, Homo sapien
tccggagggtgttgggggacccccagagaggcctgggcccagcttggagaactgcttttctcggccagtgccacccatttctatgatgaccagcagaggtaacatgcagaccgcctccgcctgaccacacagggtccaggccacaaccttaaccacactggtcgctctaccccatgcacatgtccaggcacctgctcttccagatcagacctgaccctccccagtgagctgcctcagcaaagagacctgggcagccccagaccccaaacagccaagcgtggaaatcccatggccgggcccagatcacccaggacctcctcagatggaggctcaatcttctcccagatgaggctaatggacaagcaaggaaagacaggtcaaaaatgataccgtcctcaaacaactttaaatcagtgccccatcccagcctttagagcactatggtttgctttgctttttaaaaacttcagttatcttgtgcagtcacactgctccacatgggtgtacaaagcattattcttttcaaagtaaacactaaaatatactacagcccacacggggtggctcacgcctgtaatctcagcacttcgggagactcaggtgggtggatcccttgagctcaggagtttgagaccagcctgggcaacatggagaaaccccgtctccactaaaaatgcaaaaattagccaggcgtgatggcgcgcacctgtaatcccagctattcgggaggccgaggcaggataatcgcttgaacctggggggtggaggttgcagtgagctgagatcgcgccactacactccagcctgggtgacagagcgagacataatctcaaaaaaaaaaaaaagatctgtgaaattttggcttttatgtaaacttactagaagtccaggaacaagtcaactgtcttcctgagcctcagtttccccatcggcacccaacagagcttgagacaggccggagcaaccgcctcctgcaatttcaatgcctgatttggaccctgctgagttacatgagggaggcgagggaggcaagcgagggaggcaagggaggcaggcagccagcaggcaggctgctggctgctcccacgtgggaggtgggaactgagccctccccagcccagtccacaggacagagaggaggaggccgcgagaactgcttcctacatgtccccacccctctcactgctgtagcttcagggcagaagagccacagagccaaatgctgcagagatgaagggagacggaaagagccaaatgctgcagagatcaagggagacggaaggatgtcgcctccagagctggggccacgggcagcgccagggcaggttcatcactgatggcaagtctgtggctgaccacgttcacaggggtggccctgagcaaaggtcggacatgaggacccaggagaattcaggccccggctctgggacggctgtgcacccccaccctggccgtggctggcacctcagaaggcacagctgtccttcactcgcacggagcaacctcgggacagatggtgggagaggaagggcaactcgaggaggcacattttaggaaactgcccacggagccagtttcgattctccaaacctcgtcagcatgcagaggctccctgactcggcagcaaggagggcctcatcagccgacccccatgcccggcacccccttcaccagtgggtaaactatgctcgccaccactcagcactcacctcttgggctcagagggcagaaagtctgacccttctctcttaaaagcagggtcctgaaaactccagagagcagtgccctgtgcattaaacacagactgcgcccttgtactcaggtatgaccatttgtcctggacaaaaattaaactgatgagggaacaaaatagggccttatagaaggtgagtggaaaagcagggaaggcaaacccccaaattcaggagggaggatggaattggcctggggagcagaggcaggaggttctgtggacagggctggtggagctctggggggagcagaggcaggaggttttgtggacatggttgatggacctctgcggggagaagacggaggagattttgtggacagggctggtggagctctgcggggagcagacacaggaggttctgtggacagggctggtggagctctggccacttcctccgtaaactagagacgtgatccccagggccaggtctgtctctgaggtcctaccagctgggacaggtaagaggctggggaaggaggagcgtgtgtgtgtgcgcgtgtgtgtgtacaggagcatattcaatgagcacataggtcaaggctgctga

SEQ ID NO: 16862 - DNA, 2300 bp, Homo sapien
tgtttctcttgcccaggaagactgggcgtgactactttgacctgaagagttattctcaaaaaggaaaggaatgctgggtagacaaaatatatgcccattgcagaaggccagcaggggcccctggccttcgctttgctaaaggtggcaggtgcacagctgtccggaccctggagctcagtgtgaggagtgtaaaggtgtagaaggtgccgtctgtgcagcagtgtggcggcgttctgcctttctcagctgaatggaagacaaacactcaggcctcttcacaccttcgtgactggtcccccctggacctttgcgcagagctggcctttccatgaagcaaactctgggcacatgtggaaaccagcctcttgctgccatgcctgccccagggactgaccagggtcggctccagtcactgacatagtttatcacatctctttggcctctggtctctggatccacacctctggctctgacgtctgcatcgagcccctgtccctgctgggttcaagtctcttttccagaagcttcacttggctcgaggctccacttgatttggtgtcatttgcgtttctgagcttggtcctcccgacctgtggtcctgccaggggaagagcagcgtggcctggctggaccctggcaaaggaggcttctcttctgcatttcttctacacggagtgcatgagcaggacaaagaccagctgattcctgcaggcctggggctgtggtgtgcgggtctcccacaggccttggtatgtgtgtggtgtgtggtcccgcacactcagagatggcttccagcacattccacactttctttctttctttcttttttttttgagtcggagtctcgctctgttgcccaggctggagtgcagtggcgcgatctcggctcactgcaagctccgccttccgggttcaagcgattctcctgcctcagcctcccgagtagttgggacgacagttgcccacgaccatgtctggccaagcctcagccttcccaagtgctagggttacaggcgtgagccactatgcctggcctacccatgaattttattttattttttaaattttaaggcgaggtctcactctgtcacctaggctggagtacggtggctagatcatggctcacagcagcctcaaactcctagactccagccaccctcccacctcagcctcctgaatggctggggctacagacatttgccaccacacctggctaatttttgtattttcagtagagatgggtttttactatgttggccaggctggtctcgaactcctgaccttaggtgatccacccgcctcggcctctggagtagctggggttacaggagtgagccaccgtgccagtcctccttccaccctttcatataaccagcagcgcatatcagcacttctcaacatctttactgcaggaccttttcttcaaatgaagtcttacctggaagcctgacagatgacgaggaaaaagctgagttgctctgggttgggctgtaataacccccttgttcccagccccctgcttctgcttgcacggtcctgaagaggggctccacacccctggctccttggaacccagtttgttgggttataataaccggccttgttcccagccccctgcttcgcctgtacagtcctgaagagggtctccacacccctggctccttggaacccagtttgagagcctcttggcaattatatccatctgtctgtctctcttgtggtagcacctgctgctgctccccatggggaaaggttgctgatggtgtttattttttttttaagcatgaaaacattttcttttttctatcagtagcttgtttgcactatgaaaaggtcaacagagagatccttgtcatcttccttctccctgcaggagggtgtcagggtgtaagtgctccctcgctgtgcaggggttcatttcattcatttcattacccttgccctcctcgaggtacctccgggaagctgttccatttacacatctgtcaagttctctgtgcgtcaatttgccttgctcctgaagagccacacccaaaaggggccccactccaggcagcggggcttcaggaagcgatgagatgctgacgcaggccccgtgcaccaccactgctgcctgtaagggctgttttggatacagaaaatgtgccctttctaacccaaaaaatgcttgaaatgtgtaaaagtggccagactaacagtcccaaagagggctgccctctaagaggaagcgtcccaaatctgttcagttttagagactacgtgactggggtacgtggtggggccttaccagacatccacga

SEQ ID NO: 16863 - DNA, 2300 bp, Homo sapien
atcattttattttattttgagatggagtcttgctctgtcacccaggctggagcacagcagttttattttattttatcattttattttattttgagatggagccttgccctgtcacccaggctggagtgcagtgatgcaatttcagctcactgcaacctctacctcctgggttcaagtgattctcctgcctcagcctctcaaatagttgggattacatgcacccaccaccatgcccagctaatttttgtatttttagtagagacggggtttctccatgttggccaggctggtctcaaactcctgacctcaagtgatccacccacctcggcctcccaaagtgctgggattacaggcgtgagccaccatgcccagcctctgcagccattttcagataatacaatctgtggagggtaaacctagaaagaaaagcaggtgatgcatcataccaggccttgtaagccacactttgttatttttttttttaagacacagaggccgggcgtggtggctcaagcctgtagtcccagcactttgggaggccgaggtaggcggatcacaaggtcaggtgttcgagaccagcctggccaatatggtgacaccccgtctctactaaaaatacaaaaaataaaaaataaaaaatcagccaggcgtggtggcacgcacctgtagtcctagctactagggaggctgaggcagaagaatcacttgaacctgagaggcagaggttgcagtgagtcacgttcacgccactgcattccagcctgggcaacagaggaaggctctgtctccaaaaaaaaaaaaaagagagagaaagtcttgctttgttacccaggctggacagcagtggtgcgatctcggctcactgcaggctcaagttcctccacaagtgcccctcagcgcagctggttaattttttgtagagatggggtctcactacgttgcccaggctgggctcaagcgatccacccaccttgacctcccaaagtgttgggactacgggtgtcagccctgcacagagccccacaagagtttagatcttgatgtaaattgtgatgaggaagcaatggaggactttttggctttttatgttttgtttttcatcactggagacttttagcaagagagtgaacggtttggttgtttttaaaagtttgttctagcagctgtgcggaaaaagagttcgtggggaaggtttgaaagcagagaccattcaggagaggacccagaagtcccagtgccagacacggcagtcggccccagcctgggtaacggacaagggagagggtgggggacacggaagcccaccaggtttccagccagtccagcggttttgttcactaaagtggaaaaccatgaagaagtaagtttgttttggacacattggctttgagagtccagggtagatgtacgaggctgaaactcaggcaataaaaattgaggggagaatacacagcatttaaaaaggtacaggaggccgagcacggaggctcatgcctgtgatcccagcgatctaggaggccgaggcgggaagatcgatggagcccaggagttcgagaccagcctgaaaccaaaaatcaaaactcttagccaggcgtggggatgggaggccaaggcaggaggatcgaggcacaggactggacgagatgagtgtcagcccagggatttaaaatctctctgcccaccctccccttcctgcggtcaactgtccagattccaacagacaaaagcaagcatgggcgaaccaccgtgcgccgcggtccccgacagaagcacgcatgcgcacacctctgtgtgcggaggtttccgacagacgcacgcatgcgcacacttctatgcgcggaggtctccgcagacagaagcacgcatgcgcacatcgctgtgccggtatcgccaacagatggaagcacgcatgcgcgcaccgctgcgtacctagcactccgacagatgtacgcatgcgcacaacgctctgttctcgagatccccgacagaagcacacatgcgcacaccgctgtgtgccaaggtcgccaaaagacggaagcacgcatgcgcacaccgcggtccgtggggcaccgggcggaagcgtcctgactgcgcaggcgcagcaggggtggtcgccatggagactcgtggccctggcctggcggtccgcgctgagagtcgccgactagtcggcatcgggcctcgggcgcccccggggcgggttgggttgcagcccagcgggcggctggaccgccgcggtggggcggggacaatggggtacaaggacaacgacggcgaggaggaggagcgggagggcggcg

SEQ ID NO: 16864 - DNA, 2300 bp, Homo sapien
gaaagaaaagaaaagaaaactgactcccaaaattaaaagaaggacttgaaaaaattaaatgcctgaggaacacagatgctaatttatcttatggaaatcaagatgataattggctttcattgataagtcagatacccagatatgtaggtttagggagggtccccaaaccaaatgccaaggtgaacaaagtattaatatttggtatagccaaactttcagaaccagcattcaaggtttctgggttcctttatcctctcattaaagagctgatagggtgggtgcggcggctcatgcctgtaatcccagcactctgggaggctgatgcaggaggattgctcgagcccaggagtttaggaccagcctgggcgacacaggaagtcctcatctctacaaagaataaaagatatgttgtttaaaaaaaaaaaacacaaaaaaagaggccaggtgcagtggttcatgtctataatcccagcgttttgggaggccaaggcaggcagatcacctgaggtcgggagtttgagaccagcctggtcaacatggtgaaaccccgtctctagtagaaatacaaaaattagcagggcgtggtggcgggcgcctgtaatcccagctactcaggaggctgaggcaggagaatcactttaacctgggaggcggaggttgcagtgagctgagattgcaccactgcactctagcctgggtgacagagcgagactccatctcaaaaaaaaaaaaaaaaaaagaggaaacggaggctcggaagagtgaagtaacttggctgaggtcttaagcttgtgcgagtgggagcaggatccagggctgctgcccgcagtggctaacagtgatgtggggccagctttggaagcctgcacccctgtatttaaatcccagctccagtactcagtggcgctgtgaccttcacctctgcacctcggtttcttctctcagggtcgttggggagattaaattggatcccgtaagtaaagtacttagacgacgggtacctggcacatagtaagtactttatagactctgtgaccctatgctgcttctcactggggcggccacgtttctacatgtgcaccccacaaatgactcacggtcacagtggggaccccaagcccccggctcagaggagcggcttcacgcggcctcttatgtctcccgcccaggtacacctccttggtcaagtacgactccgagaggcacttcatcgacgacgtgcagctgcccctgggcctggcggtggcctcctgcagccagacggtcacctgtgtccccaatggcacgtggcgcaactacaaggccgaggtgcgcttcgagccacgccacaggcccacccgcttcctcagtaccaccatcgtgtaccccaagtaccccaaggccgtctacaccaccaccctggattacaactgccgcaagacgctgaggaggtttctgtccagcgtggagctcgaagccgcggagctcccgggcagcgacgacctctctgatgaatgctgacccagcaggctgggctggggtcggaccggctctcccgctgtcctgcccccgactgccctggccaagctgggcgaccttacccttcacgtcattccagccccagaggagtctaacctagagatacctccaagcgcggccgggggaagagaaaaaaaagaaaaaatcactgcatctcataattattgagatctttgtgttgtaattttcaagctgtttttagagggaatatatgtcctggtttgctgctgtgttgtttccccaaagtctcaatcagatgaggcaacaaaaagaccaccagaattgcaggaaagcagcagcagtctgggatagggaggggggaggagagctctccctccgtggtcagtttgtcagaagaaaagcatggaaaaagtgagatttaagaaatctcagccacgggtgtcttcactgcacaaaagtggtgctaattcagtaaacagtgacacctgtgtgggttcaatctgtggagagttgagttccattcctttgtttttaaatttccacctccatttgtgtttcctattaacctaaactcttgtaattctctaaatcttttttcatgatataaaaaaaaaagaaaatcccaaaccacaatttaagatgccttttttttttaaaaaaaaaggttctccgtgttgccacctgctccgggaaggccaggccgatgggcggccaggtttgggagcagcggcttcggctccgattgcttcctgacggtcagttccaagcacaggctctgagaaacgcctcgaacccttggtatctggtgaccgtctccgcag

SEQ ID NO: 16865 - DNA, 1095 bp, Homo sapien
gatcctcccacctccacctcccaaaatgctgggattacaggtgtgggccactgcgcttggccagattgaatctttagttagaaaacaaaaaattccctggtagcatattttttgttttgaccttttctagagtgttgctgagacggtgacagagggagcgctgtcgaattgaggattcgggtgaagtgagcctcggctcaccagggtttctcaccgcagggcgaggggtggcagtctggcttgagtttgtttcctctttgcagcttttcacacaaccttagcagtgaaagggggcatccactttgctgtgttgatagggtcacagggcttgtgatgtggctcctctgagggctcacggcacggtcgtggtcaacctgggatttgaacccagacctctctgctccctgtccagcgtttctctggtgtgcccagcatgggggacacagatcccagttgggcccatcagctggaggctcagacccacagccttctgtgggcaatgcttagaaatggcccgtgggggccgggtgcggtggctcacgcctgtaatcccagcactttgggaggccgaggtgggcggatcatctgaggtcaggagttcgagaccagcctggccaacatgacgaaaccccgtctctactaaaaatacaaaaaaaaaaaaaaattggccaagcgtggtggcacatgcctgtaattccagctactcaggaggctgaggcaggcgaattgcttgaacctgggaggcagaggttgcagtgagctgagattgtacgattgcactccagcctgggtaacagagcgagactctgtctcacaaaaataaaaaataaaaaaaaataaaaaataaaagaaatggcccgtaagagctctaactgcattcttctctgtccttgaagagtccagcgtctctccccctggctcccggctgtgcgctgaggctttgtcccctgtcctttggcgaaggagtggagtttgaccccttaccaccaaaggaagtaaggtaaatatagcaggccccaattttattctttttttttttttaacaatttttattttttattccagatattaatgcttgttgttataaaaaattag

SEQ ID NO: 16866 - DNA, 2300 bp, Homo sapien
ccagttcagccgtctgtcctcaacccaggagagctgggaaagccagtggactcctgcacctggttcttgtcactcctggcgtttgtgtacagatcaccacttctctttttggttcattgttgaggagtcgttttccggacggctccatcacagcattgagctatcaagctgctgttttccacagttggtggtcacagccagggaagttgctgtcttgatttgttacattgtcagtaatccccaaggaaccaatggatgtcagtaggagtttctgttaaatgtctccttgatggggactcagtactgtgtagagacgctgtgtttctcttctgggggtgtgcatcagaaccactggggccttttaaaatctacagatgccggccgggcgccgtggctcacgcctggaatcccagcacttggggaggctgaggcgggcggatcacaagcgcaggaaattgagaccatccttgccaatatggtgaaaccccatctctacaaaaaatacaaaaattaccggggtgtggtggcgtgcacacctcccagctacttgggaggctgaggcaggagaatcgcttgaacccgggaggcaaagattgcagtgagccgagatcacgccactgcactccagcctggcgacagagtgagactctatctcaaaacaaacaaaaaaacagatgcccggagattttgagtcagtaagtttggatggggcctggcatacaggtttaaaagttccataggtagttataacgtttacaccttgttaagaaccactgcaacagagagatttgctttatggaagggctcctgccacgcattttcatacatgtctatttttctgactctaagctaaaagtgcgccgacactacacttgagctggtgccaacgtggtgaagattctctactgataacagctttcattttaaacttgtgttgggtcaggcgcggtggctcacgcctgtaatcccagcactttgggaggccgaggtgggcggatcacatgaggtcacgagtttgagaccagcctggccaacatggcaaaatcccatctctactaaaaatacaaaaaaaaaaaaaaaaaaagcaggcaggtggcgggtgcctgtaatcccagctacttgggaggctgaggcaggggaatcagttgaatccgggaggcggaggttgcagtgagccgaggtcccgccactgcactccagcctgggagacagagtgagactcagttaaaaaaaaaagacttttggtggtggtggggaccatgcccaggattgggctctctccatactgatgaggattcttcttgttttgatgaccaacccccaagcagaagctttatttattaacatcacttcaaaaataacgtatcaaaggggcaccctaggccgggtactgtggcatcacacctgtaatgccagtgctttgagaggctgaggtgggaagattgcttgagcccaggacttcaagacaagcctgggcaacagagtgagaccccatctctattaaaaaataggccgggcatggtggctcacactggtaatcccagcactttgggaggccgaggcaggtggatcatgtgaggtcaggagttcgagaccagcctggccgacatggtgaaaccctgtctttactaaaaatacaaaattagccaggcgtggtggtgggcgcctgtaatcccagctactcaggaggctgaagcaggaggatcgcttgaacccaggaggcagaggctgcagtgagccgagatcatgccattgcactcctgcctgggtgacggagcaagactctctaaaaaataataaggtaaaaggagtacctgtggatgaaagcagcagctaacagctctgtgattcagctagacctagatattgtgcccattccttcccctcagtccattttctgtagcccctttaaaaaccaaaaaacaactttgaagtcactttgggtttaaaataaatagtggtaatttgtataatcaataaagagttcactctgctcttactgaggggacttgtctgaaagctggcttagcggtgtccaggccagagaacatcctgtgtggactcttaacaatgaaacaggagccgcaatggacaaggtgttctgatctccaaacccagctcagggattgaagctaactaccgccactccttcctctctcgaagaacaaagagccagtacccagggctctgcccacccccgagaaggggtgcctgatttcttatgtctagggtggctcctctgtgcagatcagacaggactgagagcagacaagctgagaccagcatgaccagtacagggc

SEQ ID NO: 16867 - DNA, 2300 bp, Homo sapien
tcagcagcatattccattgcacgaatgtgctgtcatttgtttattcattccactgtcaatggacgtgtaggttgtttccaaacttttgcttttataaatagcggatgcagggaacgtttttacatgggcaagaattcctctaatggatataagtattaatgctgtgttatgggtgatacacatctccagctaaggaaatgttgctaaatttcccccaacgtgcttgaactaacttctactgtcaccactagtctgaatttcagtgtggccgtgcccacactagattatcaacctgtttacttctgactctgatgggtgtattacggtgtacatttgtgaatttcagtgccatggccgtgcccacacttgattatcaaataatctgtttacttctgactctgatggatgtattatggtgtacatctgtggttttaatttgcatttcccagttactaaccaggttgcgtgtcatttcatatgcctttcgggcatttgagtttcctcttttgtgaatccggtgttagtattgtttgcctgttgttgtgtcgctgttgggatagtttgtgcttttcctgttgatgtgtaggaatcttcatgttcggaaccccgttcccttgtcaacgttgcacgtatcttctcctgatttatgtcttgtcttttactttgtttgtttcttctgatatagatgcctttcattttagggtaggtggttcattctttctgatgtttgacattcttctccacccataagcaatgaaaataatctctgtattttcttcttcttcttcttttttattttttattttttatgtatttatttttttgagacagtgtcttgttctgtcacccaggctgtagcgcaaacctcccaggttcaagcaattctcctgcctcagcctcccgagtagctgggattacaggcatgcgccaccacacccggctaatttttgtatttttagtagagatggggtttctccatgttggccaggctggtctcgaactcctgacctcagatgatccacccgcctcggcctcccaaaatgctgggattacaggcatgagccactgcgccctgtattttcttcttaaagtttttcttttttatatctaagaatttaatccacctagaatgctttagaggcttgttctgggttcctccgaggaaaagcagcagtcatttccactggaattctggaaagtgcgctaacgccaggctcttcacgtgggccttgagcaatcagtgccattccccctcctggaggtttgcatacccttttctctgagcccttggccttttcaacaaagcagacactaggatagtaagaatttctatctctagaaatccagaaaggtccaaaatgccctgcactttgctggctacagttgaatgacctgcgtggtgcaggcctttgactagctgcatgaaattgctctgaccttagtgtaattccttaccacacctaaattattccacataaaacactgacgtcttccccatgtttctaccattgttaaaattacaattgccataacccttaagttcatagtatctgtcgttacttagtttctctttaatcattaattcttctgtccaaagcaaagtaaataggaaattggaggatgcaaagtgtcgcagggcctgaagggtcccatttctcacctacctgataggattacagaaggctttcccaaagaagcaggcagtggcagagagtacaggccttgccctgaatataagtttggccgttatcaccggagttgagtggtggcattgggagctgtcaccccactgctgccgttgtctgcttggtgaccatgtggttccattctcctaagccatctcaacaggccagagtacacccttctgtcttcagccatttctctgctccctggttgccaagagcagcggcggcagcagagcagggcagtcagcaggagtcagtgtgagctcgtcaccaaaaccacccagggacatttacctgggcaaccggaaatggaattccagcttcccttccaccttttgtctaaccccgttacctgggcaaccggaaatggaattccagcttccagtccaccttttctctaaccccgttacctggcaaccggaaatgaattccagcttcccgtccaacttttgtctaaccccgtccgttgcatgagatgagtttggtgagctgttaatcctctggaactttttctcatctgtaaaatgggaacaataaataacatccagggtaggtaaggctttactcagattaaatgtgacaaaacgttcctcatgtcattcccggcagtcagtg

SEQ ID NO: 16868 - DNA, 2300 bp, Homo sapien
tcatcctgaagtgagaattgagaagttagggtgttcagcagatgacataaaaaccactcagcatggagtaagtcaacattttaaaaactcaggtctcaggcagcttatataacactttagaagcgtggaacttcagttgagatgggtggaattggaaagagttgacaaaaaataaagatttagaagaaccttacttatcacctaaagtctattatttttcatatgaggtgagcaagtgctccaaagctacatgcatggctttttagccaagccaggagtagattccaagtgttctttttactgtagtccacttagccagtcatgttcactcagtgacgtactgtaaagaaagtctcagcaaaactttggtcattgaattgcttttggtaacaaagaccttcccgtcgtgatgcgtcagtacagcgcctggtatctttccagtgttcgctcaggtcaggaggccagtatcacagcattttctctttggctgcctttctaggtagttcactattgtgaaacacatgtcgtggcttggaacctggttttatgtgttaagggagaccacactatttggcaaaaacatagcactttaagaacaggaatcccagaggttggagtcagggaagagtggcacatgtggagtgaggctggtggcattccaactcttaggagagaggctggtggcattcccactcttaggcctcttcagcagcatcttgcgacatcagagaccagtggcattctgacttttagatctctttcagttttggtttgcagaaagtcaaatttcccgtgatcattactgcccatttcccaaaatatctcattgcagattcacagggtagtttttctgtcgcttgctgtaaaacgagtgtaaggattccatcctcgaggagcagcaggtaactgacagatccagccacagcagaaagaatgagtgtgaaggagcaggagtaagactgacaatgcgtagagataacaagtagtggctgtgagaagccatgaggtttaaaggttgtttctggcttttcacctggtacatgtttgttttactagagaccaggaggacccagcaatgttctacgagatgcatgtctggttgctaatattctagatcccaggatcaaacaggaaatcatcaaaaagtttattaaacagcatctgtcagagtatctggtactttttcaagaaaaccaagatgtgagtattgaccaaataagatcagatgtaacatttgaattttattgaaacatgagtgctgtcaagcctactaatttagacctcgtattacatgactgtctgacagtgttggttgttgagctgtgagtcctaggggctgagtttatagttcttaaccattttgaggtcactgaccctttggagaaattcagaaacatgcacctgtgcataaaattctgcatatagtttctggaaatgtatagacccctgaaggccaatcatggaccccaggttaaaaacctctggattttgtgtgtgtgtgtgtgtgtgtgtgagacggagtttcgctcttgttgcccaggctggaacgcagtggtgcgatctcagtttactgcaaccttgcctcccgggttcaagcaattctcctgcctccccctcccaagtagctgggattacaggcgcctgtcaccacaccaggctaatttttgtattttttagtagggacggggtttctccatgttggtcaggctggtctcgaactgacctcaggtgatctgctgacctcggcctcccaaagtgctgggattataggcatgagccactgcgcccagccaaaaacctctgaatttttaagtaaaaaatcaagttaaaaaggtagcctagattctttaaaaccatgagaaatacagaggttggttcccttttgcttggctctgtgtttttgcttgtttccttgaactgccatttctacttctaaccactggggtggcttttgatctccaccttcaccaggttgcctggctggacaaaatcgacagacgctatgcctggataaaacgccagcttgtggactatgaggagaaatacggccgcatgtttccacgtgagtggtgcatggctgagaggattgcggtggaattttgccatgtgacaaggtagatgccagttctctactggttctgtggttaatcaaattttcaccatcggttccccagtctctaatggttccatgttgtcctgtggatttgatgccacttccagaccccaccagatgactaatatcatcctcgtaccccacagtggccccaccagctgctccctctgcccccatctttgctctg

SEQ ID NO: 16869 - DNA, 2300 bp, Homo sapien
gcgacagagcgagactctgtatcaaaaaaaataaaaaagaatttttattgtttttatttttatgggttttttgtttttgttattttgagacagagtctcactctgtcacccagtctggagtgcagtggcttgatcttggctcactgcagtctccacctcccgggttcaagcgattctcctgcctcagcctcccaagaagctgggactacaggtgcccgccaccatgtccagctaatttttttgtatttttagtagagatagggttttgctatgttggccaggctagtctgaaactcctgacctcaggcagtccgcctgcctcatttgacctctcaaagtgctgggacttcaggcgtgagccaccgggcctggctttttttctctcttgagacagggtctggctgtgtcacctcggcttcagtgcagtgataaaatcatggctcactgcagcctcgacctcccaggctcaagtaatcctcccacctcagcctcctgagtagctgggactacaggcactcgccaccacgcctggctaattttttttgtatttctcgtggaatccgggttttgctgtgttgcccagactggtcttgaactcatgggttcaagcgacctcctgcctcagccttttaaatgttgggattacaggtgtgagccaccacacctggcctggttttttttcttggcaagtagcttggtgtaattgatgatgcttttaaaaattttattaaatttcattttagtaaatataacctttttcaattttttatatggctatattttaacagcattagtgagctataattcacatataattcatctatttaaagtatactgttcagtggtttttgatattacattattttttaaaccttgtaaaatatgtatataatatagaatttattattttaacatttttaagtgtataattagtggtattaattacattcataatgtacaaccaccactaccactatttctgaaatttattcatcaccccaaatagaaactctgtaaacattaaaaccattaagtccttccttcccctgcccactttcctcaacttcttgtaacctctattttactttctgtctctatgaatttgcctattctgggaactttatattaatataagtggaattctacaatatttgaccctttgtatctggtgtatttcacttctgtggtcttcaggattcatccacgttgtagcatgtatcagcactttcttctcttttacgggtgaataatattccgtggtgtagttccaccacattgtgtgtatccattcatctgtccatggacacttggattgtttccaccatttggcttttgtgaacagtgatgctatgaatattggcatacaaatacctgtttgagtttctgcttccgtcccttatgctgtgtacctaggagtggaattgctgggtcacatggtaatttttaatcattgcaatatttaatctctttagaaacatttttccatattgttctgaactttcatagattcattctttccatagactcaggtgcattaacacaagcgttctgttttgtcttcatttaattaatatagacaacatgtttctgattagcaagaatcttaagcttttgtatgtagtgcctactcatggagatgttctctcccacaaaaaaaaaaaaccaccctgattttttcttttatttagttaactagtccagcagttggactgtttccttcctgaccttagaaacgccaagtcccgcttttctgcaacatgattattgaaaatagttttaggaaaatactgcgccaagaaagaacactgaagtttattgttcttctgagccatctccatataaattggcaggttcttctgagccatctccatataaactggcagtcttcaggagccaagaaagaaggtcaagcgtaactcaccatctgcttatttccatgttagaggcagtcacaagtttaaactagactctgcgtctcaagaggaaaatgccattcatcaccactgtaactgctctggctagtacccaggtcactcttgcttttgattgctagtagttagaaatcgtgtaaggaaaattccatcctcagtttgaggctgtgcattagaaaaattgcggaattactgccaacagagcaaagccttctggatttcaggtccttgatacaagaagtcactgagatatgtttgtacaatggatgggaatttggctttctgtcttcatggaagaacttggcctcctttttcctcttccctctttcatccacggaaacagtatttagaagagcacagattcagcgt

SEQ ID NO: 16870 - DNA, 2300 bp, Homo sapien
agtagatagagacgggttttaccatgttggccaggctggtctcgaacccctgacctcaagtgatctggcagcctcggcctccccacgtgctgggattataggcgtgagtcaccatgcccagtcgtttatacacatttatcaaaactcactgcatcataaattgcaagagtaaattttactgtatgtaaatatcttaattttttaaaggaaaaaaaaagtccaaaataagtagctataattaccttttccttttagaaaaaggcattcatattttctgagcatgagagaactacaggctcattgtagacatttgggaaaatgtacaaaggatgtacattcatcacgtgcagaaaagtaatatttccttgctgtgagctttattggcacagaatacacacaaagctgggaccatgctatgcattttttaaatgaaattatacattttgctttctgaaatatattgtgcatatttttcatgtcattaattttcaaaatcatgattttatgaatcaataatattctatgtttacttaagagacagagtctccctttgtggcccaggctggagtgcagtggcgcaaaggaatcattcctcactgcagcctcaaactcctgggctcaagcgatcctcagtggtgggatgagatctagacccctgatattcaatctcagaaagtcaataattccctgcctcagcctcctgagtagctggggctgcaggcctgtgccactgcaccaggttcaatgtatattttattttgtcttttttttctttttttaatgtatattttttagcattcctttgttgttagaaattacattgtttatataattattatttgtcaattaaaaataaaagaaaaaatcatactgctcctattttttactttgagcaactctgataacaacaacaaaaaaaagttcagtggggccaacgcgtttccctcctggagtttcccggttcacctggtggagcgggtcctccttgggctgcaattccctccttcttttcagtgtctgcaggaaaggtggtttcacagggtgatcggtgatctggcttatttgttcctttgtgggggtaagggctgggcacctcactatttcctgtattaccagcttgaatttacatcgcgctgttaatgtttaatcctctccacatcgacgcggggtagtaatttgttccaagtcacacaacttatcaatggtggactattcaggacttagatcccggatattcaacctcagtaaacgtctccccagctccagggcgctgcgtcatctggctttaaaaaaacgtttctggccgggcgcagtagctcacgcctgtcatcccagcactttgggaggccgaggcgggcggatcacgaggtcaagagttcgagaccagcctggccaacatggtgaaacctcgtctccactaaaaatacaaaaattagctgggcgtggtggcgggcgcctgtaatcccagctactcgggaggctgagacaggagaatcgcttgaacccagcaggcggggttgcagtgagccgagatcgcgccgttgcactccagcctgggcaacaagtaagactccgtctcaaaaaaaaaaaaaaaaaaaaaaaagacgtttctccccataaggaggctgcagtcacctcgaaaagcttctgcgcagagcccggcgcacggggaatttctatcgagtgggcactgtcccgtcctacgaatgtccttggcgacatcgccactcgccagctgggatcacgtcgcccccgtggccggggacacccgctgccactgaccgagggggccccgggagctgagaggtcgccgctgcgctgcccgcggaggctgtgggctgcggttggcgacgccgcagggctgactttcatccgggcgtcctgctggaggccagaccctaccccaacctcggggtcctcagtgcggggcgcgccttggggagggaagaggccccgcccatcctaaggacgcgctgaggccacgcggggccgccgggatactgcgttgcccgggagacacctgacgtgacaggaacgccgccagtctcagtccgccgtgatcccacagttccccggtcccggaagtgccctggcctgccggaagtgccggagcggctgacagagcggctgacggagccgggctcaccaggtcgctgccgcgagggagttgctgtgctggggcctgggtggcggctggaggcctgagttgggctcgcggcgggggtcggcagggggccgggtggcggaatgatggaggaggaggaactggagttcgtggaggagctggaagccgtgctgca

SEQ ID NO: 16871 - DNA, 2300 bp, Homo sapien
agactggttcccaccactcaaaggtgccagcatactcactgccaagctgctgctccctttaaggagggaaggcagggaggacttgtaaccacctgtcactctctggaaacactggcgctggaggtcactgtgataaatgcttaggaaagagacagtggactgcacagagtcgttttcctggagagaatggagagttcacaggtagctggttttgtccacaagcgaatgtgaaaataaagagagcgtcgcatttgtcagatatcttgggaccaacctgaagtggctttctcctttcactgagtatgtcagcagtgaatttgggagttagagatgttgccctaagtggacgaagtttgaggcttttcttgaggctgtctgccaccgtcctgttggctaagtcccttttcttaaccacatataggaagatgttagaggctacattcattccaaaaggtcacagcctagtaactgatactaccactgaaggaaaactatcttttaaacctgagaaacatcttcagactccatcatgaatgaatccaaattgaaaaaaacaaaagctgtgctcactctacaccagttcctacatcactaactgccgtgttaaagtaatttaactggcacctaacagaaatcatctgccactttgtaaaagtcatagactcataagaatctagagctggaagaccgttaaagagctagtgatccagcctccctctcatttcacggaccagcaaatcgtggcccagagagccgagcccagctgttccgaagtcctcatacgggattttggtcagcattttgcatgacggtgatctgaggagacccgtcatacctttcatttgtagtaacataaatgaactgtatttcccaccccctacgtttgttagctgaggaagatacagaccaaagcaaaataaagctggtagttcctaaaggacagaagccaatgatactgaaattcctgtcttcatccatgtgattggtgcttggcacaaatgaaatgtattccaattcattcaagtttagacgcctgtcccgataactgtttttttgtttgtttgtttgtttgttttttgagacagagtcctgctctgtggcccaggctggagtgcagtggcgtgatctcggctcactgcaacctctgcctcccaggttcaagcgattctcctgcctcagcctccagagtagctgggactacagacaggcaccaccacacctggctaattttgtatttttagtagagacggggtttcaccgtggtggtcaggctggtctcgaactcctgacgtcaagtgatctgcccgcctcggcctccccaagtgctggggttacaggcgcgcccgaccccgatacttttaaataacgacacgttgtgaacaacaccacagtccctacgcctctggatggtgtctccggatagatccaaagccgagaggcagtaagagcctgcagcctccacagtccgcctcctggtgcaggtggagaggggctgctggaggcccccggacctcacgcttcctgagggccaccccggagcggctgcagccgctggcggcaccgggaaaagcatctcggccgtgcggggagaggccacatcctgaggcctcccaccgagaagcaccagggcttggtggacggggcccgcgaacccagggccacacgccgcctccctccttccttccccgcgggcctcgccccaccccggagggggttcctacctggcttcctcggccccgcgcccaccccgccccttcgcccggggccggcgagaagagcaggtcggggaggggcgcgtccgctgacggaacagaagccgggagccgcggcccttcccgcctccgcctgggccccgcggccgctcgggagggagcggcggactcggaacgcgcgcgcgccgcggccccggccacagccgccgcctcggtccccgcctccgcccccgcccacccgcccgccggggacgccggggaaccctccgggcccagggaccgcgagagaccccgccccgccctatcgcagccgccgggcctggtcacgcgcagagccgcgccgcgggatcggggccagcgccgggcggaggcgggacggggacgggggcggagggttgaaatcgcgcggccgggccggggcgcgccgagccgaacccagccacgcggcgccagcgaggcggccggacccgcagccccgatgctgctgacgctggccgggggcgcgctcttcttcccggggctcttcgcgctctgcacctgggcgctgcgccgctcccagcccggatggagccgcaccgactgcgtgat

SEQ ID NO: 16872 - DNA, 2300 bp, Homo sapien
ggatgtcttgaccgttacttaggagtcgggattgcccctcttttctttgccactcataggcacccattctccttgtgcctgctgcttcagagccacctcccccaggtgaatagtggaggaacaccattacacatgaaacgttcatgatcctccttaccaacatcaacatcaacatactttttcttttttgagacagggtttcactctgtcaccccgggtggagtgcagttgttggatcacagctcactgtagcctcaaactactggcctcaagtgatcctcctgcctctgcttcccaggaagctgggaacacaggcacacactacaacgtccagctaattcctgtaatttttgtagagtttctccatgttgcccaggctggtctcaaactcttggactcaagtgatcctcctgcctaggcctcccaaagtgctgggattacaggcgcgagccactgcacccggccccaacattctttttaacaaacccccagcgctctgtgattccctagcgtttgtcagaggttctatccttagttcaatacaagataaaaacaatataaaatacaaatataatacaaagcaacataacagtgccagagagcactgtgtggattattcttaggtcacaaaacacagattctcaaagcaaatagcctcctactttctccccagatccatttccccataaaagcccacccaacaaagaaaagcaatgggaaagctgaggggaaattcctcactcttgagtgcctggccaggggaaggcatgcgtttttttttttaattattcatttatttagttattcatttttttgagatggcgttttgctcttgttgcccaggctggagtgcaatggctcactgcaacctctgcctcccgggttcaagtgattctcctgcctcagccttccaagcagctgggtttacagatgcacgccaccatgcctggctaatttttatatttttattagagacggggtttcaccatattggtcaggctgatttcaaactcctgacctcaggtgatccacctgcctcagcctcccaaagtgctgggattacaggcgtgagccactgctcttggccggcatgtagttttattttattttttaaataaagagatgggggtctccttatgaggcccaggctgatcttgaactcctgggctcaagggatcctcccgtctcagcctcccaaagtgctgggattataggcgtgagccaccgcgccctgccaggcatgtgatttaaaagttcatagcttgctaaatattagaagctattagtcttatgctgtagatgaagaaactggggctctaagagtattcttatatctctcagtggtactaagtggcagagctgatattttaccatgcttactgctttcttgaaaaaagaggccgggcgaggtggctcatgcctgtaatcccagtcagaagttcgagaccagcctggccaacatggtgaaaccccatctctactaaaaatacaaaaattagccgggtgtgatgctgtacatctgtagttccaggtactcaggagcctgaggcaggagagtcatttgaacccgggaggcagaggttgcagtgagctgagatcacgccattgctctccagcctgggcaacaagaacaaaactccgtctcaaaaaataaaaataaaataaataaataagggtaacgtgcattaaattctttaagaagtgtctgggacctaccatctaggaaccagaacatctagggtgctttgagaccctaacatctagcacagggcctggcacattttgttgaaccaaacaggctgagtgtcttggcatgactaagttcgatacacaaaagtaggcttgcagccttccttccggctgtcatcaaaattcagagcttggtgtgggacgccgtcatcctgtctgaatttgcctctggatcctagggcttggaccatcaaagtgctgttgccacggaagcagcggtacagtagtctgcgcttgcctattgagcgtcctttgcccgtcacagttacccttttcagtagccctcgttggaattttccttctggtggtttcttaacctccacttacttccccttttcgtttcgtcatccgcagaggctccggggagaccttggggacttctttgtcggctgcatcttcacggcagaactgagcactccgtttgtgtcgctgggcagggttctgattcaggcatgtatgaatgaaatgacagagagtgtgagggttctgattcaggcatgtatgaatgaaatgacagagagagtgagggttctgattcaggcatgtatgaa

SEQ ID NO: 16873 - DNA, 2300 bp, Homo sapien
gtgtatgaggctcctgtgatcattaacaggagtagaagctgggctcagacactctggcacttgcataggtcaaggggtgtgttgtgctcttgcaacaaatcccacatagacatccatatgcatattgtcccaccgtcccctaagcagaaaccagggttaagtacagaatagtcccgggaacattttggttgcccggccttaggtgagcctttctggggctgggattttgacaccatctgctccattgtttctaaactgctgtgttctggcgcatcaattgtttcatcacattatcatcacggaaagcttggtctccctcaaaacatgaaccgggtaggccctgtgttccagtgggggcttttggacttgactttagtgtttaggaggacagagtccctctcccctctgtggtgctggggtattagtaaatcagccttgaagagataaggggctggggcctcaacctcccaagaggctgtcactggagaatggtctcctgccctcagatcttgggcatttccacagcacactgtccccctcgtccttccaaatacctacatacgctcttgtaataggagagctgggaactccacccaaaaccatacaaaaagttagtctgtgtatttggacgcctccccagcactcagtcaccgagtttctcctttccaacagcagtcactctcatgcagtttaagtgatttattgatgtctcggctaagcttgcgacagtttcaggacatttcagccatcaaggtctaagaagccctttccattcccgaggagccctcagccagcctccttcttcctcatctcctcactctggccgcgtagcccctcatggcgtccatcttggacgcccctttgttcgcgctccacgccccccacttccttcttcgtcagctcctccactttggccgcgtagcccctcatggcgtccatcttggacgcccctttgttcgcgctccacgccccccacttccttcttcgtcagctcctccactttggccgcgtagcccctcatggcgtccatcttggacgcccctttgttcgcgctccacgccccccacttccttcttcgtcagctcctccactttggccgcgtagcccctcatggcgtccatcttgcacgcccctttgttcgcgctccacgccccccacttccttcttcgtcagctcctccactttggccgcgtagcccctcatggcgtccatcttggacgccccttttttcgcgctccaagcctcccacttggccctggctctcacgtctgaggccggagggccggggatgtcgcagtcgccctgggtggcctgtttgtacaagccgtagaccagcagcttctcctgatcgctcacgggacccttcagctgcttgagggccgcgcagctcgaactccacttggcacatggggtggtggaggcggtccctggtgctagaagctggaggtggagagttggagtggctgttactactcgatctcagggggaggagacaggcacgcgatgtttgtgttttgtcaagcacagattgcaagctcggggtccagcgtaaaccccaccatgtttgggctcacacggcgcattttctggggaggaccagccgtcaaaaagcgtctaggatccggaacgctgctgtctggagggggcggcgcggcaggagcgcgttgagggactgtatgtggcgcgagctgggcgggtgggagtggaagcctcgcgtggtgcggccgcgctgggtggtgggcgtcccgggggaggcgctcggtgggggtgaactgtgtgcggggcacgcccggggttaccgggtgagggtgaatgcggggccggggaatcatgagcccgacccgctgggaccccggaagaggggccgggcaggggacggtgcggaggggtctagtgagcgacgtccgggtacctgagggctggtgggagggctctgccggaaggcggcgctgtgcgcttggcgcgctcgttcgtgaggactgcgcgtgcgcggcggaggctgtgggcggggccgggcggaggttgtgagcaggcctaagcgcggccgccgtggctcctgcgtctcccatcgtgccgtgcgtcccgcgccgcgttcgagttctcggaggggagggggcgttagccccgcgcagccgccggcgtcgccgccatggacctaggtgggtgccgcggctccccggccccgggctgcgtccagcaatgcgccaccagagcggtgctgccccgtcgcgtctcctcctgtcgcgcacgctcgcgcgggcccggaccgaaacgtcccccgcgtcggggcgggtctaggg

SEQ ID NO: 16874 - DNA, 2300 bp, Homo sapien
aagttcaagaccagcctggacaatatagtgaaaccctgtctctactaaaaatacaaaaatgagctgggcgtggtggcatgtgcctgtaatctcagctactggagaggctgaggcaggagaatcacttgaacctgggaggcggaggttgcaagtgagccgagattgcagcactgcactctagcctgggcgacagagcaagactccgtctcaaaaaacaaataatttttaaaagttaataaaaatactaaaaaaaaaaaaaaaaaagctgagcgtggtggcaggcgcctataatcccagctacttgggaggctgaggaaggagaattgcttgaacccgggaggcagaggttgcagtgagcagagatcatgccagtacactccagccggactgacagagtctcaaaaaaaaaaagcaaaaagaagtcagcatctcctctcctaccagatgggattgtgggagcatgtggccccacctgctcctggcagctctcctgcaaccttgaggggactagttctaggagaggtacccgcagagaacaacagaacgtagaaagagaaaatgtggggagctggtgaatcatctaaccttgaaatctttcccacctatagaatgcctgctctgtgagctaaaagattctataactgttcaaagtagttgggttttctgttatttacagatgaaagaatcataaatcactacattaccagtagaacagaactagtctagatcccctactgctatgtatttaagttctgatatgagaatgtagtctctccgataacaggtaaaagcactggctggggaagacacgtcacgtgaacacagactctacaaaaaaaagacaggcagccctcactctcctttcaccaaagatgcctttagacagaggcttttactggttctggtataattacctgactgaggcagactgcgattctgcaaatagaacttatatcctcccggggcctcggtttcaaaaacaccttctgcaacttccgtcagtggccactccagcttcctggcgttgctgacagcctggctagaagcgagcgtgattccctacaacaaacaacagtacatccaagtacatgatcacaacagatattttacagaacaagacaatgagcccaacccctattgcctactgcctttaggtaaaatcacctaagatttaactggcatccaacattttcttctagtgatttaaaaacaggttttcaatgttttatcccacaaacattcagacctttgtgaataataggacagaaattgaaatgccagtgaagtctgattcatttaacaccaaagataacgtcttctaattctaaagatctagccacagaaatcttgatgttacctgggtctgccagctagctacctatttaaggtgacctgttcttgcttttttaacaaacaaaacaaaaataagcaaactatcaaggtttccttacatttaatcaaagtgcctagaaatgtacacgtgtgctttgagaagaccagccttgtttctggctcggtttattataatggcctctctgcctccagtcttgtaaatccattacccactctgcagccaaagtaaactttccaaaacgcatcctatagtccacccccagactgcagccagccttgttttccctttgctcaaagtccgccaatggctcatttcactcggtgacttacggcctaggaggccccctgcagtcttaccccatggcactgccgaccccatctcttaccacgctcccctctcgttctctattccagccacactggcttccttacacctcctcgaacacgccagatgttacctgacggctcttgccagaatattctctgcctggaacgcgcatcccccagatatccacgtggctaactccctgacctcttttgagtctctgctcaaatgttatctcttcactcacacacacccttggcactctactcaaatttacaaccagccacctacccccagccaaaactctgctagaaaaaaacggtatttaccataaagtcattgccaagcttgtagtctccgacgccataattgtaagtcagttctgcgacaaaatgatcatcctcaggcccaaatcccaccattgttttactccatttcccatcataaggcctagaaaataaaagtaaatgaactcagtgactacagacaagtcagcctcaggccacccccagagaactactgggcacagagagatgagcattcctgtctggtcctaaaagttctcttaaggatgagatgacctcagatggtacagaaagcagctgtgggcagtgctcatggg

SEQ ID NO: 16875 - DNA, 2300 bp, Homo sapien
acgttgagagcccgctgtgtgcagggttctgtgagatgctttcataacatccattcccatcacatgttaggagactgagactcagattctaatttgctcagagttacacaactactaaatgacagaattccaaatcagacttttttttttttttgagtttgagttttgctcttgtcacccaggctggagtgtaatggtgcaatctcagctcattgcaacctctgcctcccgtgttcaagcaattctcctacctcagcctcctgagtagctgggattacaagcgcccaccaccatgcctggctaattttgtattttttatatttttagtagagatggggtttcactgtgttggctaggctggtctcgaactcccgacctcaggtgatctgcccacctcagcctcccaaagtgctgggattacaggcgtgagccacgatgcccatctttttttttttttttttttttttttttttaatttgagatggaattttgctcttgtcacccaggctgtagtgcaggggcacgatctcggctcactgcaacctccatctcatggtccaagtgattctcctgcctcaacctcctgagtagctgggatcacaagcacacgccaccacgcctggctaatttttgtatttttagttgagacggggtttcactatgtttgccaggttgatcttgaactcctgacctcaggcagtccacccaccttgatctcccaaagtgctggtattataggcgtgagtcactgtgcccggcccaaatcagacttctttaatgctgaaggccacactttttcccactgcatagcactgcttaccaatctaaatagatttcacaactgatttggtagcctgacccttggtgtcaagctgttcgtccttccactgcttctatcctgggagaagtgtaaagctcatttgcttttgttcttttacaagtaaagcttataaatgataatgtttgtgttttgacattttagtctgtgctaaagacgctgtgagcagtactagcaacacttcacaatttattctaaatctcacaccaggttctgcggcatgaggaatttgaagaaggctgcaaagctgcctgtaatgggtatgataccttgtttcttaaaatctcctttaggctctgactacacccggataacagaagacagtttctcaaagtgagtataaagcagtggaattaattaaggaggcagtaaattagggaggcaacttcaggagcgtcgggaacacatactgtttctctgcactctcatgagtataaagcagtggaattaattaagaaggcagtaaattagggaggcaacttcaggagcgtcgggaacacatttctctgcactctcatacaacacctgtgggacacaaagggattctccagctctctaacaccagccggctgtcctgttatttaattgattctgactctacctggagttaatgtcagatcctgcaagttaagggctcagtcccagaagattttccgccacgtcaggcgccggtcacagtctggatcttcaggatttccgatgaccaactacaagtcagggctcccgctcctgcttccttgggtttgatagtctgctacagtggctcatggaactaagggaaacgctggaaacacttacttacatttactggtttatcataaagagtacgagtcagaaatggctggacagaggagatacacagggcagggcatggggagtgggtggcagagcttccatgctcttctgggcaggctccaatccagcacctccctacgttcagcatcccagaagctcatgagtctcattgttcaagcctaatagagcccagtctccatccctttccttcccagaggttggtggatgggactgaaagttcagtcctctaatcatttgtctttctggtgaccagccccatcctgagtctatgtagaggccccactctaagtcacttcattagcataaactcaggtgtgactgaaaggggctcattatgaatataacaaaagatattcctatcaggaaattccagaggttttgggagctctgagacaggaaccagggacaatgaccagatatgtttcatattatgccacaaatgcaaataagtacatgctctagatgaagcagcggctttccagtatctttttttttttgagacagaatctcactttgtcacccaggtgggagtgcggggtcattatcctggctcactgcaacctctgtcttctgagttcaagcaattctcctccctcagcctccctagtacgtgggactatgggcatgtgccaccatgcccagctaa

SEQ ID NO: 16876 - DNA, 2300 bp, Homo sapien
aaaataaaaaataaaaaataaaaaaatccttattgatatccttccttaataacaccaaaaaagcacatgcctaaagcacaaagcactgatcccatcaccaccctgtttaagaacataagtgagctcccatcttactgcagcataaaatccaaattctttagcatagcattcaagatactattagaagcaatgccgacctgtccatcctgatatcccatctccttaacttcaactaagcaacctcaactaaaggcacataaaaccagcggcttcgcaaacatgtgccatctccgcactggctcttcagttttactatgtagctcctcctctcatctacctgtggatatcctatctttagacgtcaactcgaatcctggctaacacggtgaaaccccgtctctactaaaaatatttttaaaaattagccgggtgttgtggtacgcgcctgtggtcccagctactcgggaggctgaggcaggagaatggtgtgaacccgggaggctgagcttacagtgagccgagatcgcgccactgcactccagcctggcgacagagcaagactccacctcaaaaaaaaaaaaaaaaaaaaaagtcaactcgaatacaaggtctacatgaattatttcctcatcacccaggttggaaaaccgctccttcttttgtatttttataatagtggctaacacttatataatctactattaccgatatgttaaatactatacatataataaggtgttgaatcttttttttttttttttttttgagacggagttttgctttcgtcatccaggctggaacacaatggtgcgatctcggctcactgcaacctccgcctcccagatacaggcgattctcttgcctcagcctcccgagtagctgggattacaggcgtgtgccaccatgcccggctaatttttgtatttttagtagagacagggtttcaccatgttggccaggctggtgtccaactcctgacctccagtgatccacccgccttggcctcccaaagtgctgagattacaggcgtgggccaccgcgccggcacgtgtttaatctttgcaacaaccttttgatcgacgaggaaatactaacaagggacagctctgtggtttctgctatcgaaagtttggtggtttttcactatcaaattctgacttccattaccatcatctacgtacaaatccagttccaactcccaccccaacccaggccatgagctctaatggaggatatatatcagggtcatttgcacctttgttgccaaaactcaacgtagtaccctgaaaatagcagatattttaaaaatgacctgacgaattcagatccccgtctattgcaccgtctatacactaaaccgcgctcttgcacctttcaagtcttccttagtggtgtgttccctacctccctggcttatcaaaggaggtccccaaaacccagttccccaaccaactgaatcctgcaaataacagctcctcaggacccgagacagaccgcttctgggtgctgttgaaaagcagatgggttgagagttggagcatatattcagagactgagtatccgaaacggactattcagaccagccttgctagaagcagaactctgaatacgctgattttatctacatcaaaggctccaaaccggaaaacacaaatattaactagaaagcattatataacattttatttaccgtcttttccggtagacggtaagctccacaagggcggggctcaataaacgtttacgagtggcttaaatgaaaggacgtgcgtgggcacaccgcggggactaatcgtgttaggcccttctccaaggcctatgatccccaacggcaactcgccacgctcctgaagctgaacaccgcgcagggcctaaggtcggacaccctccggcttaggttcacgacacacccattttcccctccctccgccagggccggctcgggcgccggttccagcctcgcgcgccagcccctgtcggccccggcctgcaccttcatccccaggacgtcccgatagaaacgcgccgtctggaagcggtttcccactttgaatacgaagtgcagagctctgcgagcagccatgattcccgccgcacgcagccgtcacgcgcaccgtacagcccagtccacgaagggcgccacgggccgtgacgtcactagccgccgacggcgcgctttcgtgacgcagcccgggtctcagggaacatggcggcgctggtgagacccgcgaggtttgtcgtgcgaccgttgctgcaggtggtccaggcttgggaccttgacgcgaggcgctgggtccggg

SEQ ID NO: 16877 - DNA, 2300 bp, Homo sapien
gtggattagagggctgtagctagtgagaatatggttacttagcatgagtaattctaggtactttagtaatccaagtccccatcctaggatctaagagctctgagtgcagaggcacagatccctgtgactcactgggttacagagacaagagatggttccccagaatctcctctctcagcagttcaaggattcagttttcatatcttaaaactcccatgtcaaaaacgtatgaaaaacttatcttctcatatttagaccaaagactttgtaactgctaatcaacatcggagttacataaggttaagtcagattcagccaaatgaaggaacagactagaagacaaggttctctgtttattgggctaaacggggcagtaaattgtggcttgtacctcgcttcttagatctgcttctggaataagcagtttattgacagttatcaccacattggcagaggttttgcaaaaatgaagggctcaatctttcagtaaacgctttcttaatttttaatctgacatagaaagttgaagaagtaatctaaaaaatagaaggtttgaggaatagtggttcttcctagagaccataaagagccacaacacaaatgatagtgaaaaacgggtttcaatttccattgaaaatactctaagatacacaggtttgagaattatatttttctaattgtaacattttgaatttcatttcaatgctgctgtcctaagacaagtatgagaaattaatcctaggtctccacaccttaagatacactgtgtaaggccaggcatggtggctcacgcctgtaatcccagcactttgggaggccgaggcaggaggatcacctgaggtcacaagttcgacgtcagcctggccaacatggtgaaaccccacctctactaaaaatacaaaaatcacccgggcatggtggcagacgcctgtaatcccagctactgcggaggctgaggcaagagaatcccttgaacccgagaggcggaggttgcagtgggccgagatcgcgccattgcactccagcctgggtgacagaacaagacaaaaaaaaaaaaagatacactgggtaatcactaacccattattccttgtggcgttacgaggtcggaccaatccttgatatcctcaaatttcaccttaatgaggctgacacctttcagcttatcgactggcaactcctttaggtattctagacggctaaagaagaacatttttggcacagctccagccttgagagcgtctgaaatgagcctgcgaccttccagcaggatcttcccttgtttttcccgaaatggcctggactttactattgtcattacactgctgtagatggaaataaaaaaaaaaaacaggtaactatcaacatccttgttactgagacacgcttagttgtaacagaaataaagagctacggagagggccgggcgcggtggctcacgcctgtaatcccagcacattgggaggccgaggcgggcggatcacctgaggtcaggagttccagatcagcctggctaacatggtgaaacaaaaacaacaacaaagagctaaggagaaacagaagctaattccaaagacgcttattcggccctctgtgcataatacaaaaaccagcgggctgtactggaagaagtcctccatcggaaggaggttaaggttccgctgtgcgacgggaagggaaacgagaacattcgacaggctcaagaaccacatcacctcagcctcctgtccccgggataagctttatcgtagcgaagcccagactcttcccaggtgctgggagcgcgggatgcggactcctcgagcggttgtttctctcgttgctcctgggcactggcctcagatggtgccttgcggggctgcttcccaggagcgcgcttctgttccaccacctctccggaaggaaacaccactttcactgggctccgccgcagcgcccggacccagcgcctcgcgtcaaggtcccaagcctggaccacctgcagcaacggtcgcacgacaaacctcgcgggtctcaccagcgccgccatgttccctgagacccgggctgcgtcacgaaagcgcgccgtcggcggctagtgacgtcacggcccgtggcgcccttcgtggactgggctgtacggtgcgcgtgacggctgcgtgcggcgggaatcatggctgctcgcagagctctgcacttcgtattcaaagtgggaaaccgcttccagacggcgcgtttctatcgggacgtcctggggatgaaggtgcaggccggggccgacaggggctggcgcgcgaggctggaaccggcgcccgagccgg

SEQ ID NO: 16878 - DNA, 2300 bp, Homo sapien
cccagacacctcaggacagtgctcaagcagcaggagtcacgaaaaggaagctcacatctttccagcctaaaaccaatctcgtgggatttgttccccgggttatactcccactgactcgttacaaaataacagtgaaagaataaaccatgtattaccttgtccttgtttagaaaaagcaatgtaaacactggaaagtaatttttttttttttttttgagacggaatctcactctgtcgcccaggctggagtgcagtggcgcgatctcggctcactgcaagctctgcctcccgggttcccgccattctcctgcctcagcctcccgagtagcacctgccaccaagcctggctaattttgtgtgtttttttagtgaagaaaggatttcaccgtgttagccaggacggtctcgatctcctgaccttgtgatccgccgccttggcctcccaaagtgctgggattacaggcgtgagccactgcgcccggctaattttttgtatttttagtagagacggggtttcaccatgttagccaggatggtcttgatctcctgacctcgtgatccacccgcctcggcctcccaaagtgctgggattacaggcgtgagccacagtgcccggccaacactgacaagtaattctaagcccattttatcctgggtgtgagagggaaaagaaatttacatccctttgctttagagtccgtggcttatatgccacggtgccttcagttcactttatatattcatgggtataatttagtagggacgagggagggtgcaggagggaggcaaattgtcctttcttcagtgaatacaggggaacagatggttgttatttgctgagtgattctggaaaatcactaccttgaattctcagttttgagtctgacatttgttctgtcaccatttccccagtaaacaggaataaaaaacgagccacatttgacaaggaaaacactgcttggccgagagacaaacattgtcaggatgttggccacgctcccgcgcctttgtgtggtggcgtagctgtcacagtggcgtctgccaggaggtggcaggcgacacctccaaaaccaccccagtgctgaagggcggggctgcgattttttcctggatttaaatcgttgaaaagggaggaaaagaggatggagtgaagtctccctccaccagagagcattttgcaagctgtctgtgctccggggtgttaaagccggagacccatccagattgtcccagaccacctcagaagaaagaacccggagtacaggaagacatgggaacaaaaacggaggcgaaagaggacgaacgggaaatagcaggaaagaccgtcacaacttttccctgtgactgcagcctctgagaaaagcaactctgggcaaagcataggtgtccagatgtgcctggagctcacgctgggtgcccaccggctggcccttcggttcctgcttcggggcagagagcgttgaaatcactctcccctcgccccagccgctggctcctggctgggagcctggtcattaaggtccagaggagaaacagacctctggggacctgccgttcacctgggaccttccgctgcttgccccggggttgacagcaaccccagatgtccgcaccagccacgctgggccacacttagccccacttttgccattctaccacgcacagccctcacacacactccccatccaaggttccagggctctgggctgaaaatcaccagctgtactgcagggcctggggctgccctcttgaccaagctacctctccctcaggagcagagctgacaggctcacctgtttttaagaaaacatgttgccaccttaaaaattccatgattgtgtttcctctgttttctttttttttttttagatggggttttgccacgttgcctaggctagtcttgaactcccggcctcaagctatcctcctgcttcagcctcgaaagtgctgggatgccaggcgtgagcccctgcgcccgccatgtttcctgttttcatcagtgcagggagtgcacacatgtaataagctaggagccaagttagtggatgagctggtttattgctcaggatgactgaagtctcaactacggaaccatgttacattcgagcagctgagacagcagctgaagccaggtcctcccgaagcttcaggaagcctgcttgatgctccacggctgagagtgacagagaatccagaatagcttatggatgggtcagttctcgtctcaccacactcccaatatccagcttcctggactgttgtgtagggaagagccacttttttcagttgaagtctgagtt

SEQ ID NO: 16879 - DNA, 2300 bp, Homo sapien
gttgattcccgaggccccgaggcgatgattcccaaaccgagtccctcgtcagttctggggagcctgtttcattttgcacgtacatctttgcgttgcccctgggtctccagcctcaggatgtggcctgggcgtttgtacttttcaaaagcccctggaagggccaggtgcggtggctcacgcctgtaattccagcactttgggaggctgaggcgggtggatcacgaggtcaggagatcgaggccatcctggctaacacggtgaaaccccatctctactaaaaataaatagaaaaaaaacattagccgggcctggtggcgggcacctgtagtcccagctacttgggaggctgaggccggggaatggcgtgaacccgggaggcggagcttgcagtgagctgagattgcgccactgcactccagccggggcgacagagtgagactctacctcaaaaaaaaaaaaaaaaaaaaatgtccctggaagacagaccttgtgacccatccaggtttgggaaccgttgccaggagggcagggaatggctctagtttgattcctgtgttagctgcagacgctgtaggtgtgttgacaagtactgtttgatgattatcttgtcacgcctgccgctctgaggtctcccgggtcccaggtcatcaagaagagtcttaaccgctctgaagtctcctgggtcccaggtcatcaagaagggtctaagccctcttttaccatctgttttctgtttcaggtctggagttcccctggggaccgaaacccttcagggaagtcattgcagggcccttgcttagaaacaatgggcagtctctggagagcagcagcctggaggggtctcacgtgggcgtctatttctccgcacattgggtgagtgtttggaccccctttggctcagacagaaggaagcagtgatgttcccagcaggcccagctgtggttggcttctgggggtgagacacccaggcaggaatttcccggccttctggccttctcctgtgcccgaggcctggttgaatagtgcttatgattatgaatgaaaaaagcagcaagaaatgacttctttgactgatctataacgatagccctcttttttttttttctgagccagagtctcgctctgttacccaggctggagtgcagtggcgcgatctcagttcactgcaacctttgcctcctgggttcaagtgattctcctgcctcagcctccagagtagctgggattacaggtgcatgccaccacgcctgactaatttttgtatttttaatagagacagggttttgccatgttggccaggctggtctcgaactcctgacctcaggtgatctgcccgcctcggcctcccaaagtgctgggattacaagcatgaaccatcgtgcctggcccccttttttttttttttgagacagagtcttgctctgtcgcctaggctggagtgcagtggcacaatctcaactcaccgcaccctctgtctcccgggttcaagtgattcttcggcctcagcttttgaagtagctggggctccaggcgcacactaccaaacccggctaatttttgtatttttagtagagatggggtttctccatgttggtcaggctggtcttgaactcctgaactcaggtgatgcacccaccttggcctcccaaagtgctggggtgacaggcgtgagccactgcacccagcctggatatttctctcaatccatgtggatgagttcatgctacctgctcacacactgcatagggacaatgcgggtgcttgtgccagatgcccaccattaagagaggcaagtttatttttgcctcatgcaggaggctaggtcttgctgtgttgcccaggctggcctcaaactcctgggctcaagcgatcttctgacctcagcctcccaggtagccaccatacccatctcatttccacccctttcatgaacgggattttgctgtcccagtcctgcttgagtcctgctaacccggccttggatggtgagtggctgggaggtggagaagcagcgtgacgcagcgggtcttgctgtcctgtctttcagtgtccgccctgccgaagcctcacccgggtcctggtggaatcctaccggaagatcaaggaggcaggccagaacttcgagatcatcttcgttagtgcagacaggtcagtcgtgccgtgaagtgctgggccccttttctgtaggtagctgacatccattttttttcttttcttttttttctgagacagagtcttgctcttgtctcccaggctggagtgcagtggtgtgatctcagctcactgcaacctccacctcc

SEQ ID NO: 16880 - DNA, 2300 bp, Homo sapien
acgtgggtttacgtggtagagaatgtcgtcttggtgaaatcatagtattccctaggacatggttttaagattttcacagggatcagaatgtccctcctaggggctttaattcatgggccaaaagagatggactctgccgtaagaagctccgcttggagggccgcagaggctgtgggaaagcggagagctcagaccccggcctctagtgctgcatccgtggcggctgcccccttcacagttagaggcaggctgagtggggtttttcctctttaaaacattacatagcgaagtcccagcccccgtgtcactctcctggccttggcggtgagtgcacctcgttgcttggagctgtcactccctgcgggccttggtcttgctggctacgcgtgggctgtgctcctccagccgccccgctcagggccgtccgcgtggcgtctttccctctggcagtgagtgagaacagggctgtgagatctcctcccctcacttaatccgtccagtgagaagattcaaccccgctcacacattttcccagtaaaaatgccacctacttcaaagaattgtcctcagtaaaaaccacggcatggtggaaccaagcgtgaagcttttcttttttttttttttttttctcttgagacactatctccctctgtcgcccaggccgagtgctgtggcatgatcccggttcactgcagcctcgacctcctgagctcaactcatcctcccgtgtagctgggactactggcgtgcaccgccacacccagctaattttttattatttgtagagacggggtctccctaggcttgcccaggctggtctcaaaacttttgagctcaagcaatccgcccacctcggcctcccaaagtgctgggatcgtggggctgagccgcagagcctggtccccgtgtggatcccgagcccgacctccagagcattgtggatccctcttgtttccggggaggcccgaccacctgcattttcaaccagcctgtgctcctccttcccagcccccaagcgactttgaggcagcaggtccttggaccaccctgtgagaaaacgtggttcagttgagcgggaagcgtattctcaactccccctacctggagcttaggtgtcatcagaacatggaccatctgggctgggtgggttttactcttttcttttattagacttaaattctcacttggctccctgagcccatcaagagcaatagaatcagaatctctgggcgtggggcccaggagcgtggtattttaaactccccagctgattccaagtacagtcagagctgacagccgctgggatgtgacggccgggatgtgaatccacaatcccgggtatcgggttgattcccgaggccccgaggcgatgattcccaaaccgagtccctcgtcagttctggggagcctgtttcattttgcacgtacatctttgcgttgcccctgggtctccagcctcaggatgtggcctgggcgtttgtacttttcaaaagcccctggaagggccaggtgcggtggctcacgcctgtaattccagcactttgggaggctgaggcgggtggatcacgaggtcaggagatcgaggccatcctggctaacacggtgaaaccccatctctactaaaaataaatagaaaaaaaacattagccgggcctggtggcgggcacctgtagtcccagctacttgggaggctgaggccggggaatggcgtgaacccgggaggcggagcttgcagtgagctgagattgcgccactgcactccagccggggcgacagagtgagactctacctcaaaaaaaaaaaaaaaaaaaaatgtccctggaagacagaccttgtgacccatccaggtttgggaaccgttgccaggagggcagggaatggctctagtttgattcctgtgttagctgcagacgctgtaggtgtgttgacaagtactgtttgatgattatcttgtcacgcctgccgctctgaggtctcccgggtcccaggtcatcaagaagagtcttaaccgctctgaagtctcctgggtcccaggtcatcaagaagggtctaagccctcttttaccatctgttttctgtttcaggtctggagttcccctggggaccgaaacccttcagggaagtcattgcagggcccttgcttagaaacaatgggcagtctctggagagcagcagcctggaggggtctcacgtgggcgtctatttctccgcacattgggtgagtgtttggaccccctttggctcagacagaaggaagcagtgatgttcccagcaggcccagctgtggttggcttctgggg

SEQ ID NO: 16881 - DNA, 2300 bp, Homo sapien
gtgccactgcactccagcctgggtgacagagcgagattctgtttaaaaaaaaccaaaaaacaaaaaaaactggatgtgcaggattgttcttgttgtgaggtcccgggctggttttgtaagccccccggaaaggtggggctgggaaaaacatgcagattgaaagcagggcccacccagattgaagtggggtcccacagcccttcctgccaagatacaggtctccacagacagggaagcccagcattgtgtggcagatcccctgccctgcccctcaccgcttcggatggaactcgggacaatcctcatcccaccaccaatgccctcttccctctgctgctgcccttctcatgcctgcttggctgccacacatccttgccctgttctgcccaagggcgtagccttcctgccgggaccctcaagcccccagcagggaggctcagagccgaacggcctaaacagtggggcactctgcagcttccctgcttctgtcttttctggaggaacacagcccaacaatgcatttattttatttatttatttttttgagacggagtctcactctgtcacccaggctggagtgcagtggtgtgatcctggctcaccgcaagccccgcctcccgggttcacgccattctcctgcctcagcctcccgagtagctgggactacaggcgcccgccaccacgcccggctaattttttgtaatttttagtagagaaggggtttcaccgtgttagccaggatggtctcgatctcctggcctcgtgatccacccgcctcagcctcccaaagtgctgggattacaggtgtgagccaccgcacccggccacgtccagctaattttttgtatttttagtagagacggggtttcaccgtgttggccaggatggtctcgatctcctgacctcatgatccacccacctcggcctcccaaagtgctgggattacagatgtgagccaccacgcccagctaatttttgtattttaagtagagacggggttccaccatgttgcccaggctggtcttgaactcctgacctcaggtgatcctcccaaagcgctgggatcacaggtgtgagccaccgtgcccggccccgacattgcatttaattatgtggctttttgggcttggcggggaggttcgagagcacccagtcacctgcccatatggcgttcaccccgacggcagtgaacgaacacaggaggcttcaccccgatggcgaacagaggccgcccacgcttggcttccagccctgggctttgcattgacattttgtcagctttattcctcttagaccctggacctctgaccgtgtgcacagccaacctcaagaatctgacagtagactgaagcgtgttttacgcggcaccgagagccgagggttggggctggccctgggcattgcttccctggtgctttgtgggctgaacgtaacgacgactgtgatatttcaagtgcagggacctggtgaagggctgagggacctggtgaagggctgagggggcagatgttaactccgtggccttctgtcagaaaacccgtctcttctcccttgaggggaaggggccgtggagagcggctgctgttgcctgctgccagggtggcgaggctctcgtgaaaaccttcccttccttccttaaccacctggtggtctgattgtgttctgaagatgtggaatccatcttcatctttgtgatttttagagacgtggaagggtagtactctccaggatgagtgtggtcctccatcagcctccgcctctgagtcccctatgctgttgcagactatgggggccagtggggtcatcagcctccacctccaagtcccccacactgtcgcagaccccggggggcagtgggaccatcacctccctcctcggagccccccgcactgtcacagaccccggggggcagtgggattgtagttaacgtgcccctttgcccagcagccctgcttggcatccattattcttttctgtgtgcttgaatgcttgcctgttcatccagcctccagacctaaggggctcaaaagaactctgcaatgaatctggtttggacttaaccaccttcttttgcttttcttcatacagctcaaactttggaacaaataccgaatttccaacattccatcactaatattcctcgacgccaccactgggaaggttgtgtgcaggaacgggctgctggtgatccgagatgacccagaaggtaaaacctcagcccgtgcatatggtcctcttattacccagccctccctcctccatgcccttaggctaatctccgtcccaccggtggagagagt

SEQ ID NO: 16882 - DNA, 2300 bp, Homo sapien
ggcatagccgacctgctttaattgttgcaataacagcattgtattctattgaatatatagagcgtaatttacttgcccactgcctgataaatggatatttcactccttccttctccttttgctgtagcaaataatactatgataaacattgtcgcacacacttttttttctttttttttgagatagagtcttgctctgtcgcccaggctggagtgcaatgccgcgatcttagctcactgcaacctccacctcccgggttcaagcgattctcctgcctcagcctcctgagtagctgggattacaggcatgtgctaccacgctcggctaattttgtatttttagtagagatggggtttctccatgttggtcaggctggtctcgaactcctgacctcaagtgatctgcccacctcggcctcccaaagtgctgggattacaggcgtgagccactgcgcccagcaacattgttgcacatctatctctgcacacttcacacatgcatatctgtgaattggaattgctaagccaaagaataatggacattattgacttctgtagacattgccaaggtccttcttggaggggagagactgtcattgctttatagaaaatgtgtaactcggccgggcgtggtggctcatgcctgtaataccagcactgtgggaggccgaggtgggcggatcacctgaggtcatgagttcgagaccagcctgaccaacatggagaaactccgtctctcctaaaaatacaaaatcagccgggcgtggtggtgcatgcctgtaatcccagctatgcaggaggctgaggcaggagaatcacttgaatccaggaggcagaggttgcggtgagccaagatcgtgccattgcactccagcctgggtgacagagggagactctgtctcaaaaaaaaaagtgtaactccagcttttgtcagccagcctgtaataccaatagtttcccttgcccagaaaacattgctacctaatacagaggatatcacccaatgcgcttccactgaaggagcacagggaggggagatggacaatatcgagcgagaaagatgacttctgggagttgtgcttttctcctctgttcaatcagtgtggacgagatgatctgtttagtcccatctcctgattttacataaaccaggcgtggttctagttccgagatccaggagcctgactgccaggacagcttaagcaggaggtaaattctagaatctgccctttagtttctggattctttatcttttcatccgtgttgaatgagagagaagggttcagggcatctggcccttccttgggcagcagactgacagaacaccgcctgggttgcctccgttttcaggagatttgcagcagcttccttaactttacccacctctgcccctttaatgccaaacacattccttagaggtccgttaattagaggagcctcagagtgagcagtggggtcatgatggtttctcttataatcaggttggaaaggatctcagggtgagtctggtaaaaagccttctgaaatgttagaccagagaattatctggagagggaggaaatgcagggcaagttcctgcaaagcctcacactcatgttggtctcaccgatgtttatcagggagaaacagcctgtactcccagggcagccgtttgaacgggcagagcccactttgttcctcgattctgtttctttccatgcaatccgccctcctgacctaataccgttgaggctggtgtcttgtcccatgggacatggaactagggaacacagatggatctaagctagcactcccctacgttttggcaaatttaagaatcaacactctgaagaaccgtggttttgattccctgagaaggaaatggattaagacttactctccctactccgaactttttatcttgggaaatttcagacctacagaaaagttgaagacaagtaccatgaatgcccatcctgtgcccttcaccggaaccgagcaacggcagacgcgtcccttcaccggaaccgagcaacggtgaacgtgccccttcaccggaagtgagcaacggtaaacgtgccccttcaccggaaccgagcaacggtaactgtgccccttcaccggaaccgagcaatggcagacgtgtcccttcaccggaacccagcaacggtaactgtgtcctttcaccgaaactgagcaatggttaacgtgtttcctcactcagttcccaggcattgctgctgctgatctggggaacacactgtatgagcctgacataaacctctacagagctctgtgtaagcagtgggtatgttttttccc

SEQ ID NO: 16883 - DNA, 2300 bp, Homo sapien
ggcgcctgtagtcccagctactcgggaggctgaggcaggagaattgcttgaacccgggaggcggaggttacagtgagccgagactgtgccgctgcactccagcctgggccacagagcgagactccgtctcaaaaataaaaaataaagagaaatacttgctgcccaccatcctccatgcacttgcctggcatgttgatgacggaggcaacccttgtgagaattctcctctgcggagccctttttagaaaatcctaccccattttagaaaaatccattatgtacccagttttctcttctcggtgtgtttcacagttcgtaggtgttccacggtttgttattgttggtttttaaatcttccctcagtgtggcccctgcttgaaagaaaacactgaccccgttggccacgatttaacaatttttgacctctgcccaagtttttctggatttttctaccggtttaatttccaagagtgagggatacaaactcactggaatcccaaaacaaagcttggtgtttttgaggtggagatgaggaaggagtttcttcccctttctggttttctccgccctcctcctaccggctggcttgctggccaaggaactttttcagaactgaatgatttgccagagatgagaggaaaaaagggctggtccttcagagctatttgccacaaataaacaaacagaatctaccttacatttgcccctttgccatctgctcagctgagagggagccccacgcttggtgaacacagcgcagggcctttgcagccgactgggaaaacagctccagttggaggcagtcctcggacgggggtacggacctgcggaaaccttcagctttgaagtcagagaagcgtatttgatcttggagtttggggccaatatggacgagacaggaacacaaatcacctggattggaagctctcattatggaagcttaataaacaggctgcgtagctggtattttttatttttttatttttttctgagatggagtttcgctcttgttttccaggctggagtgcagtggcgccatctcggctcactgcaacctctgcctcctgggttcaagcaattctcctgtctcagcctcccgagtagctgggattacaggcacccgtcaccacacccagctaatattttgtatttttagtagagacggggtttcgtcatgttggccaggctggtctcgaacccctgacctcaggtgatccacccaccttggcctcccaaagtgctgggattacaggcgtgagccaccgtgcccggccaaatattgttattttttttttaggagaaggattgtcgagttaaacaacttttaaaaaacattattttaagaattgtggtagaatatacataacataatttactgtcttcaccatttttttttccttttttagagacggagtcatactctgtcactcaggctggagtgcagtggcgcgatctcggctccctgcaacctccgcctcctgggttcaagcagttctcctgtctcagccccccgagtcgtagctgggattacaggcgtgcatcaccaagcccggttaatttttatatttttagtacagacggggtttcaccatgttggccaggctggttttgaactcctggcctcaagtgatccgcctgcctcagcctcccaaactgctgggattacaggcgtgagccactgtgcccagcccggtaatattcttttgaagaaagatatgatttaatgaccagatgttacttttttttgggatctcaaggctgggcagagtaacttagaaagttacggcacgtggggaacagacgtgcttgaggtcatcactcggggcctctctgggccttccctctgtgaccttagaaccctctggccagtcgacctccgtggagcctcctttccctgttggtgacctttctctggaggtcctcgaacctgggtagttcatacagagctgggagtcggtggttcgctgggtaacttcatgcaggacaagcacctcagttgacagatttaaagttcacaaacattttagtcgagagagagaatgatgatgcctgcgcaggggctaacattaatatttaccttaagaaaccgacggttattttaaaacgatgaagtatgttggtgcagggaagggaggagggtctagtgccgggccaccccactgtaaatccagggaggtgtttggtgaattcatggctgcaccctggaatcttgttcactgtaaatccaggaaggtgtgatgtgagttcatggctgcaccctggaatcttgttcactgtaaatccaggaaggtgtgatgtga

SEQ ID NO: 16884 - DNA, 2300 bp, Homo sapien
tcttattttatattttattacactggaacggcttgtgtcctcggtctcttgcctcagcgcctgggtggcctgccgcccacactgtctcaaaataaataaataaataaataaataaataaataaagttttcactaaaaagtgatgctttctgtgtgtgttttataatattgtccctacagtggcacagactttcagcatgaaagtctcctgagaattaaggtggaattcgactttgcagtaggattctagggtgttcgaaggcggtcctccatctaagatcttacctgtgtcattagcaataccagcaggtgactaaggaagtggatataacttgtagagacgccagtccactttccgctcccatctccacctctcccaattgttttatatggtaacatttcaccaagctggaaccctgcaccattccttattctaccctagaaaaacggagaaccttcgatgtgaacacttacgttttgtgccaaaagcttgaagttctattctgaggtttaaattagctcccgcaaagcgtcctatcatttgtgtatgtggaaagctgctgtaaaataaaagcattgtgcctggtgtcccggcagtgtcttttcacaaatggagtttggtcggcctcatttttcactctttccattaggtggcgatggatgcacaggaaatatcctccgaagcggcggtggaagctctgagaggggcgggttttcagcttttatttttttgctttcgctgagtcgtcagtagctgatccacaccggcggcctgttactgtggctgggcccggatctgcacctgcttcgtgcaccagtgggttgggttggggggaggcgctgcgtggccagagtactcgccacggaccacctgtttttttgttttttttgagacggagtcttgctctgttgcccaggctggagtgcaatggagcgatctcggctcactgcagcctccgtctcccggcttcacgccattctcctacctcagcctcctgagttgctcggattacaggtgcctgccactacaccccgctaatttttgtatttttagtagaggcggggggggggtgtcaccatattggccaggctggtctcgaactcctgaccttgtgatccacccacctcggcctcccaaagtgctgggaattcaggcgtgagccaccgcgcccggcccagaccacctgtttaatccagcttctccctaagcattggggagcatcctgccagctggtaggaaaaaaaaaatctctagaaatgttctcaactatccatagacttgacatgaggatggagcggattcaggagcgcggccagcattggtctggaggccccgcggcgtcctttgcatccatttgtggggctggaagacagattcgctggggggagaggccccggcgacccctggacggaaatcccacactgagacctggcaccctaaccagaccccaccagaagctgcgagggcgtcctcggcccccttagaacagcttggaacacacagaggagtcagtgtccagccaggcccggcctgatgcagtgaggacggcgggtcctataagcatctcagggtcagtggggcccggagcggcctaagggtcaggcttcgtgcagggagaggaggagggaaaggccggggaggaacaggaagagggtgaagagctccgcggggagggggcgggatccctggaggtctggagggaatttagaactggggaggagagaaaatgcgggccgggctgcagcccgggaaagcgccggctcagcgggcccttctcctttcttcacttcggccgtgggctttccagggagagtgcggcgtttcgggtccggcttctcgcccaagcagtcaccccgcgcaccgcggccggcagctgcggaccccgcctgggcggagagctctggccaccgccggccgcaaacggggcgtggcgagggcggagggggcgtggcgagggcgggcggaggggcgtggcgagggcagccgaaggggcgtggcgcgggccgcggagggggcgtggcagggcgggggaaggggcgtggcgcgggcaggcggagggggcgtggcgtgggcggccctactgggccgggctctgctctccccagcgcctgccgccgacgccgccgcctcctcccgccgcgcggaccgtggagcggggtcgcagccgcctgcccgccctgcggtgggccaggatgtcgggcttcctggaggagctgctcggcgagaagctggtgacgggcggcggcgaggaggtggacgtgcactcgctgggcgcccgcggcatctcgctgctgggtctc

SEQ ID NO: 16885 - DNA, 2300 bp, Homo sapien
ccatgctggagtgcagtggcacgatcatgactcactgcagtctcaacttcccagactcaagcaattttcctgcctcagcctcccaaagtgctgggattacaggtgtgagccaccatgcccagcagaggaatcttttccgatcaacatcttctgagagtccctggcccaagtaggcagatgcttgctacggcactgccttcaggccattagcaaaaagtgtgcttaaatgcccagaggtgttcccaggccacgttttgttcatacgaggagtacaaaatgatgccaaagtgttagcattcttgggactgaaaacctctctccaacatcccctaggattttcctggatatgaccagaaatccattcccaatttctctgcctccaggccccaattctggtttcctcaaagaggaggaagtgttcttggttcccaaaatatgcttgcagtgcagtggtataatggtaaatgtttaacaacaataacaaaaaggccctaactggccgggcgcagtgactcacgcctggaatccaagcactttgggaggccgaggtgggtgggtcacctgaggtcaggagtttgagaccagcctggccaacatggtgaaaccttgtctctactaaaaatacaaaaattagccgggcatggtggcatgtgcctgtaatcccagctagtcgggaggctgaggcaggagaatcgctcaaacccgggaggtgcaggttgcagtgagcggagattgcaccactgcactccaacctgggtgacagagcaagactctgtctcaaaagagtaattttaaaaagtaaggcaacaaattatcaggagtttttgagctggttgttaagcacagttattattaaaaattacattctatacatttataataaattacactaaaaataggtaatatgtgctcaaaactcatcccctcctaaaaattttactacactgtactcctatctatgctgttgaggttatttccatagattgtatctgtgtgatagaaacaccatgtaaccacatgctgctgtacgtcttcccaattctgactgatgacctcgcttggtagtttgaaatcagccatgatggggatattaacaccacacaagtcagcaaatgctgtcagttaggatttttttttttttttttttttttttgagacggagtcttgctcttgtcgcccaggctggagtgcgatggtgcgatcttggctcactgcaacctccacctcccgggtttaagagattctcctgtctcagcctcccgagtaactgagattacaggcgcctgccgccacctggctaatttttatatttttagtagagacggggtttcctgcttcagcctcctaagtagctgagaatacaggcgtgcaccaccatgcccagctaatttttttattttttatttttttaatttttagtagagatggggtttcaccatgtttgtcagactggtctcgaactcctgacctcgtgatccaccggcctcggcctcccacagtgctggatgacaggcgtgagcccccgcgcccggtccgtgcatttacagcacaagttcacgcttatctacaaagcatccacctctcaccgcaccttccgggaccacgggatttaacgcctcaccgcccgatgacagcacgaggtggaaagggcagcgacaatgctcgcgcgtcccctcccggcgatccggagcacggcagccccggagcgcgcggccactcctcgctcccctcaggagctcgtaagagccccgcgcggggccgaggcgcgagagcacgcgcaacgcttcctgggaaatgtagttgggtgtcggattagaactacaaatcccggtactcaccgcgctgcagccccgaccgtgagggcgctttctggtgaatctgaatctcgtttgtctgtgacatggggaaagctgtccaagcccaattccattttcacaagaggctttctttttggaaacatgatagcggtctcgctggtgtgcgcaccaggagcgttgcggccgcggcttcctcctgcggcgaatctgccgttgcatcacagtggctagtctcagggcccgcaacgtgacgcttgtcgaatctgctgcggggagaaggacgcgagggttgcttgggcagcgactgtcatggcggcggccgcccccaatgccggaggctcggcccctgagacagcgggttccgccgaagctccgctgcagtacagcctgctcctgcagtacctggtgggtgacaagcgtcagccccggctcctggagcctgggagcctgggcgggatcccaagtccagccaagagtgaggag

SEQ ID NO: 16886 - DNA, 2300 bp, Homo sapien
tatttttttttttttagtagagacggggtttcaccgtgttagccaggatggtctcgatctcctgacctcgtgatccgcctccctcggcctcccaaagtgctgggattacaggcatgagccaccgtgcctggcctgttttcttaatattgaattttgagagttttatataataagccctgaaattgggtaatattagccctatagctgtgttctttttcaacattgtttagatgttttttctttttttttgagacggagtctcgctctgtcgcccaggctggagtgcagtggcgcgatctcggctcactgcaagctctgcctcccgggttcacgctattctcctgcctcagcctcccaagtagctgggactacaggcgcccgccaccacgcccggctaattttttgtatttttagtagagacggggtttcaccgtgttagccaggatggtctcgatctcctgagctcgtgatctgcctgccttggcctctcaaagtgctgggattacaggcgtgagccgccacgcctggcctcgtgtagtttttaaatggatgagtgtgggtatcacgtcgctggggtatttagatcccactgaatccatgagaaggaatgatgtcacacttttattttaggatggcaatattgacatgattttggaaatcatactctttgcaactatttaaacttggaaatgttcagattttgacttcagaaagtgccagggagcgcacagttgctcagaattagttcgcaggtgcacaggcagacgggcgcgaaggcccccgagttacagaaacagaacgtggaacagtcctgtgtgagggttgcctctgacctcccctggggtccgcacctccctgggctccagcccgagcctggggacttcccctgtggaggatttgcttatttgggagccaatggcttgacccaagttttctccctgaatcttcccagcaatcccagggaggcaggttctgttgcagatggaataactgaggcttagtgagtttaaaacttgccaggattcaaacccaggcagcctcctgtgcgcgggctcctgactcttcaacacctccacgtggatgggctggttccctcctgatggacttgagcgcctcctaatcaggtgcttaccttttgtgagcctcagtttctgcatctgtgaaatggggtaataatacccatgtcccgggctggcagccaggagtgcctaacagggtgtgccctgcctcccccacggtgggtaacagagtgtgccctgcctcccccacggcgggtaacagggtgtgccctgcctcccccacggcgggtaacagggtgtgccctgcctcccccacggcggccacaggggcctgggggctagggtccccccaaagggttgatttccaggtaaacatcagcttatcccagctgctcacttccgccttcctgactgtgtagctggctctgagcagtgctgacccacggggagatctctggcttggcctccgagctggcacctctctcacccacattctctctctgcagctggacccacaaaccgtggagaccaagaactggcacacggacgtgattgagatgaacggggtgagccggggatgggaatgatcagtggcgtgagccgggaggtggaacgtctgtgcagcaggtgggcagcccggccctgtggctgctcctggggccgctgtgccgcctcgacctccccgcagcccagccccctctcccctcctgcccacaccctgcccgctgctgtcctgcaggtgttgtgttgagggagacctgggtgtgagctagccctcatttgcagtcttggggaggggacccctgtgttttgggggcattcctcgggcactcacaccctggggaatctttacctgcctcaccccccaaccagatcaaagtggaattttccatgaaattcaccagccgagatatgagcctgaagaggaccccgtccaaaaagcagaccggcgtcttcggtgtgaagatcagcgtggtgacgaagtaggtgctgcctcgggtctcccagtcctggcgtcggtgccccgggtcccccccagcccgggccccccagccctccccgccggtgcccatcctggcacctaatcagttaccccccgctcggcggtggcagatggccggtgtggatctagagtggccgcagaggcgctcacaggacacttcagaagcacgcgagccagcacctaaacgctggaaggtctcttgtgagatcccagatcgtctgctcctcgtaacaagcgggaagctctgtcagccgggggcctacgtttgggctcggcac

SEQ ID NO: 16887 - DNA, 2300 bp, Homo sapien
gacttccaagggcacctcatgtcctcttgagtggaggaaggaacacagcaggggcctgtggggttttaggcccttcttcgtgtcacctgcaggtctgactcatgtgggcagcccatgccatgcacttggagcccgccgggcgggagacagaagaacccgtggtaccaggccctgagctggcatacttgtgccctggggaatgccaggcctggtcgttcccaagccctcgccacagcctcacccgcccgcaccaaatgaggaattgtggctgaaagggcccttcagatgcgccctggctatttataacccacccaggcagggacaggggaaaaccaggggctggaaggagatgggtggggtgggggtgtgcctctgttgaaccctggtggcacagttccctgatcaaaggctgttagccctggggcccctcaagggctcaccccgcaatcccctgctctgtatttcagctctgcaacaggatggagcctctctccagggagggcagcttctctgctgccaatggaattgcatgagccccacctagagcccagagcttctgaagaattctggggggagtggggggctgtggcctgaactcgggccacaggtgtggttcatttagacggcaccatgttgttttaaaatgttaattatttgccatcgttttaaaatcaggagcattcctgttaataagccagattttagcttattttgaacagagatcaggcagccatgagcttgcgtttcctccagcagccatcggctggagtgagtggtggtttcaccctgccctacctggctcgcttcaccggctggcctcacccgcaggcctcacccgcaccctcatgggtgccgtttgcaacctttgctccatcgttgggttgtaaaagagcttttcccagggcctcctctggactcctcctcccatggaaggaggtgtatgtgcatctgggaactagggccagggggaccagaatgtggcctcactccctgcacagttgggggttctgcaaccattggagaagccaggggaagctggctgggagtgggcagggccggagatggtgcctgtcctgggttctgtgtgcactccccttgcaggatggctccctgcggtggggtggctgggggggctgcttggaggaggtgggggtgctggtctcagcagtgcctgtgagtaggtgggaggctgctcagaggaggtgggggtcctggtctctgcagcgcctgtgagtaggggggctggtctgtgagtgggggggctgctcagaggaggtgggggtgctggtgtcagtagcgtccgtgagtggggggactgctcggaggaggggggctgcttggaggagggggatcctggtccctgtgagtgggacgcccaccgctcctgtgcaggacagtggtggcgccgcgctcctgcctgggggcaggtcaggcctgtctgttgcaaagcctgactcctccagcggcggcgggacgcggctgtggcttctgggcgggccggggcctcccctccggaagggggctccggcgcatggggactccggggtggctctgggggtcgcccctgctcgccgggctcctggctcggccgcgcgcggggaatgaagatgcgtctgggaagcggcctccccgctccaccccaccccggcccggccgcggcctcctcgctcctcctccgccgcagaagcctccgccagccgcggccccgcaaccccagaggacgggcggctccacctcgcgacgcgcgtttcctgtgtgttcggagcgagcgcgagcccgagccccggagcccgggaagggcgggccctgcggggccgggcgggacacggaggagggcgctgggctgctgtgcggcgggttcgcctccgccacgggccgggcacggcgtcaggggctgcccgggccttgctccccctttcgccgggcgaggacgcgcgaggcggcggcggcggcggcggagcgggctggactaggtccgggatgcagtcccgggtcgggagccccaggccgggcgcgcgggtgtagacctgccccccctcccgcccgcctcctccctcctccctcctcccgccgccgctgcgtggaccccgcttcctgtctgccctccgcgggctccggctgccatggaggaggaagaggaggcgataggcttgctggacaaggttctggaggacgaagatgtgtttctcctggaggagtgcgagctgggaaccccgaccagccccggctcagggtcccccttcctggtggctgtgaaggtgggagcgtgacacgccctgggcgctggggggggccgggcc

SEQ ID NO: 16888 - DNA, 2300 bp, Homo sapien
gtgactcacgcagaagcatacatccatagctccctcacagtcagcgccggatgtggccatcaggaaaaccccacagtgtggggagagggcccgagcgttcttgcttgttgttgttttgaggaggggacggtgctgctgcctcctgggctggtggctcctggtggcggcagctcacgcccgtttccacctttcccctgggctgtcttccgagagttccaggtgggaagaagagatgcccttggcccctcatggctcctccggcctcgcggtcctccgagagcctgctcgttcccttcccatgccgaagctctatttctggagcgtctcattggagatgcacgccccctccctgccaagctccaggtgcctgcttggccctcccaatcctgtgtgctagtcagggacggtgggagggtgacagctgcagggaggggcggcaagagacagcgctggtgcctgagccaggaggattggggcggagggagccctggggacgcagggacgggctaataatattgaaaaccacttctgctgcagccacctgtagaggcttccccacccagagcatcatcctgtgcgtctcccaggggctccccagcctgtgatgagtgggtgacccccatctcccctggggcagctgcagaggcctctgcccaagcagcttatggggcttcctctcagcatcctgggggaggagctgcttctccccttaagaactagatgtgtgtgtgtctgtttggagtgatgaggaccgacccccacacccctccagcgttctgcgggtgccgaccacactgcccccggcaaaggccaggctgacttaaccttcctggtaggcctctgtagggctgggctcccagaagttttccccttaagctgcctggggatggggtggggtggagacagctccggtatctgaaatgtcactatctggggtaccgggccccctgggtgggccccactgcttccctttccctgggttcaggaaggggcttcagccccactgccctggacccccctggcctgactcccctcctgtccttccctgctccagggtcgcttggcccaaagaggtctgtggggaagctgccatggctcccacagaatcagcccacaggagacaggcatggggcccccaatctcttcactgcccttgggcgagggggtcttccttagagggaatttcgtctctaaacggtcatttctcaggcctcttgacccgacttcccaccatttctaggtgatgatgcaaacacgatgggctttccaggccgcggctcggggtccccaggaggggtcctggaggggaacgcgtggagcccttggggcttctcctggctccagtttgtcctccgcccaggaggggcacatgtgggactgtcctggccccacagcccccgtgacttcggtcctcccgggtctccacccgcccccctccatgtgtggcgggaacggccgcgctcagaggtcaggggtgtggaaagggacgagcgggggaaggttcgggaggagagaggcgcgtcccgcggcgcgcaggacgttcaccccgtgggtcccgcagcgggtctggctggggaggggcccggccgccgctcccgcccgcgaagccgcgcttggagatcccgggcgggaggtgatgtcacccctgtgggctcccgggccccccacggcacctggtttgcggatcgccaggatcctgctgagcccggcgcgggggggacgagggggacctgggtctgcgccgccgcctggagaccccccgagacccccgcggcccctcctcgcccagcgccggagccccgctgcccccttagcccggccgggggcgtcctgcggagggcggagcctcgagccgattggtccctccccgccccgcccccgcaccaaagccccgcccccgcaccaaagccccgccccaccacgaagccccacccccgccccgccccccgcgaagttgctcatcggttccgggatccgcagctgggctcggcgcggccgctggggccgggagggttcgggagggttttgggggctcccgccccgccctcgcccctgccccggccgccccgcgctcctcccggggacctggttcccggcctcctcgcccctccgcgctcgcaacttcggcctcccccggctcccgcccgctctccctcctttgttgcgcgatgagggtcgggtttcggatctgaccgagccgccgccgcgggatggagccgctcagccaccggggcctgccgcgcctgtcctggatcgacaccctctacagcagtacgtgtgccgggcgggggcgggacccc

SEQ ID NO: 16889 - DNA, 2300 bp, Homo sapien
gcttcaactcggcccctgggaagtgtgtgggggcgtgtggggagtgtcacagctgcaaggacctgatgtcactgtgctttatcctgcagtgatgcctagggaggcagtgagggggtgaatgcagctccccggggagcaggtccacatcttgccagggcagcaggtcttcccatgactcaagctgacacaaaagtttggtgcagaaatgactaactgggaagggcttccagttcacctctgttgcctgtagatctcactggctgctggaaaagccgggaggctgagcagagggcaggtgagaagagggcaaaagacagactcataggctgagacttcacccttacaggtgacactgtggaggcctggggaattttcttctttccccagactggagggctgaggatgaatcttagaatagtaaatgctggccgcacatggtggctcacgcctgtaatcccagcactttgggaggtggaggcgggcggatcacctgaggttgggagttcgagaccagcctggccaacatggcgaaaccccatttctactaaaaatacaaaaaattggccaggtgtggtggcgggctcctgtaatcctagctactcgggaggctgaggcaggagaatcgcttgaacccaggaggcagaggttgcagtgagccgagatcctgccactgcactccagccaggcaataagagtgaaactccatctcaaaagaaagaaaaaaaagaatagtaaatgctgctttactgtaccaaggaaatgggaatagagcaaagcacggaaaacaggccaccccaggatctgacaggagagtttgtattctgctagtgctcataggaggcctggaggtcgtcttcttgatccacctgggcacataccttcttttttttttttttttttttttttttatttctttctgagacggagtctcactctgtcacccaggctggagtgcagtggcacgatctcggctcactgcaacctccacctcccaggttcaagcgattctcctgcctcagtctcccgagtagctgggattacaggtgcccgccaccacgcccagctaatttttgtatttttagtagagacggggtttcaccatgttggccaggctggtctcgaactcctgacctcaggtgacccgctggcctcggcctcccaaagtgctgggattacaggcgtgagccactgtgcctggccctgggcgcatactgtctacagatgtgaacactgaggctggaaactcttgagattggccggaggcattgaagaagtggggtttggccgggactggcatttgggagattgtcactggactttgttcagcttgtctccagggtcatctggcctgctgtagtagatatggttttcttgggataccagttctctttctactttatcatcagtggccctgggagggttctgaaataacgctgcctgcctccctcgtgtagctccgatttcttcctccctgagtttaacttcattctgtttattcattcattcactaattgccgctcaatgcagagattacacacgggaaccctggattcagacttggttcatttccaagcatcgccatctgctagttagccaatggcttagcctctctgcacctcaatttcttcttctgtgaaatggagataatagtaaattggcttattgtaaggattacgtgaaataacctacgtaaagcagatagagcagtgcctgacacttaagaagcactcagtagaccaggcacggtggctcacatctataatcccagcactttgggagggtgaggcaggaggatcagcttgaacccaggagttcaaggctgcagtgagctgtgagaatgcccactgcactccagactgggtgacagagcaagactctgtctcaaaaaaaaaaaagcactcaataactgttagctgtcattaattttatttgttcaatgtgcattattgaatgccgatctgctgggcgctcggcagaaagctgatctggaggcaccatgtggtcatagctgtgctgggagtctacctgagccttgttcacccactgcgctgagcactgggtctgcccagtgaggaagatgcagtcctggtttttttattttttatttttgagacggagtcttgctctgtccccaggctggagtgcagtggcgtgatctcagctcactgcaagctccacctcccaggttcacaccattctctcgcctcagcctcccgagtagctgggactacaggcgcccgccaccatgcccagctaatgttttgtatatttagtagggacggggtttccccgtgttagcc

SEQ ID NO: 16890 - DNA, 2300 bp, Homo sapien
agccgagattgcaccattgcactccagcctgggggacaagaacgagactctgtctaaaaaaaaaaaaaaaaaggaagccatagacaggtcttagtaagagaggaatgacatgctacatgtgttttaggatgtcttagagcaagccttcagttgctgttagacactgggaaactctttcctctaattgatcttcatatctttgatgtcagtctcgtgagcctgggactgctccaaccaacggacccagccaaaacgtggccactgtggccggagtctcacccttcttcactctcctttcgggagaacacgagtcatgtgtgctagtttctcgtgccagctcctggcaccggactgtgtgttcatgagactgagctgaccagctcaggacaaggtgccaagagcttggggaagaggaaattaggagtcacgaggtttcacgatcagaacccgaaagtgctttatggaaaatttgcatgtcctgggtgcagctcagcctaagagaagctggtgcagtgatttcaggggtgtgtgtgcctggcttctgggaggggcagccagaggcaccggcttcccttgtgaaggcagctgggtcagactgccccctccatccacccctacgtttatgaaggcgaaatttagtaggaaggacatccaaagcagtgtgatggggaaagaggaccagctgggggtgagatgggaactcgccatccgccatcctgttttccccaaccaggtagagttctcaacgctcttggcacttacaacagatgttctgtagggcaagtcctgtaggacattttaagatttctggcttctgcctactgaaggctagtagcgacccctagttattgtgacctctttttttttttttttgagacggagtctccctctgtcacccaggctggagtacagtggtgcgatcttggttcactgcaagctccgcctcccaggttcaagcgattctcctgcctcagcctcctgagtagctgggactacaggcgcccgccaccatgcccagatgattttttgtatttttagtagagacggagtttcaccgtgttagccaggatggtctcaaattcctgacctagtgatctgcccgcctcggcctcccaaagtgctgggattacaggcataagccactgcagctggcctattgtgacctctttaaatgctcccacacattgttatttttatttacttatttgtttttttgagacagggtctcgctctgtctcccaggctggggtgttagtggtacgatctcagttcactgcagcctcgatctcaagtgattttccggcttcagcctcttgagtagctgggactacagatgcccgccaccatgtccggctaattttgtgtttttaatagagacagggtttcaccacatgagccaggctggtctggaactcctgacctcaagtgatccgcctgccttggcctcccaaagtgctgggattacaggtgtgagcctctgtgcccggcccaatttgataatattttatttatttatttatttattttgagagggagcctcactctgtcgcacccagattggagtgcggtggcatgatctcggctcactgcaacctccgccacccaggttcaagtgattctcctgcctcagcctcccgagtagctgggattacaggcacccaccaccatgcccggctactttttgtatttttttaaagtagagatggggttacaccatattggccaggctggtctcgaactcctgacctcagctgatccgcccacactggcctcccaaagtgctgggattacaggtgtgagctgccacacccggcccatttgaggatattttagtgaaggttttgtccggcgggatgatcattctccccatgtcactcctgggggcttctgctctctccttcccagacggagctcctcctgactcccccagctgtgttcccaacagcagcctgcagccctgtgtccaagctggagatttttgtccaggcacttgcgggccgcttggctggaagcctctggtggccgaggtgctgctgtgcggccgccagatggcgctggggagcccccactctctgccgcaggacgggcagaggcaggactggactgcagagggaacttgccttgaagaggcctggtccttaaagagacacagcacacacggcccgaccggcagccccagagcagaggctccactgatggcaggcgcccctggctaggctctgaggttcctttgccctcgccttgctgaatggtgagccgctgcctctcggagcccgtctccttgacagcctgccctcggc

SEQ ID NO: 16891 - DNA, 2300 bp, Homo sapien
ttatcgtatttctggacgctcataagcaggggagcccagctcgctcccaggccccacacctggcctccctgaggactgagaggaggacgaggcggctccccaaggtcttcattttgcaaataacaatgggtttcctttattgagcacaattctctctctctctctcttttatttttttgagaggagtctcactctgtcacccaggctggagtgtagtggcatgatctccactcactgcaacctctgcctcccgggttcaagcaattctcctgcctcagcctcctgagtagctgggattacaggcatgtgccaccacacccagctaatttttgtatttctagtagagacggggtttcaccacattggtcaggatggtctcaatctcctgacctcgtgatctgcccaccttggcctcccaaagtgctgggattacaggcgtgagccaccatgcccagcctgagcaaaattcttaatttaatatagtcaaatttatgaaacctgcaaagttctcccaaagccacaaacattgttttttatttgtttgtttgtttgtttgtttttagttggagtctcattctgtcacccaggctggagtgcagtggtgcaaccttggctcactgcaacgttcgcttcttcccaggttcaagtgattctcctgcctcagtctccaaagtagctgtggttacaggcacccaccaccacgctaatttttgtatttttagtagagacagggttttgccatgatggccaggctggtctcgaactgctgacctcaagtgatccacctgcctcagcctcccaaagtgctgggattacaggcatgagtcaccgtgcccggctgagttttcaaatcttattcatttccaggtgtcctttcagccccatatctcccactgagctgtgcggcaggatctcggctcactgcagcctggacctcccaggctcaagcgattctcctccctcagcctcccaagtagctgggattacaggcatgtaccaccacgcccatatattttttgtattttttgtagagatgggattttgccatgttgcccaggctggtgtcaaactcctgggctaaagcagtccttctgcctcggcctcccgaagtgctgggtttatgggcatgagccatggcatcccgcctgatcgtaggattttaaactatttcatacaaccactttcaaaccacacacacacatccgtggcggctccagatcacacttgtaaaacaatgtaaggaggggcgtcaggaatatagaaagagatgccgaggatagagaagaaggcagagacagagggagaaaacctaagagagaacaaaggaggagaatccgataggacaaacagcctgaggcccttccgagctggcatctgcccggagcagctgacctaggggctctctgccaccggctctttagcaccccagaatcgttctgatgggcatgaggtggacccaacactcccccttatcctcttccccacctggtggtgagctacgtagaaacctactcatggggccctgctggtccatgcagggtccaggcaggatccaggggctaccctggtgctcacatctccccttcccttctggagtcgggagccaggctttggcctggatgctcccagcggttgggggtcagggtctgggtgggatgtaatagggggccctaaggtccagcatttcccaacagaaagaaagaagtacacgcttgctttggaagaagcagcggagggctcagttcccaggacagctgaagacacatccctgtggggcccaaagtgtctttctccccatccagagaccctgcccagaggagcaggccctggagctgcaacagaaaccggaggctggcccaagtccctctgggctgggctgggctgggctgggcagagctgggctgggctgggctgggctggggcagaggcaaaatcctgccagggtggttctctggggagaggggaattgaaaaggaaaagcatcaccaaggagggggagagggagggaggccgtgtgcgcacacgcacacacacacacacacacacacacacacacacacagcctccctgactgagcctgagcctccctgggaagaggcgcattcttctctctgctctctgagctttccgttgcttccctgcccatctgtgctctcagcagcaccagcaaagttggcctcaaacttgaacaaagctgcaggctccagcgtctttctgggagctccgcgggggcagcaggcaggccccagcctctgaactcagctggcttgagaagctcagcccaacccttccagcaccca

SEQ ID NO: 16892 - DNA, 2300 bp, Homo sapien
cctgtagtttcccaactacttgggaggccaaggtgggattgcttgaactcagtttaaggccagtctgtgcaacgtggcaagatccctccctctccccactttattttttgagacagggtctcgctctgttacccaggctggagtccactggtgcaatcacagttcactgcagcctcaacctcctggactcaggagatcctcctgcttcagcctctgaaactgctaagatatggctcaggcctgtcatcccagcactttgggaggccgaggtgggcagatcacgaggtcaggagatcgaggccaccctggctaacatggtgaaaccccgtctctattaaaaatacaaaaaattggccgggtgtggtggcatgtgcccgtagtctcagctacttgggaggctgaagcaggagaattgcttcaacccgggaggtggaggttgcagtgagccgagatcacgacactgcactccagcctgggcaacagagcgagatgccgactcaaataaaaaaaaaaaaaaacgtttttatagacatggagtctcgctatgttgcccaggctgggctcaagtcatccttccgcatgggcctcccaagcgccagaagctgaagcaatgttcactgagttattcctgcctccacaatctttatttgatcttggtccaactcttctgtaccatgtactccacaccaccctcatctaacaaattccctgctcctattcatagtgggcctagggagggaaaaaggttaaacaggagaagacaaagatcagtgtgaggggaaagttgaggcgtgaaaactggagctcccctgtccctgacaactgtaacagggcccagttcgttttttttctttttctttgttttgagacagagttgtgctcttgttgcccaggctggagtgcaatggtgtgctctcggttcactgcaccctcccactcccgggttcaagcgattctcctgcctcagcctctggagtagctgggattacaggcatgcaccaccacgcccagctaatttttgtatatatatataatttttcttttgaaacacagtctcacactgtcgcctgggctggagtgcaatgggaggatctcggctcactgtaacctccgcctcccgggttcaagagattctcctgcctcagcctcctgagtagctgggatgacaggcatgcaccaccatgccaagctaattttttgtatttttagtagagacggggtttcactatattggccaggctggtctcgaactcctgaccttgtgatcctcccgccttggcctcccaaagtgctgggatgacaggcatgagccgccgcgcccggccagggcccggttcgttaccctgagtctaaaagtgtctgaaaaaggcccatgaccaggcttggccgagaaaactaggacgtgggctgggcgcggtggctcacccctggaatcccagcgctttgggaggccgagggggggcggatcatctgaggtcgggagttcgagaccagcctggccaacatggtgaaaccccatctctattaaaaatacaaaagctgggggtggtggcgggggcctgaaatcccagctactcgagaggctgaggcagcagaatcacttgaacccgggaaggcggacgttgtggtaacccgagatcgcaccactgcactccagcctggggaacaagagggaaactccgtctcaaaaagaaaaaagaaaaaagaaaaaagaaaagaaaaccagggcgcggtagtgacagcctcagatttcgggaaagaagacctgccatgacagaaaccgttacagcctccgtcgttcttttccgcaggtcgggcctcgggccccggtctgacccaggtctctcgctggcttttttcaggagcagtcccggccggccccgcctcagcccttctcgttccccgggggccgctccctttcggcagtcgcagttcccgcctctgggctccggcgcccgctgagccgacagaggagaggcgtctcgtgcgctcgttccagccgcttcgggcgccgagttccaggacccgccccccgcgccagttgccagggagcggttgccatagagctgagcagttgtccgcgtgcgcaggcggaagtcccggattgaggcgccgccatttttgctgcccggacgcggagcgagaggctgagagagtcggagacactatccgcttccatccgtcgcgcagaccctgccggagccgctgccgctatggatgatcgagaggatctggtgtaccaggcgaagctggccgagcaggctgagcgatacgacggtgagttgggggggcaacggggg

SEQ ID NO: 16893 - DNA, 2300 bp, Homo sapien
cagggataatcgcttgaatccgggaggcggagattgcagtgagccgagatcacgccactgcactccagcctgggcaacagagcaggaatccatctaaaaaaaaaaaaaagagagagagagactgtggcccaattttatgctctgagctaaactgggagtttgaacacctgaagactgttaaaagttttacacaaggtagcaacacattcagatttgtatacatatatatatatttttgagacaggatctccctctgtcacccaggctggagtgcagtggcatgatttcggctcactgcaacctccgcctcctgggttcaagcgattctcctgcctcatcctcctgagtagctgggattacaggcgcccgctaacacacctggctaatttttgtatttttagtagagaccgggcttcaccatattggtcagcccggtctcgaacttctgacctcaggtgatctgccagccacagcctcccaaagtgttgggattacaggcatgagccacggcgcccggccagatctgtattttagaaaactcagtgggagttgtttgcagtgcgattaggggcagccagacgaaagagcaccagcgagcacgacactcgtaggaacacagtccagaggcaatcatgagggcagtgagagtaggagatgcccctggctacaatttagtgtttagaattatctgggcaggtgaccccaaagcctcaaaagagaagagaactctgtacttcacgtggcttggtacactctgctccctttgctttgaatgtccttccccgccgagtgcggtggctcacgcctgtaatcccagcactttgggaggccgaggtgggcggatctcaaggtcaggagatcgagaccagcctggctaacacggtgaaaccccatctctactaaaaatacaaaaagttagccgggcgtggtggcgggtgcctgcagtcccagcaactcgggaggctgaggcaggagaatggcgtgaacccgggaggcggagcttgcagtgagccgagatcacgcccaggcactccagcctgggcgacagagcgagactccatctcaaaaaaaaaaaaaaaaaaaaaagaaagaatgtccttccccatttgtcattcagcagtcaacacatgctgcctcctctgggaagccctcctggattactccatagactggctgtgggggctctgctctgtgttcatgtccgtttcccatgatagcgtttgtcagcatttgtcatccttttgtcatccagtttcctggttcctctcactggtctgtgagttcgaggagtgcagggcccagccatgataacctttgcacccgcagtgcaagtggagtgtcaacaacaatgtcctaggtgaatcaatgaaaatgagaacgtcagctggtctgtggagaagctagaggaacgagcagaaacggaccgacgtggccgggcgcgatgtttctcgcctgtaatcccagcactttgggaggccgaggcgggcggatcacctgaggtcaggagattgagaccatcctggccgacatggtgaaacccccgtctctactaaaaatacaaaaaacagccgggcgcggtggctcacgcctgtagtctcagctactcgggaggctgacgcaggagaatcgcttgaacccgggagcagtgagccgagatcgcgccattgcactccagcgtgggcgacagaacaagactccgtctcaaaaagaaaaagaaaaaagaaacagactgatatcgcaggaagcctggccgagaactcaggccccagggccacacgcatcttttctcctccaattctgtctgggagtcgctgcctagaagtcccaggtcgtccaggaaccggggcccagacgagaagcaccgctctgtccgcagcgcaggcgcgcgtctctgcgggaggctgcgaggccccgcccctcgggccctagaccccgcctcccatcccccgcagcccgggcccgggaagggcggcaccgcccatgaatccgcatgcgcagtgcgcgcgcgagggcgccttgcccttctcccaatggcgggccgcgggccccttcccggcagcctccctcgggcagggagcgcgtcatttccggagggggaggcccgcggctgccgccgccatttcgggcgctgctgtgaagctgaaaccggagccggtccgctgggcggcgggcgccgggggccggaggggcgcgcgcggcggcggcaccccagcgtttaggcgcggaggcagccatggcgggcaacttcgactcggaggagcggagtagctggtactgggggaggttgagtcggcaggagg

SEQ ID NO: 16894 - DNA, 2300 bp, Homo sapien
gggtactccgcgcgctcggccagggcacccgttggccgtccctgtccctggggcgcgagctccgtgctgacgaggaaaaccaagatcttcctgggttcgaggctcggaccaggccccggcgcgtgtgggtggacggcgtcccgcacggagaacgctccgcccgccgggcgcgccggccgtatttggacattggttctatttttaactttcccgggactcgagttcgggggttgggggaggaaaatcccgcttcctctgggacccgcaggcctcggtgcccgcccagcgcccaggcccgccgcggagtgtagtcccaggcccggaagtgagttccgggtcggtgtagacgcggcggccgcgcgggttccgggctccaccctggtgccaacggcgtccctcctggaaaacctgactcaggcggagcccgcccccgcccccggcccgcggaccccccgccccgacacccccacctccaccaaccccacctggaggggaccccagcccggccgcgcgggaggcgggggaggccggggaagccccgcgcttcaggggcccgggtgggggcggtgcggggggcgggccctccctcgctgacgccgccgccaccgccgccgagcccgggacccggagcgcgggcagcggagcgggcgccaggccggccgggcaggatgcgctaccgggcgtcggtgagcctgggggcggcggggcagggcggggggtcccgggcgtccctccccacctcgcggcgtcgcctcggcctcgccaggaagcgggcgcggcccaggaattccgggtggaaaaacgtcccgggaagttgcagggggaggaggccgaggcggggagggcggcgcgggacgctcggacccggggccggatgaggagccgccggggacgcctgagaacgcggagacccctgacccgagggcgagggggcggggaccgcggccggatttggcagccgcttcggcgcgggattggagcggggcggtgaggacaagcctgggaggggcaggcccccggccagaaatctgggcctttcgtggtcagaggacaccggcggcccctttgggatccacccccaatcaccaccaccttgttcttctctgaccctggatactctgggtgtccattttttggagccctgagaccctgtttgaagagggatccatctcagccctggttgtggggcgagggtcttgctcagcctgcaccaccctccaccctccagtaggacccagaggcagctgggctttccatggtaaagcccccatcccctgaggcttctcaggactctcagtggaggaggtgcctggggagcccagcagctggaggaaagggagtggccccagccatgcgagggagggcctcccccgcgttctggagtgggtggctgagcccagctggggtgggaggccctctgggggaacccctctggtgtagtctgggagtaacctcttgcttggtgctcgacgctctaccggtggaggtgggggtgggtctgggtgggagagacggccccaccctgcctgcagaattgaccctgagccatttgtcctccaaagcacctgtcacacgtggctcagagctgagggacctgaggtcacctggtctaactcaactcctcctcctttaggaggaaggaaccagagagaggaggggattggtccaagctcaacagagcagtctttctgctatttcaaggagttccttcttgtgaccccccctttctccacccaaaaccagcacctcccgggttctgccctctggtcctgcctgcgtccatgccctgtgtccgagtcccaagtggttcatgttgtctctgttctgtgcccgcagcctcggtgatccctctgctgccacactgggacccgggccctccacacccggctttccgcacccggcccaccacacccaggccctcagcacccaggccccccgcacccgtcatgctcatgtcccgtgtctagcccggagtccacaagcccctacgttccctctcagtcccacaggcgcagggaagtggccttgccccgcccccgatgactctgaccctcttctgtggcccattctctgcaggccctgggcagtgacggggttcgggtgaccatggagagtgcgctcaccgcccgtgaccgggtgggggtgcaggatttcgtgctgctggagaacttcaccagcgaggccgccttcatcgagaacctgcggcggcgatttcgggagaatctcatctacgtgaggcccttgtggggagatggcaggggtgctggggtcacagacacaggcaagcggaggggaaagag

SEQ ID NO: 16895 - DNA, 2300 bp, Homo sapien
tcactcggcagcccttttcccaggagaagacacctctgggagcctgctcagtgcttgtcctgccatcctgtgtcctgggactgagggttactccagttgctctgtgttgcatactctcccccgcaagcctgtgtatgaagaattgtcccctggcttccagcaggccatggctggctgttttgtgactgttacattgtgcaggggtaattattagcgtggcttttacacttgcgtgtgactgatgattggggggtgggggtacggtgatgggcctgggactagctgtagattccaggaacagggaccctgtagatcccaactagacttctgtgtctgagatttgcagaagtggccaggactggggctaggatgaggttctagaatggtgagcctctggggccctaaccaggtggagcatgccatctatgccggtggccgcttaatgtactctgttaagtcaaatgagctcttgttcatccctcctgacccgctgctctgcataccctggtgttgagccttctgcctgcgttaaccagtccagaatgccaccatcttctctttctgccccacttctcctcagccccttcttgctgagttttcccccatggtaacctatccctgcccccaacacatatacctagggacctccaaagccctcacttgcccacctgttccttctcacatgcacagccatcacgagggttactgcatggcacccttcattgggcagatgggaaagccaaggctcagagaagtggtacagtctcttcaaagttccaggcacctgtggtttcccacaggaccagaaacaggaatggggtctgaacccacccgcagagcggtctcagtagtctgtaaaatacagatgatgtccctattctcaagattactgtgggagaacaattgcagaaagtgtatcgcactagacccgcctccccgttctgattaatgcggccccggggcttgaccccaggggtccccccacatgctcacctcccccgtggtgaactgaggtcgccacacacccagcctcctgtgtgggaggggtgagcccagcagtgattgagaggcggaaaggggaatggggggtgctctccgtcctctgggccccagtcaggatatggccgttctgggtccaccccgacccactgggtggaaacaggaaataagtgagacctggtgtgcactgggtctacgcctggctccacggctgataagggccattgtgtggccgccggggatgagcctgctctggatagatgtgcttcccggaggaaggaaggaaggcttgctagcttttccggggcgggggaagctgtggggagagagaagggtgccggggggaaggcccctgcctatggggctgtcggtgccagcacacacccacgggactcagcccttcctatgccagcctctccctctggaaaggtctgtttcccctatccacttccctgttcttacttcctataaggaatggctggagactggagggctcagtctcaggccaggaaagtgtcagctgtgatttagcaacaataaaaatagaaaagcaggaacatcaggggtgggggtcacctgggggtactgttgaaacgcaagggatgaacagggctagaggttgcccacacccagggaacccaggaactaacctcacaagctctgaggctcagaggagggtaagccaagagcttcctcacagcgggacagccccctgtccgggccctgcatgaccaggccccagcagccctggtctctcaaactcatggtgggggctcacctgctgtggggggcagccccgttgaggggatgtgcaggaaagccagtgcctactaacgggtcctcttggcctaggggagggcatgccgtctggtttggggagtgggccccgtgctctctaggtggtaccagagagtgggcaggaggaggggcccagccatagagctgccgtggggatggggggaaggggaaaggcgtcctagcctttgacctggagcccagggtcccccatgggtggctgcatcggctcctctggttacctgggacaacaggcatttcctccatccccagcccctcctcttcctgctccaaccatccgggccaagaggcctcccagtcagacctggacggctccagccgtgtcctgaggagctggaccagccacatcccctggggctgcagttgaagcagaaccaagtggccatcccggcgttagaccgtaggttcctggtcccggagtggtcggagcccgccagtgggcaggcagctcttgctcacaggccgcggtgcccaggccgctggct

SEQ ID NO: 16896 - DNA, 2300 bp, Homo sapien
tcctataagctctgtgttagctattcattatatttgtgcttaaagatgttccttcattcatcaactaggggaagtccagatgcgggttatcttgaaagaaacaaactgacattctaggcagacagttgtctatgtggtctgagggtcagcagctgttagtctccttcctttggctcttgagacccacacatatcactttagccctaacaagggctcctcccacctccacctgttgccccagttgaaaagcatccattatgagctgaggtcagcctggatctggaattgcagcccacataaacataaaggaggatgtccctggtctgttccatccccacggatggtgttgctgctgggcaacagtgttggcttcttttaagtaccccctttcctcctcacccacctccaaactgactagcactcagagggacttatgataaaggttcagctccaggggtagtacctgagtgtgtgccatgccccttcagaccagctgcttccatcagaattccagggtcacagccccaacagaagcagcagtgcctctgtaggaggggtgctgggctctggccttctcatgcagagaggtccgggacagggtcagtatcgtgggcatgtgtatagcttcccaagttcttttacagtccctgctgggactccctgacttactttggttggttcctagtgctacttgttttacaaactacactttgtagaattgattagattaccttgtttatttaatgtgagtttgtgcctttttgtctcaatcttccaatacaggtatattgagaaaaaaagcagtctaataaaatcctagacagaactttctggagtccagtttggtgatgtccattttccagctgtatgtatcctcaaacttgcactgataaccgccattttaccagggcaggattaggaagaggtacaaaggtgtgtctgaaaatttttgcacgtggatttctgcatataatagtcccgtgtcagtttacttatgcaaacattgcacatctgaattgtaattcggccgtttcctactgacaggatgtccttttgcttttgtctgcctcctcttcacatcttcctctttatccaccctaccaaacaagcaaaacatttatttaaagtagttttaggccgggcgcggtggctcacacctgaaatcgcagcactctgggaggccgaggcgggtggatcagctgaggtcaggagttcgagaccagcctgaccaacatggcgaaaccccatctcggctaattattattattattttttttttttgaaacgaagtctcgctctgtcgcgcaggctggggtgcagtggcgcaatctcggctcactgcaacctccacctcccgggttcaggcgattctcctgcctcagcctcccgagtagctgggattaacaggcgcgcgctatcaagcccagctagcttttgtgtttttagcagagacggggtttcaccatgttaaggccaggctggtcttaaactcctgacctcaagtgagccgcccgcctcggcctcccaaagtgctgggattacaggcattgagccaccgcgccccggcctacgtttcatttattgacggctaattctgtaggagtccaggaatccccaaacgtcccatatgcaataggtaatccaataagtttggagtagaagcctgaaagtgggcgtggagaacggaggcgctcccgcagtagcaggaatggggagattacctgcagccggggggcgggggagaccggatcccaggcaggacagtggctaggctgcgtgtccccacccccgaccctcgtttgacccctgggagccggggcgaagacagcacaaggacggagccctcggatccctcacgagtggggcagaggctgcggcggcggcgaagagacaacttccgccggaagacggcccctggcgcggggcacgctgggagctgcggacggcgggcgcgggctgggccgggtctagtggcggccgcacacctcgcgtcgtctggggcagtgttgcgcgtgcgctgatgacaggcccgacacgcccctcttacgtccgcgaacccgtcttcgctcagcctctcgcagctttgcgctcgtgggagagtcccgcctccttctgcgaaccgcaccacccagatcccggggtgcgcggagggcgcgtctctgacggaagccggggcggacggtcggagtccggaagaaaaacagtccgcgacagctaggcgcgtgagaccggccgcccgcagggctgctctggccgggacccgctggccgggagacgcgaacctgccggaccaccgcgcg

SEQ ID NO: 16897 - DNA, 2300 bp, Homo sapien
gtctgtcattgatgggcatttgggttggttccaagtctttgctattgtgaatagtggtcggcttgtttttttgagacagaatcttgctctgtcgcccaggctggagtgcggtggcatgatctcggctcactgcaacctctgcctccagggctcaagcgattctcctacctcagcctcccgagtaactgagacgacaggcacatgccaccacactgagctaatttttgttttagtagagatggggttttaccatgttggccaggctggtcttgaactcctggcctcaagtgattcgcccgccccagcctcccaaagtgctgggaatccaggtgtgaggcactcagcctggcccccactctaggatctgataagtgagcacagtgctcagggcagtcgcgggccgccagtcacatcctgatagcaacacggccagctgctccaccctcccttcccaagtccctgtcttaggcagcccactcccatctcccctggatgcccctctagcgtcctgcgctgagtgtgagtccagcactggagtcattacctgcccccatgccagcctgtcttgcctgtgttctcagagaagacagtaccgtccaccccggctcccaggccagagacctcgctgcttttctctcctcctctcagccaatgagtcaacaagtctcacggagtttaccttctgagttgctcctgaatccatcccttccttttcttccctcccactgtcctagtccacctgcacctggacatctgcagcagcctcctcgccggtctccctgcctacgctctggcattccatcccctctgtccacccaaccactagagtgagccttcgcccaggacacccgctcatgtcactgctcagagcccttacatgccctcccaccgcccttagggtggactccaaataccttatcatcgttcaccaggaaccctcccctattgagctgctcagccctgaaatgttctgttccactcacttgtcagttctccaaatgcaccatgctctccctcttgcctccagcctttgcattcactctgcctgctatgctcttctccgaagccctctgcagatctgagaatctcttcctccaggaagccttccctgactacatccctgacgctcaattaggtgcccctccgtgtaatgccgctaagcctgtgtctcatttctcacagcccttttcattcttttttttttttttttttttgatgcagagtctcgctctgtcgccccagctggagtgcaatggtgcgatctcggctcactgcaacctccgcctccagggttcaagcgattctcctgcctcatcctcccgagcagctgggactaccaccaccacgtccaccaccacgcccggctaatttttgtacttttagtagagatggggtttcgccatctggtctggaactcctgacctcaggtgatgcgcccgcctgagtgctgcattacaggcatgatgtgcctgggattactgccaggagccaccgcgcccggcctcacagcccttttcttttcttttttttttttttgagacgaagtttcactcttgtcccccaggctggagtgcaatggcgcgatcgcgatctcggctcactgcaaactctgcctcccggtacaagcgattctcccgcctcagcctcccgtgtagctgggattacaggtgcgtgcctccacgcccagctaatttttgtatttttagtagagacggggtttcatcatgttggccaggctggtctcgaactcctgacctcaggtgatccgcccgcctcggcctcccaaggtgcaaggattacaggcgtgggccaccgcgcgcggctattaatattttttgaaacaaccttttcctgggtctcaattccctcaaccggggaggccccccagccagcacccgcgtgcatccgtggcggttcacaccgaggacggtgacggacaccctagtctgctccgccttctgccgggtctggccccagccgcggggccccacctcggaaccgacagcgccgccgcggcccacttaaggacgggagggcgggcctgggaaggctcggccccgcgtgacgtcagcgcgcaccgcggcgtgtgacgctctggttgccgcagagacgccccgcccccgcgcggcgctgcggaaccggagctccgggcggcgtcggcagcggcgcgagaggcgacgaggcccgggcggcaggagccggcgcggcgaccgcggcgagggcggcggggacggagcagagcacgacgaagacgcacaggcagccgggccgggccgggccacggggagagcggccggcgg

SEQ ID NO: 16898 - DNA, 2300 bp, Homo sapien
ccaaggccacaggcccacagcaccccctgccggcgggctccgtggggccctggagctgatgacgggggaggcccgtccgcctggcccaccaacccgcccaccttgactgcccccagaagtgtgtcttgagacctcctgggcgtgcttagaggggtgagttgtgtttggatttttagttattttctcttcagttttattagacttcttttttataaagcaataaatccattttcctccgggtaagggatgccccttctggcatatcagttaatagctgcatgtgcctattttgagcttgagaagaaaaggcaggacaagattctctgccaccgaccagctccagccgtgcccagctgctcttcgtctctctgggggactgctgactcgggagggacagtgggccaggaaaagaccttcctccccaacccccaaacaaactgggcttgtgcagacatcttagaagtgtgagccaccctcctctaccgattttcccagccaaacaggcgaatcctggtccctttccatccctacacccttccacaaccctgaagattcccgctgggttcttctgcaggctcagagcagttcaggatgtgggcggcagggagggggatgaaaggagaagaggaaagggcaggtccaggccacattcaagctccacattaacagcttgggcgcctggaacacatatctcctaggctttatttcactcaaatatttaaaaaaagactgggcgtggtggctcacgcctataatcccagcactttgggaggccaaggcaggaggctcacctgaggtcaggagttcgagaccatcctgaccaacatggagaaaccccgtctgtactaaaaataaacattaatcgggcgtggtggcgtgcgcctgtaatcccaactactcgggagcctgaggcaggagaatcgcttgaaccggggagacggagattgccgtgagtcgagatcgcaccattgcactccagcctgggcaacagagcgaggctccgtctcaaaaagaaaaaaaaaaagagaacgagataaacatgcccactcctgagaacactcgttttgtgatgttagtggttattctgattttcaagaaagtattatagtcaagtttgggaaaggctgagttaaaagtcaagcctgtttccttacagccagcactgacagcactttgccaacgctcatgagctccgtggctcctcaggagcgggtgtgctgtgctgccgaggaacggctcgaaccatcagagccaccagcctccacgtgcggctccatgatcacccccagcagaggctcccgggtgctggttccaaatggagactccaggtcttgccgctgaccggtgactctgctgccagcatttgagacccgccatcacacaggagttgcagattcggagaaaccctaactagccagggtgctgccagctgggaaaaggccgcctttttttttttttttttttttttgagttggggtcttgctctgccatccaggctggagtgcagtggtgcaactgatagctcaccacggcctccaactcatgggctcaagggatcctcccacctcggcctcctaagtatctgggactataagtgtgtgccaccatgcctggctaattttttttttctttttcataaagatgaattcttgctattttgcccaggctggtctggaactcctgggctgaagcaattctcccacctcagcctcccaaagtgctgagattacaggcgtgagtcacaatgcctagccaaaaagccagtcttgagatggggaagacgtggcccgtgctgtccccagcagtgcccagtcccagccaaagtgggcagtgctgcctcactctcccacccaccctcagggtgtggcacttactgggaagaagcaggcattgagaaacagaattgagggggggaaacagtccagggccaacagtgcttggggattgaggcctgaaaatgcgagcagggtacagaggctgtggctggccagatgggtcgggtgccccctgcactcccaccccctagtcaggggtcacccatcctactttgccttgtgtggagctgacaggtgacatgttttcctattgttgtccttgacttgataacaatctgggagttaaacacatatgatcatccctgctttacaactgaaaaacgaggcctagagatactatcatcatatacacctgaaaaacgaggcctggagcgatggaggagcttgttcaaggtcagagccagcactcatatatgggtcttaagacactggagcagccaagggcctctagaccaggacattcca

SEQ ID NO: 16899 - DNA, 2300 bp, Homo sapien
gttgcagtgagccgagatcacgccattgcacttccagcctgggcaacagagcaagactgtctcaaaaagaaaaaacaataaagaagaagcattgagtaagaaggaagaaaaagagacacaggtgaaagtgtacagacaatggctagcagaccattttgctcctaagaccaccctccctccaccccttggcagtggctacaccatcttaaagcctcccaaagtactgggattaacaggtatgaggcaccgcgcccggctcagatggtgactttcattcattgcattcaatcatgcagcccaccaaccctttgttatctgcctgcaaggtttattccggtcagtttgagtagtgagttgctataaacatattatgtgttaatagagttgttcatgattgtgaagattaaacaaggtactggagtcctactttatgtaagggatgggctccaagatcagaggatgagttaaacgctgttttcttttttctttttcttttttttttttgagacggagtctcgctctgtcgcccaggctggagtgcagtggctctatctcggctcactgcaacctccgcctcccgggttcacaccattctcctgcctcaggcttccaagtatctgggactacaggcgcccgccaccacgcccggctaatttttttaatatatatttttagtagagacaggggtttcacagtgttagacaagatggtcttgatctcctgatcttgtgatccgcttgcctcggcctcccagagtgctgggattacaggcataagccaccacgcccagccaaacgctgttttccatggctccacaccttaatataataagctacggtttattgcctgaggccctccaccgaggactccatgcacagtatctcagtgaagactcccagcaccctggcgaagtggggaccagtgttatacccattttacagatgagggagctgaggctgggacttgcagtagtttgcctagggccgcacagttaggaagtggtgggcctgggactccctgcacatctgtgagcacctggggtccgttcttggatcatccagggtgtctgcgtgggtgtgagactgggatcggtaatcgttcattcacgagagataattgcagagggtgcttggccgggcgcggtggctcacacctgtaatcccagcactttgggaggccaaggcgggtggatcacaaggtcagaagatcgagaccatcctggctaacatggtgaaaccctgtctctacaaaaacgcaaaaattagccgggtaaggtggcgcgtgcctgtagtcccagctactcgggaggctgaggcaggagaatcgcttgaacccaggaggcagaggtggcaatgagccgagatcacaccactgcactccagcccgggtgacagagcgagactccatctcaaaaaaaaacccaaagaacaaaaaaacaaaacaaaacaaaacaaaaaacagtgctgtgctatctaggtcaggtcctgcagccaagaggttatttgtgtccactccagttccatctgctgcctgctcatttcccctttaccctctcctgtccccacaaggggaaacccattcactcccctatttggcttgtatctggcttcttatcagcgtcctgcaagatttgggtgaacttgaagccagtggtgaagtgaggctttgccatgtgccagctcaggcacacgctgctacttctctccccgtcgtcttagctcagccttcacagagcactgcagcatatggatggccatcttcttgtacccgagaccccctccgagagtcacactcagcttgccactgagaagggccggggagtgtccgtagtgctggtccagccccgacacagtccctaaaacgtgcctgggtggcttctgagtcttgcgtcagtttacctgctgcgacgcttgaggcctgacttctcaggagcacccggcttcctccggggagccctcccacccctgcacgttctgtgtctccacagaggcgagaagaaaaagaagaagcgggaccggcagatccagaagatcactaatgccatgcgggccttcgccttcaccaacctgctgctcgtgggctttggggtgacctgcctcattcccaacctgcctctccaggtgggtgtggggagtgggaggggcaggtgggaggtggggcagtcagaaggaacatgtaaagactcaaaagtgtgtaatgtttcatggaagccatcaacaaagcggatgactttctttatttttttgagacagagtcaaactctgttgctcaggctggagtgcagtggtgtgatctcggct

SEQ ID NO: 16900 - DNA, 2300 bp, Homo sapien
ccgaagagaactgtagaattctgattgacatcttccaaaaacctaccctctccaaaccaaaagcagtttttgctgacatctggtctttctggaatgctgatatttttatttataaaatgatgctattatccccaaatagattcttatttttaacaggctttctccctttgagggctgcctgaggctcataactttgttctctggcatctcagtgttaccctgaaaagacaagaaggctcctgggctctgccaggagcagagagatagggagggttgccagccggaaagtcagacaactgcttgtattctgcattacctccctccttggccccatcagcctcagtccatgaaggagaaaccttcagtgagcggtcattgcccctgaactaatgcccctgtgagtcacacaggaaggggcgcaggtgaagaaggggcctcatggggcctagttctctgtcccctcctcctccccttccctggtgcatcctccccactgaggtttctctgcttcttatctctcagctgcccaacatgttcggcgaccttcggtccacgtttattgccttgatgattgggtcctacgcctcctcggcagtcacctttccaggaatcaaggtgagcacgtgtattttgcactggtgtctgtgcagaggcctgctccaggctccttccaccctctctgaagagggaggcaattgtgggcacccggggtggcccctctccaccacccccacccgggcaggatgcacctgggcatcacaggggcgacaaatgaaaaccgcggggcctcaggggacgggaatcacgcatgtggctgcaggatctgccgcaggtgcctttgcatttcggggctggggcaggggaagggcggtgggtgagtctgtttccagttgtgagtcttgcccccgtctcctccgtcatcctggtctcccgctgctcccctgctccccaacccccagcctgctgttattgtaccgttactccccgccagccaaagcactgctcttggccaagtgtttcagctgtttccctcctaggcaggattttgagcctgtggaagtcacacagggtcaggacgaagcaaacacctcacagtccatcagcccaagttccccagaccctgtgggtctgccagggccccgtaggggcttctcccacctctgaccctcacactaagtaaaagcccctttcctcggtggtgtgtgtgggaatgctgttggcgaggagagggggacacggtgtgggctggccacctgggcattgaagtggtgggagctgggactctggggccagccatcctatggacttgcagagattctcatgcccctggactggggagcatcccgaaagttcttcctcctcctttttttgggggggaacagggtcttgctctgtcgcccaggttggagtgcagcagcacgatctcggctcactgcaacctccacctcccaggttcaagtgattctcctgcctcagcctcccaaggagctaggattacaggtgcccgccaccatgcccggctaatttttgtatttttagtagagatggggtttcaccatgttggtcaggctggcctggaactcctgacctcatgatccgcccactttggcctcccaaagtgctgggattacaggcgtgagccaccatgcctggcttccttgagcatttctttggcctctgccatgtgagctctcagaggcactggggaagcatcagtggacggggctggccggttcccgccttcagggagctccgctaataccagacaagccgacggaccaggagcaccgtcccctctgctgggccgatcactatgagcctgcaagacgtgccgtggtcatggcggggcggtcaggaaggcctccgagtcggggggctaatcacacgccaggcccagatgaccagcagggcaggcacggtgggaggactggaaggcgggtgcctgatgccccaacgcccaggctggcagggctgtgcctctttgcgcggctcagcacagggacagcaggggtggccagacgcccctgcctgctgcggctctggcctccccgggctaactctgccccctcccccccccaccccgtccccgcggtgcctgtcagctcatctatgatgctggtgtctccttcatcgtcgtcctcgtggtctgggccggctgctccgggctggttttcctcaactgcttctttaactggccccttgagcccttcccggggccggaggacatggactactcgtaagtagaggtgcccccgtcccgcctgcccccagcccccgccccccagccggggtcccgggca

SEQ ID NO: 16901 - DNA, 2300 bp, Homo sapien
ctctctctttttttttttttgacacagagtctcgctctgtcacccaggctggagtgcagtggcgcagtgtcggctcactgcaagctccgcctcccgggttcaagccattttcctgcctcagcctcccaagtagctgggattataggcgcctgccaccacatccggctaatttttgtatttttagtagagacagggtttcgccatgtttgccaggctgatctcgaattcctgacctcaggtgatctgccccccttgtctctctctcttttttttaactttaaaaagatacagaggcagggtttcgccatgttgtccaggctggtcttaaactctgaggtcaaaggcagcactctgggattgcaggcgtgagccactgcgtccagcagatcctgtctcttaaaacaagaaaaaaaggttgggcgcggtggctcacgcctgtaatcccagcactttgggaggccaaggcgggcggatcacgaggtcaggagatccagaccatcctggctaacgtggtgaaaccccgtctctactgaaaatacaaaaaaattagccgggtgtggtggcgggcgcctatagtcccagctacacgggaggctgaggcaggagaatggcgtgaacctgggaggcggagcttgcagtgagccgagatagagccactgcagtacagcctgggcgaaagagcgagactccgtctcaaaaaaaaaaaaaaagaaagaaagaaagaaaaagattcaagacaaatggggagtggtggggagggtggaggggacatagattaagtccccataagcagcctgaatttaatgaaataggttggcatggctatccagagggcagcccccaaggccagggacgctgggtgtggacaggaaaggtttgctacacacagtgtgatgtctcttgaggttagagaacctgtgcctctttgggaggatgtagtttgccctaggcctggatttcggtagaatgagcaagagttagccttgaagtcctgttcaggtgggccccctcttgccctgtacccagaatgagctgatgtgagatgccgagagtggcttcgttgggaagagagcccggaccttgcttcccgttggccttccaggatgctaactgctcgggccgaacatcctgtgggaagataatcccctgcttgtactgagaaattcagaagcaggaggccgggcgcggtggctcacgcctgtagtcccagcactttgggaggccgaggcgggcggatcacttgagatcagcctggccaacatggtgaaaccccgtctctactaaaaatacaaaaattagccaggcatggtggcgggcatctctaatctcgcgacttgggaggctgaggcaggagaatcacttgaaccagggaggcggaggttgcaacgagccgagctcacaccactgcgctccagcctggggaacaagagcaaaaccccatctcaaaacaaagaaaagaaattcagaagcaggaatcctgggccagcttcatcctcagaccgaagagaactgtagaattctgattgacatcttccaaaaacctaccctctccaaaccaaaagcagtttttgctgacatctggtctttctggaatgctgatatttttatttataaaatgatgctattatccccaaatagattcttatttttaacaggctttctccctttgagggctgcctgaggctcataactttgttctctggcatctcagtgttaccctgaaaagacaagaaggctcctgggctctgccaggagcagagagatagggagggttgccagccggaaagtcagacaactgcttgtattctgcattacctccctccttggccccatcagcctcagtccatgaaggagaaaccttcagtgagcggtcattgcccctgaactaatgcccctgtgagtcacacaggaaggggcgcaggtgaagaaggggcctcatggggcctagttctctgtcccctcctcctccccttccctggtgcatcctccccactgaggtttctctgcttcttatctctcagctgcccaacatgttcggcgaccttcggtccacgtttattgccttgatgattgggtcctacgcctcctcggcagtcacctttccaggaatcaaggtgagcacgtgtattttgcactggtgtctgtgcagaggcctgctccaggctccttccaccctctctgaagagggaggcaattgtgggcacccggggtggcccctctccaccacccccacccgggcaggatgcacctgggcatcacaggggcgacaaatgaaaaccgcggggcctcaggggacggga

SEQ ID NO: 16902 - DNA, 2300 bp, Homo sapien
tccacccgcctctgcctcccaaagtgctgggattacaggcatgagccgccacacctggccctgttgtttttatttattcagtaaacagctattgtaggccaagacctgggtgagatactggggacacagaagtgaccacagtgcaggccctgcccttcggggctcacagcccagtgggggattagacatgtctttgcgcttccacacacgctgacgggactgtgctccccacagccactgcatccggctctgtgccagctgatggtgccgtgattccccgccggagcctccaatagcagcaatgatcatgataaccacgagaacagcagcaacttgtagctattcattattgagtgctttctatgcctgggtgagctccagaaggttttctgaatttttctcattgatcttcccccacactctaggaggtggatcttatcattatatgatgtccatgttatggacaaggaaactgagctagagcaaggtcatgcaggtagaaagtggagaatcaaacactggaagctagaaaccagattccagttccacgctcttcatccacacggccccggcggggctccttggccacacgttggcatgaagcacgagtccacctgtgcgcatcctttccagtaaccttggaggaaccccgagaggcctgagcaagcttttgcaaacctcggcgctacagccctggcgccagagggctgcaattggaaggcaggcagttaccggaagaagagcgtttccttgactctcccagcgtgacctcatgtctaatcaaagtcggctcctgttttctgcaggattagtcagcatctcttaactagcagtcccggccaggagagctcctcagccacgttcccagcccgtcctccaccctcccatcttcagctgccacagcacttttctcttcctttctgtgttgttttggtgctgggtggactttgaagggggccattaagggctgggtgtggcaaacacaccagactcagcacccagcgaggtctaggcatggccacgggatggcaccactgtgaccccggcaaggaaaataagaaaggtgcatatcggctgggtgtggcggctcacgcctgtgatcccagcactttgggaggcagaggtgagaggatcacctgaggtcaggagttcgagaccagcctgggcaacatgatgaaaccccatctttactaaaaatacaaacactagccgggcgcggtggcaggtgcctgtaatcccagctactcgggaggctgaggcaggagaattgcttgaacccgggaggcggaggttgcagtgagccgagatcgtgctactgcactccagcctgggcaacagagtgagactccgcctcaaaaaaaaaaagaaaaagaaaatatcagggggagaaggtggcatctgttctatgtttgagaaggcagctggacttcccattgaaggaggcgccgcagtctccccacatggacagaggagaaccaggctattggggtgagaccagtgcttgtgcttcccaagtggtctgggttctgcctccatactggctgcagtctgtccccacggacatagctgccgtgagaaggttctcaccagcctggggccccacagccaaggctgggccctgaggtctgccgttctagggtggcggatgctctcgaatgggactctcagcctgggcttcgttgctcttcaagggacacacaaagctcctgaaactgtggataaaccttggtgtgcattttctggggaggtctttattggatttttcaaagggtccatggcccccacaaaagttaagaacctctacattttcactccaggggacttgggccaaatggccatccaagcctgctgcggggtagcctgagccctcgagaggccgccagccagccctggcattcccagtggggggactctgaatgggcacctgcccttctgatctttgggaatccctgtcatgaccctgaggtcagggtttccttccctcttcacacagagaatgtcaccaatggcacagtgggcggcacagcagagccggggcacgaggaggtgagctggatgaacggctggctcagctgccaggcccaggacgagatgctaaatttggccttcactgtgggctcctttctgctcagtgccatcaccctgcccctgggtatcgtcatggacaagtatggcccgaggaagctcaggctgctgggcaggtcagtgtgggtcccttagggggcagggagtgggcaggtggaccccctgggctgagttccccacagaagggtatcctggtcgtacctgatatcaggtgt

SEQ ID NO: 16903 - DNA, 2300 bp, Homo sapien
tatctgagagaaaatgtggaggacagttctgggggatatttgaggcatgtttgagccctgcagcgccgtcaggctgctcaaagaggagggaagggtgaagaaagagatttttcagatggcagttgaaaccttgggagtgggaagggttccacagggtgaggaaccgggtaggctaccagctggagccgccccccagcaggctgacagctccaagcgttgtctgggggaggttgccctcgccaggtggcccgggcggattctagacagtagggggcacactcggactggggcaggtggagcaagaggcgtttggggctcccacagccctggggtggtggtggggttttatttttggtttttattttggtagagatggttctcgccatgctgcccaggctggtctcaaactcctgtccccaagtggccctccgaccttagcctcccaaaccgctgggattccagacgtggacaccgcgcggcagccctggggtgctaagccagccccccggagcgagccagggtgaccaaggcgattctggggcagtcagagggtcttcccgggtcgggttagtgcctcgaatccgggggacgaagacggggagctgagctttcggagcccgggcttatcagacggggacccggagccccctcgaaccctccctagcttgtaccagctggcggacgtggcccgtagcatcgccctgcagaggggaccttccctgaaagggacggggaacggggtgaaggtggccagcgcgggcagggagcacccagatgacgatcaagggtggagggtccccggaggaccgagcagtgcgtgaacacgggcggagaaaggtcagtctgatggggggagctcaggagaccccatcctaggacgggacagaccagccccaaatccccttgcagatttccaagggccaacttccagggaccgggcagacgccaccggggagaggggaaggggtcggtgcatcagcggggggcgccacggctggaccgggtccgggatcccaggccccgaatacgccgggacgggaaccaccggggcgggggagcgaggaaccaggacccaaagcccgaggcggcggggacggcggcgctgcgtggggaggaggcggggtggggattcgagagtggaaccaccgtgcggagccggcgcatctgggcgtggtgacccgcgcgcagggggcagctggggacggcggggcggccgcgggagagcccggctgggggcgctggtggcccggcggcttctggggggagtccgctgggggccgggacgcggagccggagccccagcctcgcagggtcaggccgctggagaggccgcggggcgatgtcgccggggattcccggccgcgctgtgactcgggttgaaggctgcaaagccgaggcccggcccgcagcgcccaggcccctcccgtcccccatctctcttgtttgtctccgagtccggccggaaccggcttctgctcgcggcggggcgggcggggggctggctgctgattggtcgacgcctgtttccagccccgctcagccaatcagcgggcggcagtgttttcttcttggggtcggaataaaagggctggaataaaagagggcagaaaaggcgccgggcgggcccgacacacgccggaggagccgggtgagctgcagcagggaggggatcgcggccggggcgagggcgcgggggcagaagcggccgccgaaggggcgtagggagaaaacgtgggaacgaggagagagatggagcgatgaggggccgccagggaagagatgacgaacagatgcgggctggggaatggaggcgcgggggtccgaggccatggaaacgggcgagttgccgggggaacgcccgagatgggggtcgcgcggctggctcgcgccaccggtttgaaccggctcctcgtctcccacgctgggttcgcgtggccgcagcgcctagcgacctagacggcggccaatggcgcggcagttcctgcgccgtccggccaatgagcgcgccggggcgggccgttccgtaggtctgggcgctgatcttgtggttgaagaaaccagctctggggaagggtctcgggcgcgggcgggagggcacctgtcagggtccctgggagaggcagccctcggatctgcccctgcccacctcacgctgcgttccatgctggccccaggcgatgtcagtcctgctgcaggccaggactagttccacggccctgagcatgcgttagccccttcttgcctccatgcctcagtttacctcggagtgagctgcgggagacgtctccctgcctggccgg

SEQ ID NO: 16904 - DNA, 2300 bp, Homo sapien
ggctggatttgaggaactgaaatctgaaggtggctcaacaacagtagttgcgggcctaagggcacagatggaccgattaggtaaatatgtaggagatacagctgtatcagtttgatggggatgcggtgagggagaggcagaatcacagcgactgcctaacaaatgtctgatgaaaggatggttctcagcagggcactgtgagtcatgcctgtaatccctgcactttgggaggctgaggtgggaggatcacttgagcccaagacttcaagaccagcctgggcaacagggcaagaccctatctgtacaaaaaatacaaaaattagccaagtgtggtagcatgcacctgtggtcccagctacttgggaggctgaggcaggaggatcacctaagcccaggaggtcgaggctgcagtgagctatgatcatgccaccacactccagcagtctgggtgcctgagatcctgtctcaaaaaaaaaaaaaaaaaaagaaaaagaaaaaagacagggttcttggtatctaacttcagtagacagtagtagtatggttatctgagagaaaatgtggaggacagttctgggggatatttgaggcatgtttgagccctgcagcgccgtcaggctgctcaaagaggagggaagggtgaagaaagagatttttcagatggcagttgaaaccttgggagtgggaagggttccacagggtgaggaaccgggtaggctaccagctggagccgccccccagcaggctgacagctccaagcgttgtctgggggaggttgccctcgccaggtggcccgggcggattctagacagtagggggcacactcggactggggcaggtggagcaagaggcgtttggggctcccacagccctggggtggtggtggggttttatttttggtttttattttggtagagatggttctcgccatgctgcccaggctggtctcaaactcctgtccccaagtggccctccgaccttagcctcccaaaccgctgggattccagacgtggacaccgcgcggcagccctggggtgctaagccagccccccggagcgagccagggtgaccaaggcgattctggggcagtcagagggtcttcccgggtcgggttagtgcctcgaatccgggggacgaagacggggagctgagctttcggagcccgggcttatcagacggggacccggagccccctcgaaccctccctagcttgtaccagctggcggacgtggcccgtagcatcgccctgcagaggggaccttccctgaaagggacggggaacggggtgaaggtggccagcgcgggcagggagcacccagatgacgatcaagggtggagggtccccggaggaccgagcagtgcgtgaacacgggcggagaaaggtcagtctgatggggggagctcaggagaccccatcctaggacgggacagaccagccccaaatccccttgcagatttccaagggccaacttccagggaccgggcagacgccaccggggagaggggaaggggtcggtgcatcagcggggggcgccacggctggaccgggtccgggatcccaggccccgaatacgccgggacgggaaccaccggggcgggggagcgaggaaccaggacccaaagcccgaggcggcggggacggcggcgctgcgtggggaggaggcggggtggggattcgagagtggaaccaccgtgcggagccggcgcatctgggcgtggtgacccgcgcgcagggggcagctggggacggcggggcggccgcgggagagcccggctgggggcgctggtggcccggcggcttctggggggagtccgctgggggccgggacgcggagccggagccccagcctcgcagggtcaggccgctggagaggccgcggggcgatgtcgccggggattcccggccgcgctgtgactcgggttgaaggctgcaaagccgaggcccggcccgcagcgcccaggcccctcccgtcccccatctctcttgtttgtctccgagtccggccggaaccggcttctgctcgcggcggggcgggcggggggctggctgctgattggtcgacgcctgtttccagccccgctcagccaatcagcgggcggcagtgttttcttcttggggtcggaataaaagggctggaataaaagagggcagaaaaggcgccgggcgggcccgacacacgccggaggagccgggtgagctgcagcagggaggggatcgcggccggggcgagggcgcgggggcagaagcggccgccgaaggggcgtagggagaaaacgtgggaacgaggagagagatggag

SEQ ID NO: 16905 - DNA, 2300 bp, Homo sapien
aagcagagagcaggtaggtccctgcctgcattcccacggagccaggcctccctccctcattctgctgagcctgatgacccagcctggtcaccctctgagcccattgtctcagactgaggctgtcaccccaacccggtcaccccttgagcctccctagcctggccgcttctagggcctgctgacctgctctggctgtgtcccatggccgctgtccagcctgcgcccttctccctggatctcaccactccccttgccttgcctgccatccattctgcctgacaacactgcctctccacattcattcttcaagttcctgtcttggctgggtctgtttattcttacgggggtgaaactgtagccgcggctgtgtcagggcctgctgtgtgtcaagctataaaataaacccttggcagggcgcggtggctcacgcctgtaatcccagcactttgagaggctaaggtgggtagatcacctgaggtcaggagttcgagaccagcgtggccaacatggtgaaactccgtctctactaaaaatacaaaaattagccgggcatggtggcatgtgcctataatcccagctactcaggaggctgcggcaggagaatcgcttgaacttgggaggcggaggttgcagtgagctgagatcgcaccactgcactccagcctgggcgacagagtgagaccctgtctcaaaaaaaaaaaaattaaaaattaaaggctcgacatcctgcatctccccagggttgccttctctccagccccgggggccctgcagtccctccatcccccctgctggattcctgttgtccctcagggccttgatcaatggccctcacttctcctctctcctctgtctcagtgaggatgaggctggcccatggatcctgctctccgatgacaagggagaccatcccccacccccggagtccaaaatacagagtttgtatgttggggaaaggggaaaggcaagagtgtggggagggaggaagggccctggctggtccttctcaggatcccctttcccgcttctctgcccgtcaccctgctgtgcttggctctaagcacaccgtcccctcctgcttctctggccctggcccccatcaccttcacactccctcaggctgccctttcttccccctctccccttttctcaccatcccctgccctcacccatatccttgacctctctggcttcctggctcaaagtgcctctggctgtctctctccagctttggcctatggtatcggggtaaagctgaatcctctgaggatgagaccagcagccctgcacccagcaagctagggggagaagaggaggcccaaccacagtctccagctcctgatccgccctgttctgccctccacgaacacctttgtctgggggcctcagccgccccagaggcctgacttaggggtctggctgtggaaggatgtgtggcctcaaatgaggacagggctcccgccttcacagccctcgccaggggtctgccccaatcctggcctgcatcagggcaggacggggtctcagcccgcctccctctctacgtctctgtaccgagcctctggggccagatataagagtgcctctctgagtctcagtttccccatccatgaaatgagagctgactgcctagctcccagggctttgtgcagacggcctgagctcatgtaataaagaactgcccgtaatacacagaaactgttcctcgcctgtctgtccatgtctgtgccacctcccaaccctgccaggagcagaggcaggctgaggggtcctcgctggtctccttgctcagtcactgggtggggtggcttcttgcagctcaggccttgctttgggagtgtggcctgatggaaagccgtggctcccagcctcagtccacccccttccctggccccggcacccagggacctgcaacttcattcttctggcccttccaggcccaggccagtcagccctgccattgcctttctttccctttctttttttgagtgtcagtctttccagccaccccctccctctcagggaggtgcctcgtggcagcccgcccctccggcctggtttcctcaggaaaagccctgagaggaagcagggagggggttgggagctgtgggggccagacgaacccgagcgctcccaccgagctgcctgccatggggctggggctgctgctcccgctgctgctgctctggactcgggggactcaggggtccgagctggaccccaaagggcagcacgtctgtgtggccagcaggtgggtctcgtgggagtctgatgcgtgtggccagcaggtgggtctcgtg

SEQ ID NO: 16906 - DNA, 2300 bp, Homo sapien
tgtgggtgagtttatagtaaacagatcctctttctttcttggtgataatgtaaaacttaaaatagcaccaagtgctggttttccagatgttttcagcttgtgaaaatacactgagctgcatgtgtgctcatttgcttgtgaatactatgcttaataatcagctggggagcttgtgagcagtgcagattcctggaccccactcaggagattctgatgtggtaagtccgcgatgaggtccatgtctaacattttgaacaagcaccccagctgattctgatacagggggttctgatcacgttttaagaaactctgtcctcgttcttgggggaaggaaggaaacagagggctggcagctccaactctgacctggtactaagaagagttttggttcctgacccctttgtctccagattgcaggatacctatatggggtgagcccaccagataacccccaggtgaaggagatccgctgcattgtgatggtgccgcagtggggcactcaccagaccgtgcacctgcctggccagctgccccagcatgagtacctcaaggtaatggggagtgatggagcctgggagtgtggaaaagctggtgcgattcctgtctgtggatgggattcagctctgtactcctctttacctataggagatggaacccttaggttggatccacactcagcccaatgagtccccgcagttatcaccccaggatgtcaccacccatgccaagatcatggctgacaacccatcttgggatggcgagaagaccattatcatcacatgcaggtgggcctgggctccttgggaggaagtatggtggggcagggattgcaggccagggcccagaacagtggcctgagctgttactctgtcctcgttcctcccccagcttcacgccaggctcctgtacactgacggcctacaagctgacccccagtggctacgaatggggccgccagaacacagacaagggcaacaaccccaagggctacctgccttcacactatgagagggtgcagatgctgctgtcggaccgtttccttggcttcttcatggtccctgcccagtcctcgtggaactacaacttcatgggtaagtgggaggagcctggggatgtggggatagcagtagggataaggtgaggccatcgccctttgcacttggggcctggctggcttggaggtggcgcaggctgcatgaggcaggagccctgttaacattggctgtttccttctccccgaaggtgttcggcatgaccccaacatgaaatatgagctacagctggcgaaccccaaagagttctaccacgaggtgcacaggccctctcacttcctcaactttgctctcctgcaggagggggaggtttactctgcggatcgggaggacctgtatgcctgaccgtttccctgcctcctgcttcagcctcccgaggccgaagcctcagcccctccagacaggccgctgacattcagcagtttggcctctttccctctgtctgtgcttgtgttgttgacctcctgatggcttgtcatcctgaataaaatataataataaattttgtataaataggagttcaggggctggtttgttttttttttcccccccaaactcaaattctggatttaggtctaacaggaggctggactggagcggttcacagcaagatgctgggctcggctgtgaaggggggagtatgaggcccccttcctattcagggctttggggtagatagcccctggactcagtggagacctgaggcagggctgggctttcacactccgctgccttgaccacatttgctgctttttccacaaaactacttggaagctctcgcctcctttccacagttttgggagcagttgccctttcccgggtctaggaactctgtggcttgtgctgagcggctgcggtgtccagcccagccctttaagctttctgtgtcagtcctggtcaggaaaacaagcacacaggcaggcagtttgtgtacagccgggcggaggccagagaccggctgcctacctgtcacctctcgcctggagcgggccactgccaagttggccccatgactccaaacgggcggagcctggattgggcctgtggggagggctccactcaagtgaccacttgcagccctgaacctcagctcttggacgcctggctggaagttggctgtcttgtttcctgtgaccttgggggtggaaaggacagagcccaggcgacctagggcactatctccctaccccacgccttctcccttcctcgttcctccctacccttatcgcttctaccccgcccacaccg

SEQ ID NO: 16907 - DNA, 2300 bp, Homo sapien
ttgcccaggctggaatgcagtggcctgatttcagctcactgcaagctccgcctcccaggttcacgccattctcctgcctcagcctcccgagtagctgggactacaggtgcccgccaccacgcccggctaaattttttgtatttttagtagagacggggtttcaccatgttggccaggatggtctcaatctcctgacctcgtgatccgcccgccttggcctctcaaagtgctgggattacaggcttgagccaccgtgcccggcccagcaacgcatattcttgaaacatccactttgaccaaatctcttctctacctcacaactcttgctgaattaactcttctttagcttcctagacgttcaacatctggctgggctgtatctgtccagccagtttctcttcctttacatttatagcatgtttcatcttacattcagtccaggatcttagtagcccaaacccctgatgctcatctccaaatctgtgttttgcttgtatttttctttctagaatgaactcccctctttgctctgttaatcacagtccctccttaagacacgtttttttgtgcagcttttttctgatcctagtagccttaatttcttttgttcctgaactctgtaaaacagtgtatagtttagcacatactcatgtgtcagcttgtggtattgtcttgttgaaaggggctgtcagcctggtcattggacacggccatttgatactctttgtaccttctaagtgcctaacatttaacatcagtgttcaatagaaacgtagttggattatttcaaaactaggatattctgttctagttgatctgggagggtagagactaaatttccattttcttctctcttgcttttaagttggctaagtggaagacagctgaggaggtggccgccctgatccgatctctgcctgtggaggagcagcccaagcagatcattgtcaccaggaagggcatgctggacccactggaggtaagagggtggggtggggtaggagaaaagagaccttgagaccttcaggctgtttctcatcttggacttgatcttgtcttaggtgcacttactggacttccccaatattgtcatcaaaggatcggagctccaactccctttccaggcgtgtctcaaggtggaaaaattcggggatctcatccttaaagccactgagccccagatggttctcttcaacctctatgacgactggctcaagactatttcatcttacacggtatgaacctcgggaagagaagatcgctggaggaggagcgggtttagggttaggagaagatcctgtgtcaggtttttgccattttcacatttttagcctatagattgggtgggaactctgttgactttcatgagagtttaagaccttaaagttaaaaatcaactcttggggccgggcgtggtggctcacgcccgtaatcccagcactttgggaggctgagttgggtgaatcacctgaggtcaggagtttgagatcaggctggccaacatgacgagaccccatctctactaaaaatacaacaaaattagccgagtgtgctgggatgcacctgtagtcccagctactcgggaggctgaggcaccagaatcactggaacccaggaggcagaggttgcagtgagccgagatggcaccattgcactccagcctgggcgacagagtaagactgtctaaaaaaaaaaaaaaaaaggccgggcgcagtggctcacgcctgtaatcccagcactttgggaggccgaggcggcggatcacgaggtcaggagattgagaccatcctggctaacacagtgaaaccccatctctactaaaaatacaaaaaattagccgggcgtggtggcaggtgcctgtcatcccagctattcgggaggctgaggcaggagaatggtatgaacctgggaggcggagcttgcagtgagccgagatcatgccactgcactccagcctgggcgacagagcaagactctgtctcaaaagaaaaaaaaaaaattcttgggtttcatgaaaggttaggattaaagtgggagagcctcaagcagctgacctaccccactcttccaaatcttttcccaggccttctcccgtctcatcctgattctgcgtgccctacatgtgaacaacgatcgggcaaaagtgatcctgaagccagacaagactactattacagaaccacaccacatctggcccactctgactgacgaagaatggatcaaggtcgaggtgcagctcaaggatctgatcttggctgactacggcaagaaaaacaagtgagcagtgctggtggggacac

SEQ ID NO: 16908 - DNA, 2300 bp, Homo sapien
ccgaccattaatcgagccaatgtgagtgtgattgacactggagaggggaagctaaagacagttgctgcttcttgccttggttatgtcgtgagcgcccgagtctcttgatctctaatgtcacattgtcgttttcctggcaggtatatgtaggctttcaggtgcagctagacctgacgggtatcttcatgcacggcaagatccccacgctgaagatctctctcatccagatcttccgagctcacttgtggcagaagatccatgagagcattgttatggacttatgtcaggtgggctggaatcgaggggagagggtactgtagagagtcagctcaggtggaattgaggggagagggtactgtacagagtcagctcaggtggaatcgaggggagagggtactgtacagagtcagctcaggtggaatcgtggggagagggtactgtagagagtcagctcaggtggaatcgcagggagagggtgctgtacagagtcagcttaggtggaatcgcggggagagggtgctgtacagagtcagctcaggtggaatcgcggggagagcgtgctgtacagagtcagctcagcttgctcttttgcatatgggaaatccaccctggaagctctgaggatgagactcctattgcctcattatcttattgtacaaactctgattttaattgggcttccttaacaagtcttaatctctccatgttttccttcaggtgtttgaccaggaacttgatgcactggaaattgagacagtacaaaaggagacaatccatccccgaaagtcatataagatgaactcttcctgtgcagatatcctgctctttgcctcctataagtggaatgtctcccggccctcattgctggctgactccaagtaagtgcctcaggacccagccctaggcagccaggacactttcgttttcctgttcttctagccctgcaactttaggaattgtcctgtctgcctttgtttcaaacttggagccagtgctacgcttggagcctgtcaacacccttagtcagatctgctgattctctggggtcctgctgacctggaacaagttggtggagtgggtgggatggttttgggatttaagtggttctggttctggggacattggttatgcccatggtttcttagaagcttgaaccctcttcatcctcagggatgtgatggacagcaccaccacccagaaatactggattgacatccagttgcgctggggggactatgattcccacgacattgagcgctacgcccgggccaagttcctggactacaccaccgacaacatgagtatctacccttcgcccacaggtgtactcatcgccattgacctggcctataacttgcacaggtgagttgaggctcaggaccatgtattttcaggccaggcgcagtggctcacacctgtaatcccagcactttgggaggccgcggtgggcagattgtctgagctcaggagtttgagaccagtctgggcaacatggtgaaaccctgtctctaccaaaatacaaaaaattagctgggcgtggtggtccacgcctgtagtcccagctactcagaaggttgaggtgggagaattacttgaacccgggaggcggagcttgcagtgaaccgagattgcgccactgcactccagcctgggcgacagagtgagactccatctcaaagaaaaataataataataataaataaataaataatccgtgtattttccattagctccatactttaacgtagtcatacttttttactttacctaagtgagaggaagtggcccattcctcctatgggtcactgattctcttctccagcctgtatgtacacatgagcagagtgttgtcagcctggcgaacagtctttcttcctctgtagagttggcagcttgtcttgtttctggggctgtcattctcgtcttaacttttcttgacccttttatcctcacagtgcctatggaaactggttcccaggcagcaagcctctcatacaacaggccatggccaagatcatgaaggcaaaccctgccctgtatgtgttacgtgaacggatccgcaaggggctacagctctattcatctgaacccactgagccttatttgtcttctcagaactatggtgagctcttctccaaccagattatctggtttgtggatgacaccaacgtctacagagtgactattcacaaggtgagtgttagcagcagtgtataggtgcgggactctgtacatggctgtgggagagtaatgggctaagtgtgtacacatgctgggaagaaggcaggatggggatgtgt

SEQ ID NO: 16909 - DNA, 2300 bp, Homo sapien
aaaggacttcactaccatgacgatgatgatgatgaagatgataatgatgatgttggactttctagcacagccagattgatatggtgcctattttcagagcatgccatgttagtttctatatctaaaccttttttggcctggcacggtggctcacgcctgaaatcccagcaatttgcgaggctgaggtaggcagattacttgagctcagtagttcgagaccagcctgacaaacatggagaaacgccatctctacgaaaaatacaaaattagccgggtgtggtggcacatgcctgtaaccccagctactcaggaggctgaggcaggagaatcgcttgaatcctggaggcagaggttgcagtgagccgagattgtgacactgcactccagcctggcaacagagtgagactctgcctcaaaaaacaaaaaacaaaccaaaacccccactttttttctatgaaaccagcctcgctctgtcacccaggctggagtgcagtggtgccatcatgatcctcccacctcagcctcccgagtagctgggactacaggcatgtaccactatgcctggttaatatttttattatttgtagagatgagggtctcagtatgttgcccaggctagtcttaaactcatgagtttaaccaatcctctcgccgctgcctcccaacgtgctaggattacaggtatgagtcacggtgcccggcttctttcttaactctttctagtagttctaccacttgggattacctttttccttcctctccatttacctttatgaaatcctcacatccatccatctccatcaaatctttaacaattctcctctgtcttttttgactgtagggacctttagaacacccagcattaaaaaatagatttcaggccgggcatgggggctcacgcctgtaatcccagcactttgggagggccgaggcaggaggatttcgtaaggtcaggagtttgagaccagcctggccaacatagtgaaaccctgtctctactaaaaatccaaaacttagccggcagtagtggcgcgtgcctgtaatccagctactctggagactgaggcaggagaattgcttgatcctgggaggtggaggttgtgatgaattgagatcgcgccattgcactccagtctgggcaacagagtgagaccctgtctcaaaaaaacaaaaggaatattttttaaatttttaccgttctgaaagcacattgacatcctttgaatttttttctaattatttcactttgatttgtaaattctcaactagattcaggggctgtatgggttacaattcctctgcaccctccacagaatttcagacttttttttttcccccgagacagagtctcgctctgtcacccaggctggagtgcagtggcgcgatcttggctcactgcaacctccccctcccgggtcaagcgattctcctgcctcagcctcccgagtagctgggactacaggcgcccgccaccacgcccggctaatgtttgtatttttagtagagacggggtttcaccatgttggccaggctggcctcgaacttctggctttaagtgatccgcctgcctcggcctcccaaagtgctgcgattccaggcgtgagccaccgcgcccggccaaggtcttaattcttgcctgcctttctgctcccctgtgaactctactggttgtcttttttcctgctttatccctcgtcctcggtagacagtgatggttaaatgaatgaatgcatgaacaaatgactgtccaggagctagtactgcattgcatgtacacattgatgacaacagacatcgtacaatgcgcaatcttggcaaatttattcaaaccctttagacttcgctctctcacagtgcgacgccgggagcccatcacacgctgaggtctgtcagaggccccagaaacagcctcggaaatggaggaggcggggcttcaccccgaccacacccccttgcgttcaaagcctttccgcctatgggcccgcctcctcggcgcagtgtgcaactctaattggtcgtctcactaatccatctgagcacctcggcgccgactggatcaactgctgaactcgggttgcgcacttcccggcgctgggaacgcggagcggacgcagtctggccgccattgcgctgcggggaaagcggcctcttgtgtgagggcctgtggggtgcgtggcaggcgtttaaggccgggctgcgggaggcgtggtcgggtcgggccgagtgaccgaaggggttaggccgggcggggctggatgcactgtgtggcgggactgcaggccggggtccccggacgcctt

SEQ ID NO: 16910 - DNA, 2300 bp, Homo sapien
aaggagagttctgggggcctggattggggaagagtgaggaagggaggaggcctagcgtttgaaagaaggtcagcagaggcccccggggctgtgaggggcggacaggggaccacaggctggagaggagggaggtatcggcagggtggccggggctgtgaggggcgggcaggggaccacaggctggaggggagggaggtatgggcagggtggctgggcagcttccccaggactctcagatgccaggcattccgcttgcgcattccgggtacatctggtatgaattccaggctgtctgccggcccctccatgtctgaactttgttccaagttccaagccccgcccccacagttccaacgcatgaatcagcaggaaaagccgggccctgcagcatggcccagggagggggctgggggcgtggcaggctcgggggatgtgagctggggagggcgggtccgtgctgacactcagtccaagggcatggcccacgccaggctgaggggccaaggcggtcttgccttggaatttctatactcagagggtaagaaagattgggggatacggggtgcggttcaaattccgaaaccctcttgggaggcatgaactttgtgtatcttccttcccctgggtgaccagtccaactccgtccgaccttcctctgtctgagatagctctgttcaacccagaggactcagcagctgctgagagtctgtgccaagcaggtgcccttggctgcagggcggggtgggcccagggcactgaccctctgaccagctgctccatcaaccctctggcactctgacagctcctagcccaatctgacagccaggatgacaggccaaaggagttggaggctggaaccagggccggagggaggtgggggtgacagcctcgccggaggccatggggaggggccaagagttggccgagaggtggggagagaggcagcccagtgatgactaacccaggcgccccacccagccagccggcttcccaggcagtcagggccaggcctgggctaggggcctcacaatcggacaggctggggggaggtgcagaggtgaccttctctcggcccaagacggccagttagtctggggagcgggggttagagtttccaggccctcctcttgccctcttccccccgcccaaccacggtgaaaccctaacctttgggttgcataaggccccggcaccgccgccccctactcctctcccctccccccttacataacatcccctggagagaacgagaggaggggccggcccgcccagcgaccccttccctgccagggcgctgaactggccctgacccagtgaacgccggcagaggcaaagcacctcctcgccgcccgctcggggggtccagaccctccccaggctagatggccggcccctgtatcctcagaccgggggccgccgggtgagccgcccccggccctccggcccctcggctctccccccgccccccgccactccgccagcccttccgccacgactcccgtcccagactctttcctcgtagctcctgacacactaacccggccagtccaggcccctctccccgaggcgcccctgcccccgccgccccttctcctcccggaagggctgggtgtggccgcccggaccccactttcaccctccatcccgttaccgcggctccccgctgcgtgaccgggtcgccagctcacacccacctggtgctgggtgtgggggttgctgcacgagggggagcaaatcactgcgtccgctccccacggccggcggcgctgtctcttctcggcacccagcacacaccggctccaggctccgatcagctggcggcgtcgtgacgcacgagctgcgaatgcacggcccggggccaatcaccgcccactgctgggcaacgtggccccgcccacccgggggccgacggggcctcgccctggtcccgcctctccgggcgccctggctctgattggcaaggaggccacccttttgccgggcggaattgcacgaagccacgcccacccactgaggagccggccaatagacggacaggtgtggcccagccctccgcgtcagcgacccgcttagaaaagcgctacgtcaaacgagagtcctaaagagcaggcgaaagccacggcgtctgcgtttgcaatgcatgctggtccgtgtagttctcagcctgacaccgtcgttcccagaacccagcgcgctctgtgagttggcatttttaaactgagctcggaatccagcccggggaagtccttaaagggcgacagcccctccttgttggagtcgtgagtgcttcttttagacat

SEQ ID NO: 16911 - DNA, 2300 bp, Homo sapien
acaccatctctactaaaaatacaaaaattagctgggagtggtagcgcacgcctgtaatcccagctactcaggaggctgaaggaggagaatcgcttgaacccgggaggtggaggttgcagtgagccgagatcgcgccactgcactccagcctgggcaacagagcgagactctgtctcaaaaacagaaaaaaaaaaaataaataaggaggtggagtaaatgggcaaaagcaggaggatcccatcagcagacacctgtccatggaggaatagggcaacttgagtaggaagtagggggcggctggcctgagaagcagcgttctgaaccccaagtttgcttcccatagccattcctcctccccaggcttggtcctcgggttcactgtaccctccccagcgccagccaccattctggacctccccagtactggccttcccctagaccagggagggtctagaccacagagtctgaatttactgtgctaacaggaaatacctctctttccaagcccagagcctctgaagaactaaggagcagagcggggttggggttgggggagacagtcttggagtgatgggggaaaagaaagatcatacaatcacatcccccacgttctttccttcaccacccatgggagtggataaggggatggaggagggtaagcaaggaggaggatgtggtaacagctgattcgtccccagaggtcacactttccaacaatcagctgttactggggcgcaaggcaggaagtttccttaaaggcgcaatgtcctgaacgcaggctcagaattttggagctccaagtgaaccttatcaattacctgatggagtgcgtatttaacagaaggaaggatctcaccctccagcctcatcattcctgcttagttaccctcagcccctatttggagctgaaggaaaaggcatggatttcagtccacatgttcctctttgggggacttgcggggattgataaggtagggcaggtctccggcttgcccctttaaaaacgccgaccagcagcttttgccaagtcactgggttcatttcactttttgcccatcccccgctcatctagactctgattggcccctggggaaggagcagcctgctcattggtctccaccttcgaatctcttccctaagtaggcctgagtcagtgaagagctttggagggcgggactgaatgggggttaatcagaggatgcgattgctgaccctttgcactttggcatggcccatcccctaatttctgaccagaagccctccctctaccctaaggtgaggactgtgctatgaatcttttgttagaaagctacctcttgggaggctctgggggctcttctgggactgggaagagacatccaagaaaaaaagcctcctgtggttaggaagagcccccaggaggagtgggctgggcgaggcgagcaccctccctcctccaaaaaccctggagagctctccaacggcagtctctgctgccctgggggctgacgctctgcccactcctgctccttggtccgctccacctttccttaaagagctatagcgtcccgcagaggccggcgagtcagtttggggaatgtctaaaagaagcactcacgactccaacaaggaggggctgtcgccctttaaggacttccccgggctggattccgagctcagtttaaaaatgccaactcacagagcgcgctgggttctgggaacgacggtgtcaggctgagaactacacggaccagcatgcattgcaaacgcagacgccgtggctttcgcctgctctttaggactctcgtttgacgtagcgcttttctaagcgggtcgctgacgcggagggctgggccacacctgtccgtctattggccggctcctcagtgggtgggcgtggcttcgtgcaattccgcccggcaaaagggtggcctccttgccaatcagagccagggcgcccggagaggcgggaccagggcgaggccccgtcggcccccgggtgggcggggccacgttgcccagcagtgggcggtgattggccccgggccgtgcattcgcagctcgtgcgtcacgacgccgccagctgatcggagcctggagccggtgtgtgctgggtgccgagaagagacagcgccgccggccgtggggagcggacgcagtgatttgctccccctcgtgcagcaacccccacacccagcaccaggtgggtgtgagctggcgacccggtcacgcagcggggagccgcggtaacgggatggagggtgaaagtggggtccgggcggccacacccagcccttccgggaggagaaggggcggcgggg

SEQ ID NO: 16912 - DNA, 2300 bp, Homo sapien
gggttcaagcgattctcctgcctcagcctcccaagtagctggaattagaggcgtccgccaccacacctggctaatttttgtattttagtagagatggggtttctccatgttggtcaggctggtcttgaactcctgacctcaggtgatctgcccatctcagcctcccaaagtgctgggttacaggcatgagccaccgcacccggccctcctattttctctcctatcaggcctagttttcttttcttttctttctttctttttttttttttttgagacggagtctcactctgccacccaggctggagtgcagtggtgtgatctcagctcactgcaacctccgcctcccaggttcaagcgattctcctgcctcagcctcctgagtagctgggattacaggcacccgctgccacacccggctaatttttttgtgtttttagtagagatggagtttccccaagttggccgggctggtcttgaactcctgacctcatgatccgcccaccttggcctcccaaagtgctgggattacaggtgtgaaccaccgtgaccggccaaggcctagttttcctaagtgtctttatgggaccctcacacctgtacaccaaactccttcaagaggcaaactctctcctaagagggagacaaaagaaacagggccagtggtttcactgtagacaatggtctatctgtcctgcagatgagtcagaactaagaccccttgaggaatcatgttgctttggtgccggctgtctggtttctattccatatcctgtgccgcacccttcccccagccacagtgacatctggaggctctgaccacagctggcaggctctgtggtaccgcagaggccaatcttcaacaggaagtcttgggggaacatttcttcccccaaaacaccaggcctctgggcctgggccacttctctccctcagacagcccagggtttcgttttatttttattttattttatttatttatttttatttatttatttggttttatttttatttatttatttttatttatttatttatttatttatttatttatttatttattctttttgacggagtctcgctctgttgcccaggttggagtacagtggcgccatctcggctcactgcaagctctgcctcctgggttcatgccattctcctgcctcagcttcccaagtagctgggactacaggcgccccccaccacggccaggtaattttttgtgtttttagtagagacggggtttcaccgtgttagccaggatggtctcgatctcctgacctcgtgatccagctgcctcagcctcccaaagtgctgggattacaggcgtgagccactgcacccggccagttttgttttttaaaaagccgtgagagggctgtcaggaggcagtgctcctgggcagaaagaaggctggcaccagtttctaagtctccattccgccaggcggacaagcctctctggcggttgttggttatcacttgtaaaatataaacagtaataactgtcctccctacctcacagagtgtgttgcgagggccaaatggaatgtgactgttgaagtacttaggaaagttaaaaagctccttcctatggaaggtggcatggaggcgccggggggattccatgtcaaaagtcccagttctggccgggcgcggtggctcacgcctgtcatcccagcaccttgggaggccgagacgggtggatcacgaggccaggagttcgagatcagcctggccaacaaggcgaaaccccatctctactaaaaaatacaaaaattagccgggcgtggtggcgcgctcctgacgtcccagctactcgggaggccgaggcaagagaatcgcttgaacccgggaggcagaggttgcggtgagccgagatcgcgccactgcactccagcctgggcgacagagcaagactccgtctcaaaaatagacacaacagaagtcccagttctgcccctggttgtgcggtccgcacttaactaagaggctggcatctctgggaacagcctccgggacccgcgcgctggtgcgtgctggagggagtagggaggggtggggcggtaggcatcgccctccgccgggcccggctggagctggctggagaccctttcagccccgggaggaagcggagcccagaccgagccagagcggagcagcgggagggagggcggggaggccgccgggcaggaagcggggtcccgcccgggcctctggagccacgtgcgcttgtttccgtgctggggcgatcacgtgacccgcgtcagctgacccgtcacggtggagcccggtgctcgcgcc

SEQ ID NO: 16913 - DNA, 2300 bp, Homo sapien
tgtccctgccttggactcagtacggcaggctctgcagagggtctatggttgctccttcctgccagtgggtgaaactacccaatgcccttcatatgccagagaaggcccctgcccccctcggggcagccctgcttgccctagtcttttacgggctgaggccttgctggagtcgccggagatgctgtatgtggtacacccttacgtacagttctccctacatgacgtggtcaccttcagccctgccaagctgaccaacagccaggccaaggtgctgttcattctcttccgcgtgctgagggctatggacgcctgtcaccgccaggggctggcgtgtggggccctgtctttgtatcacatcgcagtggatgagaagctttgcagcgagctgcgactggacctgagtgcttatgagaggcccgaggaggacgagaatgaggaggcccctgtggcaagggatgaggcgggcattgtgtctcaagaggagcagggagggcaacctgggcaacccactggccaggaggaacttcggagcctcgtgctagattgggtccacggccgcatcagcaacttccactacctcatgcagctgaatcggttggcaggtcggcggcagggggaccccaactaccaccccgtgctgccctgggtggtggacttcactacgccccatgggcgcttccgagacctgcgcaagtccaagttccgcctcaacaagggggataagcaactggacttcacgtatgagatgacacggcaggcattcgtagcaggcggggcgggcggcggggaaccccctcatgttccccaccacatctcagacgtgctctccgacatcacgtactatgtgtacaaggctcggcgcacgcctcggtcggtgctctgcggacacgtccgcgcgcagtgggagccccatgagtatccggccagcatggagcggatgcagaactggaccccggatgagtgcattccggagttctacaccgatccctctatcttccgctccatccaccccgacatgcctgacctggatgtgccagcctggtgcagctccagccaggagttcgtagctgcccaccgagccctgctggagagccgcgaggtatcccgggacctgcaccattggatcgacctcacgtttggctataaactccagggtaaggaggctgtcaaggaaaagaatgtgtgtctgcacctggtggacgcccacactcacctggccagctacggggtggtgcagctcttcgatcagccacacccccagcgcctggctggggctcctgcccttgcccccgagcctcccctcatccccaagctgttggtccagaccatccaggagaccacaggccgggaggacttcacggaaaacccgggacagcttccaaatggagtgggccggccagttttagaggccactccctgtgaggctagctggaccagagacaggccggtggcaggagaagacgacttggaacaggccacagaagctctggattccatttcccttgctgggaaagcaggtgaccagctgggctcctccagtcaagcgtcccctggacttctctctttctcagtggcctcagcctcccgtccaggccgcaggaataaagctgctggggcagaccctggggagggtgaggaggggaggattcttcttcccgagggcttcaatcccatgcaggccctggaggagctggagaaaacgggcaacttcttggccaaaggcctagggggcctgttggaggtgcctgagcagccccgggtccagccggctgtgccactgcagtgcctactccacagggacatgcaggcgctgggtgtcctattggcagagatggtgtttgccaccagggtgcggacgctgcagcccgatgcacctttgtgggtacgcttccaggctgtccgagggctctgcacgcgccaccccaaggaggtccctgtgtctttgcagcccgtgctggacacactcctgcagatgagtggccccgaagtccccatgggagcagagaggggcaagctggaccaactgtttgagtacaggcctgtctcccagggcctgcccccaccctgcccaagccagcttctcagccccttcagctccgtggttcccttcccaccctacttcccggcactgcacagattcatcctcctgtaccaggcaaggcgtgtggaggacgaggcccaggggcgcgagctggtgtttgctctgtggcagcagctgggcgcggtgctgaaggacatcacccctgagggcctggagatcctgctgcccttcgtgctctcactcatgtccgaggagcaca

SEQ ID NO: 16914 - DNA, 2300 bp, Homo sapien
gtgctagattgggtccacggccgcatcagcaacttccactacctcatgcagctgaatcggttggcaggtcggcggcagggggaccccaactaccaccccgtgctgccctgggtggtggacttcactacgccccatgggcgcttccgagacctgcgcaagtccaagttccgcctcaacaagggggataagcaactggacttcacgtatgagatgacacggcaggcattcgtagcaggcggggcgggcggcggggaaccccctcatgttccccaccacatctcagacgtgctctccgacatcacgtactatgtgtacaaggctcggcgcacgcctcggtcggtgctctgcggacacgtccgcgcgcagtgggagccccatgagtatccggccagcatggagcggatgcagaactggaccccggatgagtgcattccggagttctacaccgatccctctatcttccgctccatccaccccgacatgcctgacctggatgtgccagcctggtgcagctccagccaggagttcgtagctgcccaccgagccctgctggagagccgcgaggtatcccgggacctgcaccattggatcgacctcacgtttggctataaactccagggtaaggaggctgtcaaggaaaagaatgtgtgtctgcacctggtggacgcccacactcacctggccagctacggggtggtgcagctcttcgatcagccacacccccagcgcctggctggggctcctgcccttgcccccgagcctcccctcatccccaagctgttggtccagaccatccaggagaccacaggccgggaggacttcacggaaaacccgggacagcttccaaatggagtgggccggccagttttagaggccactccctgtgaggctagctggaccagagacaggccggtggcaggagaagacgacttggaacaggccacagaagctctggattccatttcccttgctgggaaagcaggtgaccagctgggctcctccagtcaagcgtcccctggacttctctctttctcagtggcctcagcctcccgtccaggccgcaggaataaagctgctggggcagaccctggggagggtgaggaggggaggattcttcttcccgagggcttcaatcccatgcaggccctggaggagctggagaaaacgggcaacttcttggccaaaggcctagggggcctgttggaggtgcctgagcagccccgggtccagccggctgtgccactgcagtgcctactccacagggacatgcaggcgctgggtgtcctattggcagagatggtgtttgccaccagggtgcggacgctgcagcccgatgcacctttgtgggtacgcttccaggctgtccgagggctctgcacgcgccaccccaaggaggtccctgtgtctttgcagcccgtgctggacacactcctgcagatgagtggccccgaagtccccatgggagcagagaggggcaagctggaccaactgtttgagtacaggcctgtctcccagggcctgcccccaccctgcccaagccagcttctcagccccttcagctccgtggttcccttcccaccctacttcccggcactgcacagattcatcctcctgtaccaggcaaggcgtgtggaggacgaggcccaggggcgcgagctggtgtttgctctgtggcagcagctgggcgcggtgctgaaggacatcacccctgagggcctggagatcctgctgcccttcgtgctctcactcatgtccgaggagcacacagctgtgtacacggcctggtatctgtttgagcctgttgccaaggcactgggccccaaaaatgccaataagtacctcctgaagccgctcattggtgcctacgagagcccctgccagctacacggccgcttctacctgtacacggactgctttgtggcccagctgatggtgcggctgggcctgcaggcatttctcactcacctgctgccccatgtcctgcaggtgctggcgggcgcagaggcctcccaggaggagagcaaggacctggcaggggctgctgaggaggaggagagcgggctgcccggggccgggcctggctcctgtgcttttggggaggagattcccatggatggggagcctcctgcctcctcgggcctggggctcccagactacacgtctggcgtcagcttccacgaccaggctgacctccctgagacagaggacttccaagccgggctctatgtgactgagtctccccagccccaggaggctgaggctgtgagcctgggccggctgagtgacaagagcagcaccag

SEQ ID NO: 16915 - DNA, 2300 bp, Homo sapien
ttcccacccctccctcaaaccaccccccggccaggtgctgggtcccagtctaagtgccagccttgggtagggccaggctgggcccccagctagagtgagctcaagcggccagcacagccctgcagggccaggctacccccggccctccactggcgactcagggctgctggcccttccgtggcaggacccactcggcagcagttcacagtgagcagtggcgagagcccaccgctgagcgccggcaacatctaccagaagaggccggtcctgggcgacatcgtgtcagggcctgtgctcagctgcctcctccacatcgcccgcctgtatggggagcctgtcctcacctaccagtacctgccctacatcagctacctggtcagtcgctggtttggcaggcccggggctgggaaggctgaggacctgagggccggcccgggctctcttggtgccagggggtctgtggggctgcccggccctcatctgctcggtggctctaggtggccccagggagtgcctcaggccccagccgactgaacagccgtaaggaggcggggctgctggccgcggtgacgctgactcagaagatcatcgtgtacctctcagacaccacactcatggacatcctgccccggatcagccatgaggtcctgctgcccgtgctcagcttcctcacctccctcgtcacggggtaggcctctgccccagctgatgtagggggaccggcccagcggaggggctgcccaggagggggtgggaagctcaggggagaggacgtaacactggactgggtgtcaagagtcctggttttgatcccggctgtgtgaccctgagcaaaccacacccttttcctgtgcctcagtttcctcatctggtttggaccagttggtcttggagctctttcatttaaagcttttgatatgtccgggcacggtggctcatgcctgtaatcccagcactttgagaggctgaggcgggaagattgcttgagcccaggagttcaagaccagcctgggcaacaaaatgagaccccctctctaaaaatatatataaaggccgagcgtggtgtctcacccctgtaatcccagcactttggggggccaaggcgggtggatcacgaggtcaggagtttgagacccacctggccaacatggtgaaaccccgtctccactaaaaatacaaaatcttcgctgggcatggcagcaggtgcctgcaatcccaggttctcgggaggctgcaatcccaggttctcaggaggctgaggcgggagaattgcttgaacccaggaagcggaggttgcagtgagctgagatcacgccattgtactgcagcctaggcgacagagcaagactctgtctcaaaaaaaaaaaaaagtatatatatatgctgggtgctgtggctcatgcctgtaatcccagcactttgggaggccaaggtgggtggatcgcttgaggtcaggagttcgagaccagcctggccaatatggcaaaaccctgtctctactaaaaatacaaaaaaaattagccgggtatggtggctcatgcctgtagtcccagctactcgggagactgaggcaggagaatcgcttgaacccgggaggcagaggttgcagtgagccgagatcgcaccactgcactccagcctggatgacagagcaagactccatctcaataaaaataaaaataaataaagattttgctagattctggtcaagtcctgcagaacggcgggctggagctcatgagctctgtttccaggttcccaagtggggcccaggctcggaccatcctgtgtgtgaaaaccatcagcctcatcgccctcatctgcctgcgcattggacaggagatggtccagcagcacctgagcgagcccgtggccacctttttccaggtcttctctcagctgcatgagcttcggcaacaggtgggcagatctgctgggccagggcgggctggggcgggggctgtggacctgggtgaccccctgggcatcttgctcataggatctgaagctggactccgcgggccgtggcgaggaccagggtgggccagggtgggagctgtggacccggctgaccccctgggtgtcttgctcataggatctgaagctggaccctgcgggccgtggtgagggccagctgccacaggtggtcttctctgatgggcagcagcggcccgtggaccccgccctgctggacgagctgcagaaggtgttcaccctggagatggcatacacaatctacgtgcccttctcctgcctgttgggtactgccccatcacgttccccatcacagtcttcgtggc

SEQ ID NO: 16916 - DNA, 2300 bp, Homo sapien
gggaaggggcctgatgcagggagtgaggcgcaggacagtgagggtgggaaggggcctgatgcagggagtgaggagccggacagtgagggtgggaaggagcctgatgcagggagtgaggcgcaggacagtgagggtgggaaggggcctgatgcagggagtgaggcgcaggacagtgagggtgggaaggggcctgatgcagggagtgaggagccggacactgagggtgggaaggagcctgatgcagggagtgaggcgcaggacagtgagggtgggaaggggcctgatgcagggagtgaggcgcaggacagtgagggtgggaaggggcctgatgcagggagtgaggagccggacagtgagggtgggaaggagcctgatgcagggagtgaggcgcaggacagtgaaggtgggaaggggcctgatgcagggagtgaggcgcaagacagtgagggtgggaaggagcctgatgcagggagtgaggcgcaggacagtgagggtgggaaggagcctgatgcagggagtgaggagcaggacagtgaaggtgggaaggagcctgatgcagggagtgaggagccggacagtgagggtgggaaggagcctgatgcagggagtgaggagctggacagtgaggatgggaaggagcctgatgcagggagtgaggagcaggacagtgagggtgggaagtggcctgatgcagggagtgaggcgcaggacagtgagggtgggaaggagcctgatgcagggagtgaggagcaggacagtgagggtgggaggcggcctgatgcagggagtgaggagccggacagtgagggtgggaggcggcctgatgcagggagtgaggagcaggacagtgagggtgggaagtggcccgatgcagggagtgaggcgcaggacagtgagggtgggaaggagcctgatgcagggagtgaggagccggacagtgagggtgggaaggagcctgatgcagggagtgaggagccggacagtgagggtgggaaggagcctgatgcagggagtgaggagcaggtgtgagggcgggaagcggcctgatgcagggagtgaggagcaggacagtgagggtgggaaggggcctgatacagggagtgaggagcaggacagtgagggtgggaaggagcctgatgcagggagtgaggagccggacagtgagggtgggaagcagcctgatctttgcacgggctgccaggcttctggttcatacagccccaggtcagtttccagaaccctcgctcttgggtaggggaaagagacattgctctggagtggcaggacggtgggagaagttgagtccctctcatttctcctccctcaccccctgccttccatcccagtctgaaggcagccaacctgatcctgggcttggaaggttgggggtgggcttcctatcctgggctctctgcataggctcttgtggcttcccctttcctcccctcaggagcgggaggcagctctctgggagaagaaaggacattgggagtgagaatctggatgtgcctcagcccagctctgtgtccttgggcaggtcacatggcctctctgagcctggctgaaccagggataatccacacctcgtggggtctctggaaggcttaacacagtgctaggttcctgtgctttctggatccgccctcttggctagccagatccagtctcttcaactctctcctcctgaactttctctttccaggctcggggggggggacccaaatatagggggttctgcgtggctgcctcagggttagatgccctggtgggaaaggggcttctggcttcaagatcaatgtttaactggatgtgcaagtcaatatttaccagaagagaaagcaatctgaacaggggttggctgagagtaaaggtcctggtgggaggggaggggtgggctgggccagctggagcctgggcagagagtgaggagcacccaagtggggccagaggaacgttgtgtgtggcagcaaggagcccgcagaggtatgaggggaggggctgctcggcctgctccttgggtaggagaggaggagggagctgcctccctggctgaggggtctgggatttattcaggaggcctgtcactccccagcctcttctgggacttgaaaaactggagcctgttcttggcaagaagattctaatgcccaggtcggagtcggggccctggccaagggctcttgtgtgggatgggggtggggccggggggaccaaaggatcctccagaagggttggccccaagatgggggtgggctggaggtagctgagacctgctctgacttatcctcctgagaccaaca

SEQ ID NO: 16917 - DNA, 2300 bp, Homo sapien
gcaaggagcccgcagaggtatgaggggaggggctgctcggcctgctccttgggtaggagaggaggagggagctgcctccctggctgaggggtctgggatttattcaggaggcctgtcactccccagcctcttctgggacttgaaaaactggagcctgttcttggcaagaagattctaatgcccaggtcggagtcggggccctggccaagggctcttgtgtgggatgggggtggggccggggggaccaaaggatcctccagaagggttggccccaagatgggggtgggctggaggtagctgagacctgctctgacttatcctcctgagaccaacacctgcccttcccagagccagcctggagcagaggcctgtgatgctcctaagtgcagaggtggctctggccagagtcattcactgggctctgctgctgggtcaaaaggcagctctctggctgccttgccacccatggtgagacctcagggcctcacaggtatgtccagccttgtgggcaagacctgaccagcctgagaaagacgggttggggccaggcgtggtggctcatgcctgtcatcccagcactttgggaggctgaggcaggtggatcacctgaggtcaggagttcgagaccagcctgaccaacatggagaaaccctgtctctactaaaaatacaaaattagccaggcatggtggcacatgcctgtaatcccagctactcgggaggctgaggcaggagaatcgctttaacccaggaggtggaggttgcagtgagccgagatcgtgccattgcactccagcctgcatgataagaatgaaactccatctcaaaaaaaaaaaaaaaaaaaaaaaagacaggctaaatggatgcagcaggctgggtaggagctctgtgttggagctctgcggtggaggcttcagggcaggcttcccagaagaggtggccttgagccaagctgaccccagccatcgggggagtgccaagcattgtactcagggtttacaaagatggtcttatttatttttttgagacagagtcttgctctgtcgcccaggctggagtgcagtggcgtgatctcggctcactgcaacctccgcctcccgggttcaagcagttctctgcctcagcctcccgagtagctgggattacaggggcccaccaccacgcctggctaattttgtattttcagtagagatggggttttaccatgttggccaggctggtcttgaactcccgacctcaggtgatccacctgcccctggcctcccaaagtgctgggattacaggcttgagccaccgtgcctggccacaaagatggtcttttgccgggtgcagtggctcatgcctgtaatcccagtactttgggaggccgaggcaggaggatcacctgaggtcgggagtttaagaccagcctgactaacacagagaaaccccgtttctactaagaaatacagaattagccaggcgtggtggtgcatgcctgtaatcccagctattcgggaggctgaagcaggagaatcgcttgaacctgggaggtggaggttgcggtgagccgagatcctgccactgcactccagcctggtcaacgagagcgaaactccgtctcaaaaaataaacaacaaaaaatcccaaaaagacggtcttattttggtcctcaccatgcatgtgagaagagtgagggacttgtgccaccgttttacaaggtaaggccaagcctggtggagttacgggaaatgccgaggtcctttggcaagaggtagcctggattcagacacagatctgattcacagcgcagggccttgtagaatgagaacgtttttgatttggtatctccctcctattcaccaaaacaccctcagtgcatgaaatgcatgaaatatgaaacaccagaaactaaaaagggggagaagccagggcggatgtcccagctgcaggagtgggagccgctgctcgtgtgtttggggtctgttctgattctggagcctgcttcttccccttggcaatcatgacccaggacttggcgttatctgtgatcgcgtgggtaggattccctggcgggcgtggggatgtgagatgggaacagagctttctgtccctgccacaggaacatggcgctgctctgggggctcctggtgctcagctggtcctgcctgcaaggcccctgctccgtggtgaggctgggctgaagtcaaggtggggtggggtggagggggaagaagaggggcgttggcatggagggagggcttggctccgaggggacctcctatcctcatccctttctccacagttctcccctgtgagcgc

SEQ ID NO: 16918 - DNA, 2300 bp, Homo sapien
attgccagttcttctcccaaaccaggaggctggcgctgttctgagccgccctgttgccggctgcctgaggcatagagagaagaagaagccaggagcagagccaggctggcgtggaggtgtcccgggggagggctggcgaggtcagaggggaccacggggtggaggatgcctggcgagcggccagaggccaaacgtggcactgcgcgggctgccacccctgctgggcccagggttcctcagcacagtccaccctgcggccgcctccctgccttccccaccatcctcacttgtccccacccatgcccagaacggtgacatcaaaccagccaggcccattcattctttattcaggtggcataaaaatcactacaaaaaccttacaaaagagccttaaggagctcatgggatccttccctgcctcggttcctgagctcccgggcagaggagggagacaggagaggaaggaagggaaatgctggcagtgttgggatctcgaggagccgtgggaagtctggcgtgacaaggcacagggggtaggatggaggctgatggactctcggcaggttaggccacagccaggctgtgccagacacgagttccacgcggggctgaggacaacgcttcgcctcccgagccaccaccagggcccgtctctccccaccctagcctaggtgtcccgggacaagtccaaaggcagccctctccccctccctttttctctggtaaacaaaagtcggggtgtcccagctgacgtggggagcagctaacctgtctcctggcagaactagaagcacctccctcctgcccaggccccggtgcaggacaccctctgagcctgtttggaagaaagatgagggtcaggctcccggctccccgatgcctgccctcctcccagccgcgccccccccccaccctaaactccccaagaggtgttgggaaagaatggcctctctcagactgcccccggcccctgccccagtgccacaaagccggttggaaagagtcacatgagtggagaggctggtccaggcagggactctggatgccacagccacggcccctcacttggggctgccaaactgggggtaatcctcctccatggggggcacaagttttaagtcagggccgaaaagcttgtctccgcgggggaagcctttcaggctctggaggaagtccttgttgcccggggaatcctgctgttccttgagctcccgcggtgcactggggttggggttcctcacgctgcccacgaagaggggaaggcctgtggtgtcctcgaagatgaagaagaggaaggggcggttcacgctgaaggaggacagggacatgcgggacatggcaatgctggtggccgccgccgcctccacgccgacctcgctgagctccagggtggactgatgctgcacgccggacaccaccaggctctgctcggagatcccacgcaggtctggggcctggaacaactcctgcaggcctgcccagggccagagatggctggtcagagctgcccttggcctcacaggctcctggagctgcttgggagggtgtctgagatcctggccagggaacagcttgaactcacagatacctgcttcattcctatccggtttccaagactcagcttaaacaccacctcctccaggaagccttccctgatccccagctctaaagtccaaccaaggtacattttcagtgttctcccaggtgagctggagagaagccctctctgtcttatcgcttatgctgtagtaagtatgtgattgctcgtctgcccaccccattagactcagctgtttgtacatggtgggctcccggtacctggtacagtgcctggaatacagcagctgcttagcaaatggctgaaggatagatgctttatttatttattttagttattataatttttttttgagatggagtctcactctgtcatccaggctggagtacagtggcgtgatctcggctcactgcaacctcctcctcccaggttcaagcaattctcctgcctcagcctcccaagtagctgggattatgggcatgcgccaccacgcccggctaatttttgtatttttagtggagacgggtttggccatgttggccaggctggtctcaaactcatgacctcaggtgatccaccctctttggcctcccaaagtgctaggattacagacgtgagccaccatgcccggcctttatttttatttttgagacaaggtcttagttcttttgctgaggctggagtgcagtggcacaattatggctcactgcagcctcagccacctggggtcaagagggcctcc

SEQ ID NO: 16919 - DNA, 2300 bp, Homo sapien
gatttccagtcactggattctactcttgggatgcagtgtttttcatctcttttttgtatccttttggaaatagtattctgctttaaaaagcaaatacaggccaggtatggtggctcactcctgtaatcccagcactttgggaggccgaggcaggtgatcacctaaggtcaggagttcaagaccagcctggccaatatggtgaaaccctgtctgtaccaaaacacaaaaacaaaaacaaaaacaaaaattagccgggcgtggtggcgtgctcctgtaatcccagctactcaggaggctgaggcaggagaatcgcttgaacctgggaggcagaggttgcagtgagccgagattgtgccactgtactccagcctgggccacagagcaaggttccatctcaaacaaaacaaaacaaaacaaacaaaaaaacaaaacaaaagctaatacaaacacatatacaatagacaaaactgtaaatattttattatttttattttttttagtagagacagggtttcaccatgttggccaggatggtctcaaactcctgacctcaggtgatccacccacctcagcctcccgatagttaggattacaggcatgagccaccacacccggcctaaaattgtaaacgttttagaagaaagtatagatgaatcccttcgtgatctcggggaagaagagattttttaaaaaagataccaaaagaagcacaaattataaaagaaaagattgaaaatgttggtgttaaaattaaaaacttgttttaaaacaagcttgtgtaacccatgacccacaggctgcatgtggcccagaaaagctttgactgcagcccaacacaaattcgtaaactttcctaaaacattatgagattttttttgagattttgttttgttttgttttttgtttttttagctcattcggtatcattaatgttagcatattttacgtggggcccaagacaattcttcttccaatgtgtctcaggggagccaaaagattggacacccctgccataaacatgaaaagacaatggccgggcacggtggctcacgcctgtaatcccagcactttgggaggctgaggggggcgggatcacctgaggtcaggagtttgagacaagcgtgaccaatgtggtgaaaccctgtctctactaaaaatacaaaaattagccgggcatgctcgtgcacacctatagtcccaactactcagcagggtgaggcaggagaacctcttgaacccgggaagcggaggttgcagtgagccgacattgcacccctgcactccagcctgggtgacagagtgagtctccattggaaaaaaaaaaaaaagaacagtgtgatacattgacctaaggtttaagaacatgcaaactgatactatatatcacttagggacaaaaacttacatggtaaaagtaaaaagaaatgtacgaaaataataaaaatcaaattcaagatggtggttatggtgacgggaaagaactgaggcggaaatataaggttgtcactatattgagaaatttttctatctttttttcttttttctttttttgagacggggtctcgctctgtcgcccaggatggagtgcagtggtgtgatctcagctcactgcaacctccgcctcccaggtttaagtgattctcctgcctcagactcccaagtagctgggactacaggtgcgcgccaacacacctgggtaattttgtttgtatttttagtagagatggggtttcaccgtgttggctaggctggtctcgaactcctgacctcaggtgatcccccggcctcggtctcccaaagtgctgggataacaagcgtgagccactgcgcccagctttgtttgcatttttaggtgagatggggtttcaccacgttggccaggctggtcttgaactcctgacctcaggtgatgcacctgcctcagtctcccaaagtgctggattacaggcgttagcccctgcgcccggcccctgaaggaaaatctaaaggaagaggaaggtgtgcaaatgtgtgcgccttaggcgtaatggatggtggtgcagcagtgggttaaagttaacacgagacagtgatgcaatcacagaatccaaattgagtgcaggtcgctttaagaaaggagtagctgtaatctgaagcctgctggacgctggattagaaggcagcaaaaaaagctctgtgctggctggagccccctcagtgtgcaggcttagagggactaggctgggtgtggagctgcagcgtatccacaggtaaagcagctccctggctgctctgatgccagggacggcgggagaggctcc

SEQ ID NO: 16920 - DNA, 2300 bp, Homo sapien
gcaatacattgaaccctttataacttttctttattgattgtttctgttttcctttttctttatttttttttatttttgagacagggtctctgttacccaggctggagtgcagtgactcgatcatagctaactgtgatctcaaactcctgggctcaagcagtcttcctgctttagtctcatgagtagctaggactacaggtatgtgccaccaggcctggctaattgtttaatttttttatagagcccagggtctcatctgtgttgtccgggttggtctcaaactcctggactcaagtgatccgcccacctcggtctcccataatgctgggattacaggcgtgagccaccatgcccaaatgttttccttcttataataatgattatcatttattgagcacatactgtgttccaggtgctccttttggcatgttagatatattatttccttttatccttaaaacaacactgggagatattattatccctgttttttagataaaattaagacacagaaattaagtcgattgcacaaggtcatgtggctagtaagaggcagagtgtatttggttttttgtttgtttgtttgtttttgagacagagtgtcgctctgtcacccaggctggagttcagtggcatgatctcggctcgctgcaacctcagcctcccaggttcaagcgtttctcctgcctcagcctgctgagtagctgggactacaggcgcccaccaccacgcccagctaattttttgtgtttttagtagagatggggtttcaccatgttagccaggatggtctcgatcacctgacctcgtgatctgctcgcctcggcctcctaaagtgctggggttacaggcatgagccaccgcacccggccagcagagtgtatttgaatgcaggtctgcttggactcaaagcctgcctctttttttttttttttttttttcaaagcctgcctgttagtcaccatgctataattcttctattcataagacttctttttccttaaaaaatagaaatatttaatccaggggctgggcgcagtggctcatgcctgtaatcccagcactttgggaggctgaggcgggcgtatcatgaggtcaggagatcgaaaccatcctggctaacatggcaaaaccccgtctctactaaaaatacaaaaaaaaatagctgggtgtggtggcgggcacctgtagtcccagctactcaggaggctgaggcaggagaatggcgtgaacccaggaggtggagcttgcagtgagccaaggtcgcaccactgcaatccagcctgggcgacagagcgagactccgtctcaaaaaaaaagaaaaaatttaatccaaaaacattaagcataacaatatcctcaacaagtattgctaatcactcaaaggatcacacagaactatatgattttaataagcatgtggttgtaattgttccattttttaataatccttaactttcctgtagatttttggaaacattttcagtaaacattgaagaatagggaccaagggtcattgtgggattttctttctgttttcagacgtgtcttaaagacattaacagagcacagacacatgggtatccagaaaggttgcaacccaagattatgttacgtaaagcagaatgtctggtggccctggggagactgcaggaggcaagccagaccatcagtgatcttgaaaggaacttcacagccacaccagccctagcagatgtcctccctcagactctgcagagaaacctccatcgtctgaaaatgaagatgcaagaaaaggacagtctcacagaaagcttcccagcagctctggccaaaacccttgaggatgcagcgctgagggaggagaatgaacaactttccaatgcctcatcatccatcggcttatgcgtagatcctttaaaaggtcgctgtctcgttgccacaaaagatattctcccaggagagctcctggtgcaggaggatgcttttgtgagtgttctcaacccaggagaactgccaccaccgcatcacggcctagacagcaaatgggacaccagagtcaccaatggggacctctattgtcaccgatgtttgaagcacactttggccacagttccgtgtgacggatgcagttatgccaagtattgcagccaggagtgtttgcagcaggcctgggagctctaccacaggacagaatgtcctctgggagggctgcttctcacactgggtgtcttttgccacattgccctgaggttgactcttttggtgggatttgaggatgttcgcaaaatcataacgaagctttgtgataagattagtaa

SEQ ID NO: 16921 - DNA, 2300 bp, Homo sapien
acagacgtcgggagtgaagcccacttttgaagcagatatgatttccattcatccacaggcagatccatgctgcttttgatctataaaatgagtaagaaaataggaatcttacaaatgcacaattttagaaaatcaagagttcagccaggtacggtggctcacacctgtaatcccagcactttgggaagccgaggtaggtggatcacgaggtcaggagatggagaccatcctggctaacacagtgaaaccccgtctctactaaaactacaaaaaaattagccaggtgtggtggcgcacacttgtagtcccagctactcgggaggctgaggcaagagaactgcgtgaactggggaggcggaggttgcagtgagctgagatcacgccattgcactccagcctgggtgacagagcaagactctgtctcggaaaaaaaaaaaaaaggaaaatcaagatttcattcaaggaagcctgaaacaataaaatcaattcttgtggtcttttcctctagtttatatgctaaggaaggatctatattttctcacagcaattcactcaacatccttccattcagaaatatttactgaaagactactttgtcacaggcaccatgcaggtgatggttatacaaagacgaagcagactagatagctaccatctgtgctcttagatcctcttttttttttttttgtgaggcagagtcttgctctgtcacccaggctggagtgcagtggcaccatctcggctcactgcaccctccgcctcccaggttcaagcaattctcctgcctcagcctccgagtagctgggattacagatgcgcgcaactacgcccggctaatttttgtatttttagtagagacggggtttcaccatgttggccaggctggtctcgaactcctgacctcagatgatccgccagccttggcctcccaaagcgctgggattacaggcgtgagccaccgcgcccggcctgatccctctctagtttctctgagacacatcccagatttttctttctcacccaccccagcaactattcatttaacaaggtatttccctctcttacatagttcagcgttctgattaagtcctcaccatctcgtctggcattcttcctagagtgttataattaatgtccatgccattggcaccactccccactttcaatccagcctccaacactgagacagaagtcagtgctctgcccttaaattcatcaacgctactccaagcataccaggaagcccaggacaaaaccatccttacttgacccttgtctgactttctaattctcaggtgtcacttactcctctgcatgcacccttgcatactgaacaactcattgctatccccggcttgccaggctatttcaactctccaatgttttggcataggctactcatgctttccggaccaaccctaccctggcttatggagtccacctggaaaattcccacacgttcttcgactcggctcaaatggcacctcctccgggacggcgtccctgatttcccagctgtgattccaacacccttggggcctgtaccacgtctacctggaggtggggttactgacggcataaagtgcccccacacactgtcctcttctctaaggacgggggccgggtctgattccctttcggagaccccccacccccaccccccaccgccacggtgccaagctcagggcttggaggcgggaagtcagccccgcgttgctggacgaatcgggtcactactgcgactctatttagcagcggaggtctcaaggaacagctttaacctcctctgggataccaacccgtgcactcgccagagaccgaggcgagaacgcctcgagaaccgctcagacgcgcccggaactgcgccctggtctccctcccagcgcccgcgcagctcctggcgcgccccttggcgccccgctccgccccgcaccgcgtccggcgtcccgcgccaggcctcgcttgggaccatgggtgggtcacgtgggccgcgcctcggccaatgcggcggctgcgtagcgcccgggcccgcccctgagccgcgcgcacgtcgggggcgggagcggtgcgcgcaacttctcgggccaataactgcgcagcgcgcgggacccgggtggggaagctggagctgttgcggggtccgcggggaagtcttggcggtggagccatggtcggccaactgagcgagggggccattgcggtgaggaggtgccgggggctgggccggcggtccggggtggctgcggccccgagcctcgcggagtagagagggggaggggagcccggggcgacgggggatg

SEQ ID NO: 16922 - DNA, 2300 bp, Homo sapien
actccagcctggggcggtagtgggggggtatggggagaaagagtgagactctgcctcaaaaaaaaaaaaaaaaaaaaaaaaaaggccgggcacagtggctcacgcctgtaaccccaacactttgggaggccgaggcgggcgaatcacaaggtcaggagatcgagaccatcctggctaacacggtgaaaccccgtctctactaaaaaatacaaaaaattagccgggcgtggtggcgggtacctgtagtcccagctattcgggaggctgagacaggagaatggcgtgaacccaggaggcagagcttgcagtgagccgagatcgcgccactgccctccagcctgggcaacagagcaagattccagctcaaaaaaaaaaaaaaaagttcaaaggccccatggaagaaggtaggagtatggaatataccagaaatctaaatttaaaaaaaaatgtgggggtgactggagaggtaggctgagagtatgctgtggatgggaatggtggcaggaacgtatgctgagtggaagtcagcagctcaggcaaaaaaaaagacggtgccagtatggatggagagaagccagtgggcttgatagatctacgcagaggcaaaatacacttcacttcgtgagggactggatgcccaggtaatggacaatataggaggaatgatttctcaatttctggttagcactgaactgaatagataatggtgccatccgtggagatagggatcaagaggcccagacttagaaagataaagaatttgctttgggatacgtatactgaacttaaaaccctctgaagcatggaataagcagacagatgacggaagtttgtcttttagagtaaaggtggctctgtacaaagaaatttgtgagcaactgacatatattaatagatggcaatggaattgccttggggccaggcgcggtggttcatgcctgtaattccagcattttgggaggccgaggcgggcggataacttgaggtctggtgttcgagatcagcctggccaacatgatgaaacccagtctctaataaaaacacaaaaagtagccgagtgtggtggcgcacacatgtagtcccagctactcgggaggctgagacaggagactcacttgcacccgggagacggaggttgcagtgagccgagatcgcgcctctgcactccagcctgggcgacagtgagtgtcgcccaggctggagaaaaaaaaagaaattgcctcgggagtcaagagggcctagagggagccttgattcaacaaaaatttacaaagagggacttacaaataagacggggatagacctgccaagctgagccactaaaaaccaaggaagagggtgtgacctgaagcaagcagggcttaaacgcaaacgctgctgagaactcaggtaagctgaaaacggaaaagggctggatttagcaacttggaggccactggtaccttcagccagggttttctacagcgatcaaagggatgactggagtgggttaaagagttgatgaaaggcgaggaaaggaagtggctgaaaccagacaagaagtttggctgtgggtggggaaaggagaagagacagaaagtgtccgcaggtggaagatgcagagaaaggcaagcgtttatttagtttgttcttacgtaggaaaaatgtgagcatgttttaaagacgatcgaaagaatgctttgaggagggggcgatgacactagagggacgcccggcgggtccccaccgccccccgccatctcctcccctcgcgttcatcccccgtcgccccgggctcccctccccctctctactccgcgaggctcggggccgcagccaccccggaccgccggcccagcccccggcacctcctcaccgcaatggccccctcgctcagttggccgaccatggctccaccgccaagacttccccgcggaccccgcaacagctccagcttccccacccgggtcccgcgcgctgcgcagttattggcccgagaagttgcgcgcaccgctcccgcccccgacgtgcgcgcggctcaggggcgggcccgggcgctacgcagccgccgcattggccgaggcgcggcccacgtgacccacccatggtcccaagcgaggcctggcgcgggacgccggacgcggtgcggggcggagcggggcgccaaggggcgcgccaggagctgcgcgggcgctgggagggagaccagggcgcagttccgggcgcgtctgagcggttctcgaggcgttctcgcctcggtctctggcgagtgcacgggttggtatcccagaggaggttaaagctgttccttgagacctccg

SEQ ID NO: 16923 - DNA, 2300 bp, Homo sapien
gcaaggggtccgaaaggaggggatgcaacaccccatcagccgcaggtgacagaactcaaacccctcgccctgtggacagcggacagtcctccttgttaacaggcaacgctcagcacacccagtggcttcctatatcctgctaggagggaccacaggggactccagagcctccaagctggaggggcggccagggtggcaccgaggccaagggaggaagcccttccccctgggtctggctctgatcatggcccccctgccctgggctctgacattaggtaccatttgaagaaactcctgctattgaaaaacctttgaaggccgggcgcggtggctcatgcctgtaatcccagcactttgggaggccgagttgggaggatcacctgaggttaggagttcaagaccagcctggccaacatagtgaaaccccgtttctactaaaaatacaaaaattagccagttgtggtggcaggtgcctgtaatcccagctacttgggaggctgaggcaggagaatcacttgaacccaggaggcagaatttgcagtgagccaagatcacaccactgcactccagcctgggtgacacagcaagactccatctcaaaaacaaaaacaaaaaacaaaaaaaaactttgaaagaccattgatctagtcatattacagatgggtaaactgaggcccagagatgaggagacatgtctggggttctactgagtccgccccagagctgaccgaacacagccccagggtgccagctccgttggtctttccacagccccacagttcctggaaaggaaagggccgtgacaagggcaaagccagggttgcatacagggctgcggtgagagacggagtctggcagcgtgtgatgagagacagagagacgcagcgtgtggcatgcggcacatgccagcgacaggcggcagcaggcgggcaggcgggaggccgggctgcagcgccagagcatagccattgtccccagcgtccggcctgcccaggtgcccctcactggccatcaagtgacctccctcggccctgcctcccctgaggctggccagctgtagaccccaggcccacctccacacgtgctccttccttctcccagcttgctcagacaagcccatgaatagaacattaaaggcaaaaccttctaaaaggaaaagcagctccctggtaggagtcaccccactaaatgtcaaatgcagagcaaggcttcttgccttgtgcgcttctcactcatggagtcaccttagcctccatatccccatcatcctatcgccgtataaataaatcatggtcagaagaatgccaatttccccccagggcctcatgaatctctcaacataagcatatgtaaaggcccccttcactgcgtgctggtcctggtgcccagaaagagatagcaaatcctgtggggatgattttggaggcagaagcaaactttctaccacctcagtgggctgaaagttgggagcccagcttttgtcctgatttgggaaagacccttgctcacgtagttgtcaccatgatgccactaccctctggaatcaactcagtgagctgccaagtggcccatcgctgggggctgcagtggtctgtcccctggcagacatgtcacgagtcgtgcccacccaccccctgtgagggcgagccacacacccactcagcaagtgttgttcctgacatgtggcacacacagcgctggcctgcccactcctgggagcccctgcccccactgactggctcaccatcgtgccacggcaccgagccctgccagtggaccaatggtgtgggtgccagcagaggctctggtgcactagggtgtcctgctctgcaacagtgacctctgccacacacactacagggagcctgttgcatgctttgccaggtgtgtttctgtacatacacacacacacacacacacacacgcacacacactatggtaccaactcttttgctgtgccagcacagaggtctccagagcgactctcctgaatcagatagcaggggctgtttgcagtttcgtttccacgcttcgctgactggttagacagtgatcacaggttcggaagcacgagcctcaccacagcggaggaggcctccactctgaagcgggattccacgctcctgcaccctaagatcagctagactctctgccttgtttcatcttctttcttttcctaaagaatcacggggagaactgacctctctgggactcaaccgtggctggaaggggacaggagaagccctttctggaggacagctgagccctgcagctgccatcctgcctggcaggctagggct

SEQ ID NO: 16924 - DNA, 2300 bp, Homo sapien
tttttaatagagacggggtttcaccttggccaggctggtctcgaactcctgacctcaagtgatctgctcagcctcccaaagtgctgggattacaggtgtgagccaccgcgcccagcctggccctttttttttttttttttttgagacagagtctcactctgtcacccaggctggagtgcagtggcgcgatctcggctcactgcaacctccgcctcccgggttcaagcgagtctcctgcctcagcctcccgagtacctgggattacaggcgcctgccaccatgcccggctaatttttgtatttttattagagaccgggtttcaccatgcgggccagggtggtctcgaactcctgacctcgtgatctgcctgcctccgcctcccaaagtgctaggattacaggcgtgagccaccgcgcccggccctgaccttctttttgaccttcctatcatgtcaccttttcctacaaggagggattcagttggatttctgcttggatgtcacctgctcagagcagctttccttgactgccacctctacccccgtgtcagctccagaacaatactctgcttgtttttcttcgaagcacaatcttcccatcttctctggactttcctcatttggcccctattaaaatggaaactccttgaggacagggcaaagacaagtctttttcgtctgctgaattttcaggaacagtagtgccccacacatgctgagccttcggtgaatgtgtgttgaatgacagccttggtccatccgctttttcttctctccgaatccctctgatcccaggccagcagggggtgccgcctccacccaggatctcgcctggcccgaaccttctcttccctcagctcaacaggcccctgcgggacccgctttccaagcggcgcctcctccattttccgcgaaccccccggcggggtctgtgtggaccaagggagatcagagaccccccgccgccaccccacccaggcggagacggcccacccgaacccgcacgggtccttccttctccctggaatttgcagctggccctttccgaatgcttgctcccctcctctccccacgaaagaacagtgtcctgggactcggggtgcggggcagccgggttcgctggagctgttcagtgcggggaagagccgtcgagactgggagaaggggcgctggccagggaggagacggggcagggagcggactcgcgatccgtactctgggcggcggtcctcgcgtcccagccgcgtctcccgatgacctccagccgcgaagggcgagcgggcgggggctgggctgcgggttcgggctccaggaggcctgcggggccggggaggggcgtggagtggtccgaggaccggcttggggactgggggcaggtgcctggacggacgcgggccgagcatcttccccgggggcgggcgcagtgaaaacaccttgggaggcggcgccgcgcggctgagcgctgctgccttgggaataggacggcgctcggcactgcgagctgagagcactttcataaattttgtatgggaggcgctccgtgagcgggggcggggagcggagcgagagggagggagctagagagcaagggagggagggaggaggagaggagggggaagccggggggaggaagggaggcgccccgctccgccgatcgctcggtcctgcaaacgcgcgccgggcgctttccccggagctcggcggtgcgtgcgagcgcccttttgctgcagccgcggcggcggtggtccgagggggcggagaggagggggctgcggccggccggccagggggcggcgtcccccctcaaaaccgcctgcgaagtgctccgggtggcagaagcaggccgccggctccgcggagcaagccgctcgccccggggctgagcaagcgcgcggggctgccgggcagcaccacggttgcttgcgggcgccggtgccctcggcgcggggctggagctcaccatgcccctgcggggccgggccaccgggcacgagcggatccccggcttgcccccgcctcgacgcgctcggattagctgcagctggcgcccagggatttgaatctggaccccgggagggagtgcgcctaggccgacctcggagcggcggccccgtggccaacatgcttcgcaaaggtgagttggagccgcaggggcaagttgaagttgaatgcgctccggaaagagccgcgagcccgggcgccgcccggcgccggggctcccggtctgggaagtagcccccggcgggctggtgggttttgccgggcgcacccgccgaggggctgctgctggggctcagctccc

SEQ ID NO: 16925 - DNA, 2300 bp, Homo sapien
aggaaaagttggctggggctgggcgtgagtgtgagaagcagagttatttcaggcctcaggagggttgggtgctgccttggagtccagccagggagtgggggcgagtgaaggcgggtgttgtggtgtactgtgggggtgcactgtgcccgccttcttgtcaggcagtaattactcagactgctgagtaactcaggcagggagacccccacagacagatggaggtgccctcagcccaagctgaatggcagcccccaatgtcctgcaccacggagtcttggggaagcattctcacatctgttcttcatgtccagttctcctaggcatcatccggcttcctaatgggggccagagcagctcattaggcacagcgggtgcggggcaatgttactagagggatgggacttttgccatcaaacaggccccacctctgatgagggaaaggtcccaagggatatggcgcctgctagggagaagccattgctcagttggagccagtcctttccccttgaaactccatgctgcagtcacagctaaggctgtccacaggctgggcagcagtgtcctgagagaggaggggctgagctcccagaattcagatcttgcaccctggggatccagagaagctggggggagatgggaaggtctagtccggacgcttatcgagttgaggggagtgttcctgggacccacattggtcacttttctgtctagagctacctgtcctaagagtgccggtggcctggggggcacagcactgacccttggtgatggtccctcagctgctcactccctgcctgtccagccattcctcctctctgggcagcctcccaggcagggcctgtctctggctgcttgtttttacttctccctgcaccttaattaggggtttccaagcagggagggcctctgggggagcccgaggacacagagctgacttaaagggccagctgtgatcacagcaccaccgcagagagaggaggaggatgccagggggctgggtagaccgtcagacctggaagaccattgttccacgggacagactgctgagggccagtcctgcaggtactttgctcttccacaggtcaaagccgtctcactggctgtcttctctttggggtctctggggctctggccagtgatcaggagaaagaccagccctgaggggcagggcaaaggttggccagggtccagaagggttagacatcacagtcctccactgcccaccttcccaggaaagcaccctcaggctgtgggccttccccagaggggcagtttctacagggtctacgcagtggattctaaaggtgataaaggctgggtgcagtggctcgcgcctgtaatcccagcactttgggaggccaaagtgggaggattgcttgagtccagaggttcaagaccagcctgagcaaaatagtgaaaccttatctctactaaaaaaaaaaaaaaaaaaaaaaaaaaaaattagctgaacgtacgcctgtggtcccgggtactcagggggctgaggcaggaagatgaattgagcccagaaggttgagactgctgtgaaccatgatcgcaccactgcactccagcctgggcgacagaccaagaccctgtctcaaaaaaaataatttaaaaagctgataagggcgatccacaaacctgcaccaagactctcaacttggagctgggctggtggtccctgagttctgtcctgccggacagtagagtccccctaggtagggaacgtggccccacacggcggccgggtgaccgaccactgcttaccaggaggggagactggcagggggggctcaaggaacatctggtgggtgtccccttcacaagactcggcctgcagagttcgtgcagggagttcgcacataggagagcaccggtccgggagtgccaggctcgtgcccggccggggagaggagtgggagactaagtcgcagggcaagggcaactgcatagtcggggacctctagggaatcctgagtcccggcattctgggctggggtggagcccactacagccccgcccctatctcctcctttatggccccgcccagcgggtatcccccgcccccgctggccgatcggcgatcgatcgcaatgtctgcgctctccgcgttcttccagcgctgtctttttagtaccacatgcgcaggcaggtgatggcggcgctggtcgtatccggggcagcggagcagggcggccgagacggccctggcagaggtgggtgctggaacgctgcgccctccagacctcgcatctcggggcggggcccccaagttagggacaggaccaacccccttt

SEQ ID NO: 16926 - DNA, 2300 bp, Homo sapien
cgtgtgagtgtcccacagtgcaagcccctgtcccctggagagatcctgggctgcacatccccccgactgtccaaagaggtggaggccgttgtgtaagttaaaaatgggggccaagtaagtcctagagacatgcgtgtaccctgggagggagcctgaggttcatcatccaggaaagaaaccaaatctaatgctccttacctgtgagcccgaggtcacactgcaaggtagggaccaaacagggagcagacctcaggtttactgtcgctttctccactgcccagtccatcatccagaaggctgtgcagggtgggggcaggaatcagagggcctgatgggggttgagggtgggctggaaatggtgggaatataattggagaagatggatgggcacgcccaggctgcagccccattaatttaccatccggacagctaacaagcagaagcagcgtgtctcctgccgcctaattattttaggtaatggaaatgcttaatgttgtgtgaatgcagccagcctgagagccgacggctcccccgactgggactagggaagggagtcccgttccgtactaatggcagggagggagggtcgctccctgactcagtcccacctctggggctttggaggctgtttccacaggcctgacacccctgtccctagacaggcccacatcagggccttccccagcccagatctggcagccctgctccccgagcagcactgagtggcattccccctgtgcccacgtcactcagtctctacccttggggtcttcaaagtgtatgttggagggagggacaccctgagtgttagccattcatcagaatgaagtgtggtctccaagagggagagaaggagctgccacaggcaggttatcttccacgctctgtaatcttcatgggctgggaagctactgtcagggacagcatgtctgggggcacacttggtacagcctgggttgagcctcagacacactgcttcctagctgtttaatactaggcgagtttcttaacatccctgagcctcagttgttaccttctgtaaaacaggtatactatacgtatctgggaggattaggagataggactgcgtgaactaattcacagcaggtacttagtctatgcctggtacacagaaggcacaagtccaataaacagtagctgttggccgggcacagtggctcacgcctgtaatctcaacactttgggaggccaaggcaggagaattgcatatgtccaggagtttgagaccagcttggggaatataatgaaaccctgttctctccaaaaaaaaaaaaaaaaaaaaaaaaaagaattagctgggtacagtgtccatgcctgtagtcccagctcctcaggaggcttaggtgagaggatcgcttgagcctgggaggttgaggctgcagcgagccatgaccgagtcactcaacctgggtgacagagtaagaccctgcctcaaaaaaacaaaatgaaaatccggtagcttttgttataactcagtaactggccccaagagctagtttgggcagaaagtagccattgtatgccctgcaacctcatgtacagcatagatcagaggtccccaacccctggtcccatgtcctgttaggaaacctgccgcacagtagaaggtgaggggtgggccagccagcgtgaccacctgagctccgcctcctgtcagatccgccgcggcattagattcttgtaggagctcaaaccctatcgtgacctgtacatgcgagggatctaggttgcatgatctttatgagatcctaatgcctgatgatctgaggtgagacagtttcatcctgaaaccatcccccaatcccacccgtgtcttccacaaaacctgttcccagtgccaaaaatattggttactgctggcgtagatgactccttgaacactactgtccacatctgtattgagcttgtgaaggagaatctgttccccaacttccaaatgaggatctctagaaccccaggtggcctcaccacggccggctgctccttcactcttcctcagaagcttggggtgggacggttcttagattctgcattatgtaaatagagggaccgtagagtcatccaattcaaactccttatttcacacgtgagaaaaccaaggctccaagaggtgaagtgaaggcttgtcccagtttacacagaggcacagcacagccagctgtgaactcagtcctctggacttttttttttttttgagacagagtcttgttctgtcgcccaggctggagtgcagaggtgcgatctcggctcactgcagcctctgcctcccgggttcaagt

SEQ ID NO: 16927 - DNA, 2300 bp, Homo sapien
gcttgagcctgggaggttgaggctgcagcgagccatgaccgagtcactcaacctgggtgacagagtaagaccctgcctcaaaaaaacaaaatgaaaatccggtagcttttgttataactcagtaactggccccaagagctagtttgggcagaaagtagccattgtatgccctgcaacctcatgtacagcatagatcagaggtccccaacccctggtcccatgtcctgttaggaaacctgccgcacagtagaaggtgaggggtgggccagccagcgtgaccacctgagctccgcctcctgtcagatccgccgcggcattagattcttgtaggagctcaaaccctatcgtgacctgtacatgcgagggatctaggttgcatgatctttatgagatcctaatgcctgatgatctgaggtgagacagtttcatcctgaaaccatcccccaatcccacccgtgtcttccacaaaacctgttcccagtgccaaaaatattggttactgctggcgtagatgactccttgaacactactgtccacatctgtattgagcttgtgaaggagaatctgttccccaacttccaaatgaggatctctagaaccccaggtggcctcaccacggccggctgctccttcactcttcctcagaagcttggggtgggacggttcttagattctgcattatgtaaatagagggaccgtagagtcatccaattcaaactccttatttcacacgtgagaaaaccaaggctccaagaggtgaagtgaaggcttgtcccagtttacacagaggcacagcacagccagctgtgaactcagtcctctggacttttttttttttttgagacagagtcttgttctgtcgcccaggctggagtgcagaggtgcgatctcggctcactgcagcctctgcctcccgggttcaagtgattatcctgcttcagcctccccagtagctgggactacaggtgcccgccaccacgcccagctaagtttttgtatttttagtagagacagggtttcaccgtgttagccaggatggtcttgatctcctgacctcgtgatccacccgcctcggcctcccaaagtgttgggattacaggcatgagccactgcacctggcagccctgtggacttctttttttttttttttctttttgagacggagtctcactctgtcacccaggctggagtgcagtggcgcgatctcagctcactgcaagctacgcctcccgggttcacgccattctcctgcctcagcctcccgagtagctgggactacaggcgcccgtcaccacacccagctaagtttttgtatttttagtagagacggggtttcactgtgttagccaggatggtctcgatctcctgacctcatgatccgcccgcctcggtctcccaaagtgctgggattacaggcgtgagccaccgcgcccggccagccctgtggacttctaagccagcgagtgcctcttctgctgccctaaaccacacttagcctcctttccacccctgcaggtatcttggagatggccgcttccatctggagtctgtcatgattgccaaccccaatgtccccgcttaccggtatgggctgggccgggctgggctgaccagctggtgaggggtgagattccctgccactgaggtcctcaattggttgcatccccatttcctggccactaagccaccagccctaagggtctgaggcacttgggccctggatctgggcattagccccagggctgctgttgcctacccgtctcctggggtttacacggagatcttaaagccgcccactcttgtctgctccagctgtgggacaggtcttcctaatgacagtccccgctcttgcctctgttcttaattacctgcgtggggcctaaaggttcaggagcccacggggctgagtcaggagctgtgtgcataatactggtcctgacagtggctgccacagtgaccctgactgcttcttttccaggtatgacccatatagcaaagtcctatccagagaacactatgaccaccagcgcatgcaggctgctcgccaagaagccatagccactgcccgctcagctaagtcctggggccttattctgggcactttgggccgccagggcagtcctaagatcctggaggtcagtgggctcaggacagcctctggaggagggaagtgactgggaacacagctgggaaaaccagtaggccacaggttcagctttggctgcttgaccaggtgacccccaccctgcctccctctcccaacagcacctggaatctcgactccgagccttgggcctttc

SEQ ID NO: 16928 - DNA, 2300 bp, Homo sapien
ctaagggtctgaggcacttgggccctggatctgggcattagccccagggctgctgttgcctacccgtctcctggggtttacacggagatcttaaagccgcccactcttgtctgctccagctgtgggacaggtcttcctaatgacagtccccgctcttgcctctgttcttaattacctgcgtggggcctaaaggttcaggagcccacggggctgagtcaggagctgtgtgcataatactggtcctgacagtggctgccacagtgaccctgactgcttcttttccaggtatgacccatatagcaaagtcctatccagagaacactatgaccaccagcgcatgcaggctgctcgccaagaagccatagccactgcccgctcagctaagtcctggggccttattctgggcactttgggccgccagggcagtcctaagatcctggaggtcagtgggctcaggacagcctctggaggagggaagtgactgggaacacagctgggaaaaccagtaggccacaggttcagctttggctgcttgaccaggtgacccccaccctgcctccctctcccaacagcacctggaatctcgactccgagccttgggcctttcctttgtgaggctgctgctctctgagatcttccccagcaagcttagcctacttcctgaggtggatgtgtgagtatctgcctggctatgactggctaaagaagcttagaagctgggtcttgcccagctcgtcttgaaggctggagccaacaggaattgcttccatggtcatggaattttactgtttacagagacctccctgggagggctaactgggtcatacctgctttgggactttggggctcagaggcaatggcaacatcacatttgtccttgtgagatgagtttgagcggtggctgacacctgccctgtaccaggtactaaatgtggttctggggatactatcaccagtgagctgccctggaaagctcattgtcggcagaggaaacaggagaaaacacgcaacaatacagtattccaaacagcagtgggtcactgtctttactttaggattcataaagcctgttaatgaatgggtgtgctgggggcactgtcatgttcttcagcatgctgcctgggcgacgaggaggcccttcctagggtctgacctggcttcccttcccaggtgggtgcaggtggcatgtccacgtctctccattgactggggcacagccttccccaagccgctgctgacaccctatgaggtaacaccaagctctgggagagagtgggctttggacgtggttctcaaaggtgaggtctggagtggagtggggtgggtgggcagcacttcgttatgttcgtagattccggagtctgtctcgatttctccagcggagtcacttcctagctgtgtagccttaggcaaggccctgaaccacacagttcccttctgtggcaggggacagtgtgcccttcacaggccgtcgtgaggactgaattcagtaatccaggggcagaaaaacactggcagatgttattgtccctccctcccctcccctaggcggccgtggctctgagggacatttcctggcagcagccctacccgatggacttctacgctggcagctccttggggccctggacggtgaaccacggccaggaccgccgtccccacgccccgggccggcccgcgcgggggaaggtaggcgggggcttccaggagggaggagagaccgcgcctgggcactggccgccgccctgcgaccgcgacgggaaacgcacaggagcggagcggagggaaacgcagggtcgcaggagcgagaccctaaccaaagtctgcgacctcaggtgcaggaggggtccgcgcgtcccccttcggccgtggcttgcgaggactgcagctgcagggacgagaaggtggcgccgctggctccttgacgcgctcccgggcctcaggtatcagcccccgctctgggtgcgccccgccttttgccgttgtcatgggaacgccttggcgctccgaggcccgccctcggggcggtgctgacgttcggttccgccccgtgcattgtgcttccgctcggggaaagaccgcttccggtgcttccgtcgctccttgccgggcataatggccgcgcagcgacccctgcgggtcctgtgcctggcgggcttccggcagagcgagcggggcttccgtgagaagaccggggcgctgaggaaggcgctgcggggtcgcgccgagctcgtgtgcctcagcggcccgcacccggtccccgaccccccgggccccgagggcgccagatcagacttcgg

SEQ ID NO: 16929 - DNA, 2300 bp, Homo sapien
ggagaccagcagcttggccaagaggggcccccaggggatgaggaggacggtttcctggagaagttaatgttcccggagaccagaattggcagggagagcccatgacttgtggggcagttcccctggttgggagcggggaaatgcatggtcctggcccagcctggctccatcgagatggaggaagggtctaaatgagaggagtgtgttcagacgaggagctggaccaggatggggagggctgtgcaaggcatggccggaagagcggggcagggagagaaaggtcgaagagtgaagtgcacaggagggcaaggcggtcctcaccctgcctgggctggggcagggctgtgagaccctcccttacagaagcaatgagggcttgaggagggggttaggggcctgggctggggcagggctgtgagaccctcccttacagaagcaatgagggcttgaggagggggttaggggcctgggctggggcagggctgtgagaccctcccttacagaagcaatgagggcttgaggatggggttaggggcctgggctggggcagggctgtgagaccctcccttacagaagcaatgagggcttgaggagggggttaggggcctgggctggggcagggctgtgagaccctcccttacagaagcaatgagggcttgaggagggggttaggggcctgggctggggcagggctgtgagaccctcccttacagaagcaatgagggcttgaggagggggttaggggcctgggctggggcagggctgtgagaccctcccttacagaagcaatgagggcttgaggatggggttaggggcctgggctggggcagggctgtgagaccctcccttacagaagcaatgagggcttgaggatggggttaggggcctgggctggggcagggctgtgagaccctcccttacagaagcaatgagggcttgaggatggggttaggggcctgggctggggcagggctgtgagaccctcccttacagaagcaatgagggcttgaggatggggttaggggcagtaagttaacttggggagcggatgtgggggaacgctgaagaataaagactgtgggcacagcagacccctggggcaggttagcaatgcacagactccactgcacaagatacatggggcggaggggctctttggaagtcgggggtgggggatctgactctatcaaaaagagaaaagataaaagagatggggtcagagaggccctgcatagtctggatttggcctactagagctccagttttcttgccgctagcctttgttccagggattctgttattcacaaatgccttcctgctcggtagaagaactcctattcatccgtcaaagcccagctctaggagcacttatgaggagcctctccacctcccctcaacactccgtaacttccacctcaggccgcagcacgtccctcgggcgagatgtcggggtccgccttccctagagaccggcagctccggaggcctccgttttcctctttgggacctcactgcttctaaagtgaggatgctatggggagacatgggagagggagtgggtaagatggatccagaacatggggcggactcaggcagcggcgggaatcaggcggactcgtttggaccgaagcctccgccaggcaccgaagccgtgaagtcgcctgcgcagcaaagggagcctccggggggcgcccgagaccttggtgtcgctcgggggccgctggtagccgcgcccgctgcccctcgcccggtgactcagccggtacctctggcggggccatgggggccagaggacagcgcggggggcggcgagcgcggttgctaagctctccaaggcctcggagggacaggatctgggcgcacctcaccggttgccatggtaacgcagcgccccagcccctcgcgctccgcggtggagggaggcgcagccaatcggaagcggcggagttctcggggaccccccccccccccgctccacgccgtgtgtgggcgggggtcaggaggtgcggggcggaggcggagcgtgggccgcggagatccggcgttcgcaggaggcttggtgcgcggcggggctgcacggggccacttccggagtagtactgcgagcagcggcgcgacagtgcggggtcccctttctcccagaagagacgtcacccacacaaacctgaccttcacgtggggcgcgggaccttgcggggtcccagccgcaggcgcccctgttgtttccttcgggcgggtgggttggagaagaagtccacgcgggattcttcaaaacggcgtacagggggattctagggccc

SEQ ID NO: 16930 - DNA, 2300 bp, Homo sapien
cctgggctggggcagggctgtgagaccctcccttacagaagcaatgagggcttgaggatggggttaggggcctgggctggggcagggctgtgagaccctcccttacagaagcaatgagggcttgaggatggggttaggggcctgggctggggcagggctgtgagaccctcccttacagaagcaatgagggcttgaggatggggttaggggcagtaagttaacttggggagcggatgtgggggaacgctgaagaataaagactgtgggcacagcagacccctggggcaggttagcaatgcacagactccactgcacaagatacatggggcggaggggctctttggaagtcgggggtgggggatctgactctatcaaaaagagaaaagataaaagagatggggtcagagaggccctgcatagtctggatttggcctactagagctccagttttcttgccgctagcctttgttccagggattctgttattcacaaatgccttcctgctcggtagaagaactcctattcatccgtcaaagcccagctctaggagcacttatgaggagcctctccacctcccctcaacactccgtaacttccacctcaggccgcagcacgtccctcgggcgagatgtcggggtccgccttccctagagaccggcagctccggaggcctccgttttcctctttgggacctcactgcttctaaagtgaggatgctatggggagacatgggagagggagtgggtaagatggatccagaacatggggcggactcaggcagcggcgggaatcaggcggactcgtttggaccgaagcctccgccaggcaccgaagccgtgaagtcgcctgcgcagcaaagggagcctccggggggcgcccgagaccttggtgtcgctcgggggccgctggtagccgcgcccgctgcccctcgcccggtgactcagccggtacctctggcggggccatgggggccagaggacagcgcggggggcggcgagcgcggttgctaagctctccaaggcctcggagggacaggatctgggcgcacctcaccggttgccatggtaacgcagcgccccagcccctcgcgctccgcggtggagggaggcgcagccaatcggaagcggcggagttctcggggaccccccccccccccgctccacgccgtgtgtgggcgggggtcaggaggtgcggggcggaggcggagcgtgggccgcggagatccggcgttcgcaggaggcttggtgcgcggcggggctgcacggggccacttccggagtagtactgcgagcagcggcgcgacagtgcggggtcccctttctcccagaagagacgtcacccacacaaacctgaccttcacgtggggcgcgggaccttgcggggtcccagccgcaggcgcccctgttgtttccttcgggcgggtgggttggagaagaagtccacgcgggattcttcaaaacggcgtacagggggattctagggccccatggttacttctttggaccccccggaggcgctgtccagccacttccagtcgccctgatgactcgtcgtgggttcctttaggagacccgaaagttcagggcgggctgtgtgggtaacacctctgcccaggttcccggagggccctacgtggctgcccctggagtatcccagagcgctagggctgcgggaaggggcgggtgtgcttctggaaacatgagcgcctgttagtatcagtgcctggatagggctggggacaaatcagtttatgccgcgcacaccgaatccatgcgcctgagtgagggtgggtgtgttggggagtgcgtccaagtggacagtgccgtacagtaatgtctacggggagttccaggagagctcggctactcctgcgcaggataacctctcccccaccacccgagtcccgtgctcgcgggcaggacttttccgaactggggctgtgtgcctagaaatacgtacatgggagcgctcagctcaaagccccagggtttctgggactcgcgtgtccggggtcggggtcccaggtgggtacaggtgggagggcgaacctgcgggtagggtgggcccctccccgcgggctcagcatctgtgcgcctccagctcaggtgcgcgggaggaaggcagcggcctgccgcgcagagccctgcgcgcccgcgaggtggcgccatagccgcagcagcgcccgccggcccgggccgctccagataagagtgtgcggaaagcgcggcggggctgagacgcgaccaggacgcggggaggacggaccagcaggacagaccgaccgggggcccggcgggcgg

SEQ ID NO: 16931 - DNA, 2300 bp, Homo sapien
cctaggattccagactctccagatgaaacctgggcagagaataatgggaaagaatgagctgttagcatgggaggggacagcaggcttgctaaagctggcagggcatccaggcttcaggcagggcagagcagtgccacccaagccctgggtactgtgtggggaagcacaggtggagcagtgcctccgtcagctctttcacccgcactttcaggctgagggcacagccaggttagctcccaggcttgcccaaagatgccctgtggccaggggagcctgcagtcccaaatccagtgaggcaagtgaggcccagagagggccacagcaccaaagccagagaaggccttctctgccctcacaaggaacagatgacttctctggtcccggatcttggtagtgccacacttttttttctcgttctaaggcttattgaccagacaaaggttgtgacccacaccaggctgcccacttcttccttttcccacgagtctcctgggttccttcatgttagtggcctctgggaaactgtgcttaccctggtctgtgtaatttcataaccttgcacttcctcgtttactgtgagagctgagccaacctcagacaagcttctctgaccctcttttgacctcagtcaagctcacttcaagccccgtgataaccttgtatatccctagtcagagcaggcagaggcagtgttcccccatgggctaggcaggcattctgtcccgctcactgcagtctgggttaacctcatgaacaaggaagtgaatgtgcagagttttccttctttccacggcctgggcctctctggaggtgagcgctgtgacactatagcatgcctgtgtcagatgaatggtgactgtggacagcatcccagacccctgacatctcttaggatagtgacagttctggccccatcctcagatctcatctctccccaaactgcaaaactgaatcacttcagcagattgggagaggtagggaaaggtgtttcttcagacatagttctttgtgaatagaacacagtttagtcgcttagggatcctaccaaaacacccctagattctgctcacaaggcaaagtatacccccgtcatctacccagccacccacctgagtaatccctttcagtcaagagattccatctgtatatgaccttgagctggacagttagagaagagagcagtctgtactgaacagatctagggtgggcctgcagcaggcctcacgatgctgagccactgagggctggatctgagcttctggtctggattcaggatggcttagcttattattattggtaagagcataaactttggagtcagattcacttgggcttcaatccctgttctgcctttactagccatgtgaccctgagcgaggtgttgacttctaaacctcagtttgttcatttataagatagggatggtgatagcacctatcttatctcacaggctgttgtgaggattaactgagttaatacatgaaaaatgggtagcccggtacctggccagtaataagcactcagtaagtgatagctgttgtcatcactgtcattattataatccagttagaaacaggaaccttctactaaattattccctgtgtacccatgctaaccctgtccctcaaaggaagctatcttgggcagctgcatgttctctgttgaccaaggccaaaagtaagaaagcaaggaatggagcctgggaccacccagggagtgatggctgctaagagctgaggctgcaagtagggaggtgccatccttggggaatgtgccaccagcctggcaggaggctccttaagccagccagccacctcctaccctgcccaggccattgagggcagctgagcaaggtcatgtcgtgtgaattccagtaaaggggcccagcagtcctcacaccaccaggctggagtcttcaaaagaaaccagggcgaggtctgctgagctgcagcatctgtccctgatgctgtctgcggcaagggaacttccacgcctcattcccagctgttggccagagctgattcctatcagatcgttagcatgaattagatttaagttgggtggtttaactttctctgttgtttccctcttgaatcattggtgacttcagaatgaaaataggcctaaagtttgactttgtgagtgtgtaccaggaagaacacagagtgtgagtaaagcacgcaggtatatatgtgtgattgcgagtgacttatggtgtaactctctgagggaaaagccccagagtataaaagagagcagctccgggggaagagtgacagcttttgtcaacctccctttgc

SEQ ID NO: 16932 - DNA, 2300 bp, Homo sapien
acattctgtaaaattaacaagctataaagtttgattgaaggtttcaacaaatgtgagaataattggctccatttagagaaacaagaaaaacaacctgtaaacttgagtttgtggggggaaacccgtgtgattgttctctttaaccagaggagcagtagcaagctggactgttaagactagaaaaaagaactggctgatagtacaagtttaaactccgatttctccaaaccaaaaattcagaaaaagaaattttgcaaaatgactagtaaccatggttgtgccttccaagaagcctgtttggagaaaacggggaccaggtaacgatagagcgagtccctcactccctagagcttgcatccagggtcctggctctccagcccttcctcatattccctggctagatttggaggttttctcccttccccggggctgccctgaggtgttaagtcttgcaactcagagcacatgagtatgtgatacctggtgcttagttcccgttctctcttaccctccctaccttcataaagcagcatatagctcgttttctctccccaacccccctcccccgccgggcatctctacccacactgtgcttgttccctaccgagtggctgtgaagagtcaccagttttcagagaacaccattttttcttctttccttttttttttttttttttttgagacagagtctcgccttgttgcctgggctggagtgcggtggtgcaatctcggctcactgcaacctccacctcccagattcaagcgattctcctgcctcagcctccctagtagctgggactaccacatgtactaccacacccggctgatttttgtatttttagtagagatggggtttcaccatgttgtccaggctggtcttgaactcctgacctcaggtgatctgcccaccttggcctcccaaagtgctgacatgacattcgtgagctaccgtgcccagtcaagaaacaccatttttctttacttctccacctctccaccttaaataccccagaacagtaacccagtctactctcttgacctagaggttttctcctttgttcctcgctccccttggctccagcccctacttacccgatgcttacattatctctctctaaggaactgagcctaggagagaacagcctccggtatcgcctctccacatctcactttcagttttcctttctgcttggttctttgcgtgtggacttgattagagtgataactggagccctaaagctaaaggtttcagttcctgctgcagtggtaagctgcctccgacaatcttcaggggaagggaaaggggctttctttcagctcttccctgacctaaagccccagttttctttcccaagctgattgaaatgatttgtatgtgatattttgtcaattaacttgggaattcttgacaatcgcctacacagtgcatctccctccagaagggtcaggactgtgactgagaaggtacaccgcagaggagaggtccgtaggctccccagggtgttccctggctggcggcccttttagtcgcctctatccccagtccagccccacgtgctaatgtagcccaggaagggagcctctcccgcccagctctttctcctctggaggatccagagtttgcccccagagctgcgatatacatgccacttacattctctggttttcattgatatagagtggaaaaatgtgctcacgagcagagttaactgtggggatgatgtcacagacttcatctggagtccttcctctccaagcagggagtccagctttaacccctctcctaccaggaagtcctcctagaccaagcaaagatcatcttggaattggctttttgtcagtggtttgaaaggcttctttcattatgaagtctcttattaactgtatttaaactgtcttgtgttgctttttccctgactcaagtgctggaggctttgtctaggagaatattcccgtaagtctcctacagaactccagcatcaagagagcggtggtcctctccccagtgggcttattccccccaagttaagacagaatgcttttgcagacaggccagtgagctacagacagaaggtttctctgtgcctctgggcaagccctggacattctgcctctcagtttctccatctactaaagagctcagactgtgcacttctcactcccacagtacactttacacagctttgaccatcctccctgctgcttggattgcaaaggacagggtactcttccaaaagacagacaacctttctctctccaaacaggtagaatcctttccaggcctgttaacaccaggtcag

SEQ ID NO: 16933 - DNA, 2300 bp, Homo sapien
gtcagtaataagagttgccatccaagtgcaaggagtgaagattgccaagattctagaaaacctggagttttctaatccagggaggacacttcccagtcgggaagggccgagatgggtgaagctagaagcaccttcctctagaacttgaaactgctttctatcttttgagaaggattaccttccttgtggcttttcagaagctatttgttaatccaacctggagctgtttccccaaccccacaagtatgtcacaagcagtttgtttatttgggggctgggggacatggtaaaaaatactttggtgaccacgaattgtttggcataaccctaaggcccatgtgcctggctactctctctagcaccaagcttgaacttgctttttatttctgaagacttcagctgtggtttgtttctgttgccaaagaagctccaggcatgcaccactgtttgggatccagtggccacatttggcaaggagtgatttgaatgacctctccttaggagccctaggtcactggctagatttctgcctccctgcgttacagcctcttcctgtattgggagtggcacttggccagggcattctatttccactggcctgaaaacatacagaccccgatgagcagagccttgtgagagggaggaggacggcaacacacgaagaactgagacagatgactgggggcttctaggtctaggcattcttcaaggggaaatttgggatcgttaggcggaacagtcagtgtgatagtacctcagaagacaatagcagaactatgtctggttacctaaagtaaacgcttgggtaaaatatctttaggccgagtgcagtggctcatgcctgtaatcccagcactttgggaggccgaggcaggtggatcacttgaggtcaggagtttgacaccagcctggccaacatggtgaaatcccgtctctactaaaaatacaaacattagccgggcatggtggcacatgcctgtagtcccagctactcaggaggctgaggcaggagaattgcttgaacctgggaggcagaggttgcagtgagccgagattgggcgaaaaaagcgaaactttgtctcaaaaaaaaaaaaaaatttttttttttttgtttagattcacattacttttttaattgaattaagtttcataccagagagtttagggactgtgaaggtttcaggaaatttgttgagtatttagaaaagccgatggtttcagagagaaactttgatattagcttgaacacagttattgccaggggtgaggaaatagcataccaaagcataataactcatagtgatttatccaaaacttgagttgtttgcatctctggaccctgaaaactcctttatcttgaatttgttcaaaattgcaggataccgggaaggtttgtgaaagtagcaaagaaatgtcctaggcagtagttgtctggtgtgtgtgtgtgtgtgtgtgtgtgtgtgtgtgtgtgtgtgtgtgtgtgtgagacagagtgagagagagactgaaagagagaggtgcctcattgatgggttttctgaatctgcaggatggagacattccctgcagtggctgagaaggtcctcaaggagttccaggtgttactgcagcacagcccctctcccattggaagtacccgcatgctgcagcttatgaccatcaatatgtttgcagtacacaactcccagctgaaaggtaaggcatgtttagtttcttcatctagaatatagacagatagagattaatgtagcttctttcttgtgttaccatacctaccatacctacctccccccaccccacccccgaacacacacaccctaccctacgcttcctaccattgtctcagatatttagtttactttgaaatctgtatgactctctagtgcttgggtgggatggaaggagggaatcatgggtatagagcttaatttgcaaatgcagagatgcagttgcacatctggccacgcgaaaggcagcagcaaggcctcttgaaggctgcagacccagagcctctcccaagggagaggcattgctgagatgtttcattgcagagaccatacgcttggcagggattgggaatagctgtttctggactcatgtaccctgtttgttcaatatggaaaagtctagttccctatgggatatccctagtgggagcctgccagggagtaagaaccgagaattgatgagctttggtgactcaaatctggaagcacaaaaaccaccagtcccagaatttagctattataccagtgtgcattctaaaatgtttttctgaacattttggggttttttcatag

SEQ ID NO: 16934 - DNA, 2300 bp, Homo sapien
ctccgccaccagaatattctgatatccacccacttctcaccaccacaggagaagcaccaattttcagtatttctcccaatgctaagagcccacaaatgcataattctaagtaaatataacttttcttgccagcttctgtgtaagcaccatcccattctatgatagcacaagtgacaccaaatgccaaagactcctgctctcggacagtcacacactccaaaggctacagagaaatataaatgggactctccaggtttccacctgcagggtagaaacagaacacacccaagcccaacggagacttcacttaggccagagggctcctggacgtttcccaaaacatccctatcaaaggaaagtgccagattaagatttatgaatccctatgctgtggtgtgacaatctgtaacaaccaactcaaatgtgccaccagcttagcatctccaggtacacagaaaaagagaaagaaagttcagccaaagggcaacactgttgctctgactgagttactttctgaatgactcttctttctgcctcatctctctcatgcctgggaactctcatgcccatccacccaaatagtaggggagctaggacacgctgtgtctgcactccaggaagtgagagagaagaggaaatggctgaagctcccactgcgtgatcccatggacaaccagataacagttttccaagagcacatacataagctcaaacccattttttttgttgttgttgagacagagtcttgctctgtggcccaagctggagtacactggtgcaatcccagctcactgcaacctccgcctctggggttcaagcaacaatcgtgcctcagcttcccaagtagctgggactagaagcacgtgccaccaagcccggccaatttttgtatttttagtagagacggggttttgccatgttgtccaggctggtcttgaacttctggcctcaagtgatctgcccacctcgggctcccaaagtgctgggactacaggcgtgagataccgtgctcggccatcaaacccatcttataaatcaacaggttgacacagcgtaagagggatggtgaagacttcctcacacatggacccatacatttattcattcaacaaaaacctactgggcacattttatgtacaaagcacagtgcacaagctgtgaacaaggcagagataatccttcctctatgggtaacacagacaattatgaagtgccatgactggggaaggctaggatgctgtggaaatatacagaagcagcaccagagatatcctctcagaggaaaagacctttgagttgaaaagtgagggttgaagaaacagttggttttggagaggagagggagtcacgtcctggtgtgtcttaagcaaagggaacaacatatatgatgttctcaaaagtggtacattgtagactggcatggctagatgattgattctgtaagaaagtctggagaagtgggcagggcatgttggacaggtccttgttaaagaatgtgatcttcggccgggcgcggtggctcacacctgtaatcccagcactttgggaggccgaggcgggcggatcacgaggtcaggagatcgagaccatcctggctaacacggtgaaaccccgtctctactaaaaatacaaaaaattagccgggcgtggtggcgggcgcctgtagtcccagctactcgggaggctgaggcaggagaatggcgtgaacccgggaggcggagcttgcagtgagccgagatcgcgccactgcactccagcctgggcgacagagcgagactccgtctcaaaaaaaaaaaaaaaaaaaaaaaaaagaatgtgatcttcattaaagccactgaagggttttcagcagggaagtgacatgagcaaacctgtatttgtaaaggttgttctggatgtttagaaaacttagggttttggccagctgccccgtccgggagggaggtggcgggcgcctccgcccggccagccgccccgtccgggaggtggggggcacctctgcccggccgccccttctgggaagtgaggagcccctctgcccggccactaccccgtctgggaggtgtacccaacagctcattgagacgggccatgatgacgatggcggttttgtggaatagaaaggggggaaaggtggggaaagaatagagaaattagattgttgctgtgtctgtgtggaaggaagtagacatgggagacttttcattttgttctgtactaagaaaagttcttctgccttgggatgctgttgatctgtgaccttacccccaaccatgtgctctctgaaacatgtgctgtgt

SEQ ID NO: 16935 - DNA, 2300 bp, Homo sapien
gttggaatgagttctaattcctagagttgtatcatgaggctttaggtttatagtttgagagccagtacccattatgaagcttagaaaaagcttttagactggacacagtagcacatgcctataatcccagcattttgggaggctgaggtgggaaattgcatgaacccaggagttggagaccagcctaggcaacataatgagatgccgtctctaataataataaaaatatttcacttaaaaaatacataaataaggctgggtgcagtggctcacgcctgtaatcccagcactttgggaggccaaggcaggcggatcccgaggtcaggagatcgagactaccctggctaacacggtgaaaccccgtctctactaaaaatacaaaaaattagccgggtgtggtggcaggcgcctgtagtcccatctactcgggaggttgaggcaggagaatggtttgaacctgtgaggtggagcttacagtgagccgagatcgcgccacggcactccagcctgggcaacagagcgagactctgtctcaaaaaaaaaaaaaataataataaaaataattaaaaatacataaataagtaaatacattaaaaaagaaagcttttggcctggttctctctggatagcacaagcactgatttaatctataatgataaagaatagttgagtctctgcactagtaggtaagtgctttatctgtgataacccagttatttcattgtctcataattatatcatcatgacagagaaagccagcttaattttttggcctcatggatataaagactccatatcttgctgggaacagtgactcaacgccggtataatcccggcacattgggaggctgaggcaggaggattgcttgaatccaggagttcattcatgactagccttgacaacgtagggataccctgtctctactaaaaaaaaaaaattagccaggtgtggtgggtggtcctagttactcgggagcctgaggtgggagaatactctggtctggaaggttgaggctgcagtgagtcttgactgctccacttcactccagcctgggttacagagtgagaccctgcctcaaaagaaaaagattccgtatctgtaaggtgggcatcagaaaattttttagggtttttgtgagttgacttcatgtctttaattagtcctatgcttttgtaaagtagtttgcaatatgtacctcaggctgtactcttcactctggaagctatttgaaaagtgtgtgaactgcagtttggcagcacgtgatgacagcagttcattagagcctctttctgtgggaagaagcagattggttttctttttcttaggccatgagaaacagcttagtgggatcctcaaagaaggtcagaaccagaaccgggtttttcagatgttgataatgtgaggtgggttgcaaggagcagcccctggtaggcaaggattggggctgctttgtccagatcactgctggactgtaaggctaatgtctttgtggttggtagtgagtgcaagtttctcaaagtacatcagccctacctataaacccttaatgccccaaatgacctcggtcaccaaaccacttcagggctttatttttatcctatccgttttgtttcaatatgtgaggttggtttctttcctctaacagagcagagttctctgggggaagaaacagagtgccagggtgctgctgaggctggttaaacaccaaaaccacactcttcatctttctggggttgagacgtgacataagccatgctgcaaacgccagcttccacactgaagaaacctctctcagtagtcactttgtttattttttgtgtattgtgtttttaggcaaataaaatatagaggagtaaatggtgtaccttcccattctgctgtagacagagatctaacaatgagcacttgcttaaaatctgccatttcccagcttaaggtttttcatcctccccgagagtgttgatgagaactctcaaaactcaccaggtctcaggaagccggattaccagcatatcctgttcgcgtgcgtgtgtatattctgtgttacccacaggccactttccaccccacgtgacctttagttaccatccggaaagtcaggacccagatacccgtcagaatttccaggccttggtttggtttagacattttagaagatgttaacagcaataattgtaaaagactttgagtggcacgcatggtgaacagaaagtactagatcctgaagaggggggaaaggcatttctgtgctcttcctggtaaagtgtttgaaaatgaacattcagaagaaaacctaaag

SEQ ID NO: 16936 - DNA, 2300 bp, Homo sapien
caggtgagtagtgtagatagaaattagtatggattggaataataataaaaatagctaccaagtaactgtaatggtgtgccaaatattctgttaaactatatgcattatataattttaatctttttgggagccatatgttgtaaacatttccattttgcaaataaggaaacctctctaggttaacgtgctgtgtcatacctaataaatgcaagaccgaattcagactcaggcactgaccttagaacctgcacctctagccatgccaggtgaatataagataggagttttgaagaatgggtagacgctggggagagagagaagctagcattttaaatgtattttgaaacagttatggaaaacattgaaaatgtacatgaagttggagaaaaagtgagaaagccttttggatattctttctgcctttgtttcaatgttttcctttttccttctttctgacccacttcctttttctttacttcttcttttccctattaattgcttataaatagacttgctgaatttcttgaataatatccataaaatgttcaactcagctacttatttattttaaaaaattatcaataacaatggcaacatcattgattaagtacagttaagtgtgagacagtggacaacactttgtaaacctgaggatactcctccattgggtattattactcccattgtaatgttgaggatataggaactcaggaagattattacataataatgtaataatcttggagtcttttgtccaaagtttccgagtcaactcctggattagccagtatttggaccaaggtctgtctggcttgtaatttcgtgatttcattatagcatactgactctctgataagaacaggaaatataaagtgaattgaacatcatgctttttctaagaacaagatgtaatttctgtttatattttaagagcctgtttattcctttctctccttatgagtacttggttcttggagcacctctgcatgtaagatataatactgtgcaagaagagatctgtgatgtaattgcaatggcttctcctgtggatagcatttctgattttgttgttgggattcctctcagtttgggagacaggctgggagagatagtagggtttcctgagtcagctgcctcttgctggagttaggacgagaattggttgactgaatgtctctggcctctttccacagaggaggaagcttgacgctgtctattactatatgcgcagtttagctgccagcaaccctatcctgactgccaaggagagtctcatgagcttgtttgaagagaccaagcggaaggtgagtggggatgtggcagaacccttccttcctcgaatagtgcatttccctgagtgttggtgtgccctagctctgcgcaccggcaggatcgtagccagtgaggtttatccaaggtgcagttattgctcagtgtctgtgtgtcctcggggaatgactcatagtgtccttaaatggtcccatcagactgtgctggtgggtagttggtcagcccctgtgcagaacaaaactgtgatcttcaggagagctttcaggggcccttggatgtacatgtacgtgctctacagccttcagtctacagaattaataactatatgaaacaaagcagatgacactctgctactttgggactgtggtacagtatttttattgtcaaataaataccggtgaggtgaggcttttctctttgtaagctgagtctcaggaaagtctgagctcatgtgtgttttttgtttttgagacagagtttcgctcttgttgcccagactggagtgcagtgatgcgatcttggctcactgcaacctctgcctcccggatttaagtgattctcatgcctcagcctcccgagtagctaggattacagatatgcgccaccacacccagctaattttgtatttttagtagagacagggtttcactatgttggtcaggctggtctcaaactcctgacctcaagtgatccgcctgcctccgcatctctaagtgctgggattacaggcgtgagccaccacaccaggccatgagctaatgtgtttgtatgttatataggcagaacagatggaaaagaagcaacatgaggaatttgacctgagccctgaccagtggcggaaaggaaagaagtctactttccggcatgttggagatgacaccactcgcctggagatctggattcatccatcccatccacggtcttcccagggcactgagtctgggaaggattctgagcaagagaatgggctgggcagcctgagtcccagtgatgtaagttcctgagaatga

SEQ ID NO: 16937 - DNA, 2300 bp, Homo sapien
ttaaaaaagtatctgttaccgttatcaaaagtaaccactaaacattacaatggaaaagtgacagaattcgggagaatattatcaagtacacaaatggaatgctatataaaatcctagcataggccaggtgcagtagctcacgcctataatcccagcactttgggaggctgaggcgggaggactgcttgaggccaggagttcgagatcagcctgggcaacatggcaacaccctgtctctataacgtatacaaaaaatagccaggtgtggtggtgcaggtctgtaattccagctactcggaaggctgaggtgggaggatcacttgagcacaggagggggaggctacagtgagctgagatccctccactgcactccagcctggaagacagagtgagaccctgcctcaaaaaaattggccgggcacggtggctcacgcctgtaatcccagcactttgggaggccaaggcgggcggatcacgaggacaggagtccagaccatcctggccaacacggagaaaccccgtcactacaaaaatacaaaaaattagccaggcgtggtggcacacgcctacagtccaagctactggggaggctgaggtaggagaatggcgtgaacccgggaggcggaggttgcagtgagcagagatcgcgccactgcactccagcctgggcgacagagctagactccgtctcaaaaaataataataacaacaataaaaaagtttttaatcctagtattgctctctaaatataaatggaaacaagcccaaaacaggaatcatatgctccagcaagtacatttactgtttgtaggtgtaaggaaaaggggaagaaaagagactgaggttttggatagtgcttcactattttcataagtttaaaaggtaggttcatgaagtatccacaaagataaagcagtttaacccaagaatagctcaccctcggcagtctgtaacttggtggggggcggggggatggggaaagctattcctactactttctagagcagcgggagaaaatagccttaataatccaattatgttaatcaacaaaaaccaatttcacagactggccgcaaacctagagaaggcacctatcacagctaccattctacacaactctattgcctaacgcaggagaggtgagacacttagaatctttcttactttcctgacgtggctggagacttgaaattaacttgcaaattgagcattctctctaataaaaactgctcccacacatgccagggccaaacccgagtagtctgaggtcccggatccctccagtggcgcagctttcggaagcctgtcttgggggggaaaagttcagcaacgaagtcgcaggctcttaaacctttctccccaattccttctctccgacgttaaagcggtggccggggcaggcccgcggagggcggcctggagagcgatacgcccggggcctccaccagaccccactcctttccgcgtctcccgatgcctgggaatccggggcgggtctgagagggctggggcaaaaggaacagtcaccttcgcggcgagaaagagggtggaggcaggaattcgggccaggctctcccggagctggccaggactggccgagcccgaccccgcactaacccgcgagagaggtagggcagcgagggtccgccgcggccccagcgcctactgctgggggaaggggcgggggctccggagccgagggccgagcggggaggaggcagaggaggaggagagggaggcggggcgggcaggcccggcccaggagctgggcggcgcgactcacctctgctcccggcctgcggggccagagtagccaggatcccgcgcagctccgacgcggagatccgcacacgctccagcccttccgccatcttcgcggctgctgctacagccgtagcggctccgccaccgccgcgcgcagccaggaaaccaccacagacgggcggcgcgcgcgctcgcccacctcccggcctttccccgccccctgccgccctccctttccgaacgacggtggccgcgctgggaggaaaagcgcccgccgccggttccagaggggcgggaccggagcgagagcctgggtggggcgggcgggcgctgcgcgtgcgcagaggtgcggccggggaggcgcgcggaggctggagctggaggcgcggcgccggtgagctgaggtgaggcgaggccgggccgtgccaggccaggcgggcgtttgcggcggtggctgccgttgctgttgtcgtggacaccaaggacactgctagtctgggactcgggttgacagagacacccctcagcctgggctc

SEQ ID NO: 16938 - DNA, 2300 bp, Homo sapien
gaaaccccgtcactacaaaaatacaaaaaattagccaggcgtggtggcacacgcctacagtccaagctactggggaggctgaggtaggagaatggcgtgaacccgggaggcggaggttgcagtgagcagagatcgcgccactgcactccagcctgggcgacagagctagactccgtctcaaaaaataataataacaacaataaaaaagtttttaatcctagtattgctctctaaatataaatggaaacaagcccaaaacaggaatcatatgctccagcaagtacatttactgtttgtaggtgtaaggaaaaggggaagaaaagagactgaggttttggatagtgcttcactattttcataagtttaaaaggtaggttcatgaagtatccacaaagataaagcagtttaacccaagaatagctcaccctcggcagtctgtaacttggtggggggcggggggatggggaaagctattcctactactttctagagcagcgggagaaaatagccttaataatccaattatgttaatcaacaaaaaccaatttcacagactggccgcaaacctagagaaggcacctatcacagctaccattctacacaactctattgcctaacgcaggagaggtgagacacttagaatctttcttactttcctgacgtggctggagacttgaaattaacttgcaaattgagcattctctctaataaaaactgctcccacacatgccagggccaaacccgagtagtctgaggtcccggatccctccagtggcgcagctttcggaagcctgtcttgggggggaaaagttcagcaacgaagtcgcaggctcttaaacctttctccccaattccttctctccgacgttaaagcggtggccggggcaggcccgcggagggcggcctggagagcgatacgcccggggcctccaccagaccccactcctttccgcgtctcccgatgcctgggaatccggggcgggtctgagagggctggggcaaaaggaacagtcaccttcgcggcgagaaagagggtggaggcaggaattcgggccaggctctcccggagctggccaggactggccgagcccgaccccgcactaacccgcgagagaggtagggcagcgagggtccgccgcggccccagcgcctactgctgggggaaggggcgggggctccggagccgagggccgagcggggaggaggcagaggaggaggagagggaggcggggcgggcaggcccggcccaggagctgggcggcgcgactcacctctgctcccggcctgcggggccagagtagccaggatcccgcgcagctccgacgcggagatccgcacacgctccagcccttccgccatcttcgcggctgctgctacagccgtagcggctccgccaccgccgcgcgcagccaggaaaccaccacagacgggcggcgcgcgcgctcgcccacctcccggcctttccccgccccctgccgccctccctttccgaacgacggtggccgcgctgggaggaaaagcgcccgccgccggttccagaggggcgggaccggagcgagagcctgggtggggcgggcgggcgctgcgcgtgcgcagaggtgcggccggggaggcgcgcggaggctggagctggaggcgcggcgccggtgagctgaggtgaggcgaggccgggccgtgccaggccaggcgggcgtttgcggcggtggctgccgttgctgttgtcgtggacaccaaggacactgctagtctgggactcgggttgacagagacacccctcagcctgggctcctctggacaccttaggccaggctctcccgccacaggcccggcctagcgccgcgggccattacttgggaccttgaagatctgctaagagtagttgttactattcccttttttttttagttggagtctcgctctgttggagactcccgggctggagtgcagtggcgcggtctcggctcactgcaacctctgcctcctggattcaagcgattctcctgcctcagcctccctagtagctgggattacaggtgcacgccaccaagcccggctaatttttgtattttttgtagagacggggtttcactaggctggtctcgaactcctgacctcaggtgatccacccgcgtcggcctcccaaagtgctgggattacaggcgtgagccaccgcgcccggccgccccctgacttttaaaaactagatacgatatagttggaatcgtgtggaaggaagtacatcaggaggcatataagtccatttgggacctgtaatcccggcgactcggaacgctgagacg

SEQ ID NO: 16939 - DNA, 2300 bp, Homo sapien
tgaattctttaaatctgataattcaaaaatttccaccaacgtagtaaattttcttctactatttgattattgctcttctgcagtcagctgtattatccccttctggaactcgtatttaattattaattttttgtaccccttctccatgtctcctatctttgtctctcagtttttatctattaccttttccttctgagttctggtaaattttcttgaactggtttaacttttggcatatctaatctgcagttcactgacactgttgcattaaatgggtggtgccatttgtcctaagaaagttttcttgttttccattatttttccagctgaaaaaagaaatcatgcaatggcctctcaaatttcaatatgaaacagattattttttaacgcttcttcctatttctctcaaatctggtggcaaaggctgtcttctgctctgaccactcaaatggttcctcttctgaactgttggatcttttcacccatcatctactgactttcttcttatgcttaaccttccggtgacaaagtgtcacgtaaaaggaactgaaggagttctgtcagaggttgtggcaatcccttcggctcagactaaggaataattggtaactattctgtgatgggtgtggggtaaaagcctatggggctgtggaggggcaacaggtggaggcaggaggccttggggaagggagcttcacctctgtacagttctccaaaaaaagattcaagtaccagccttctggtatagttcaattttaaagatgggaaattaaaaagtcaacctgagatccacagcagtaatttttttcaagaatccatagtgacacagaaattcccaaattgacttttttttttttttgaggcggagtctcgctctgttggagactcccgggctggagtgcagtggcgcgatctcggctcactgcagtctccgcctcccgggttcaagcgatccgcccgtctcagcgttccgagtcgccgggattacaggtcccaaatggacttatatgcctcctgatgtacttccttccacacgattccaactatatcgtatctagtttttaaaagtcagggggcggccgggcgcggtggctcacgcctgtaatcccagcactttgggaggccgacgcgggtggatcacctgaggtcaggagttcgagaccagcctagtgaaaccccgtctctacaaaaaatacaaaaattagccgggcttggtggcgtgcacctgtaatcccagctactagggaggctgaggcaggagaatcgcttgaatccaggaggcagaggttgcagtgagccgagaccgcgccactgcactccagcccgggagtctccaacagagcgagactccaactaaaaaaaaaagggaatagtaacaactactcttagcagatcttcaaggtcccaagtaatggcccgcggcgctaggccgggcctgtggcgggagagcctggcctaaggtgtccagaggagcccaggctgaggggtgtctctgtcaacccgagtcccagactagcagtgtccttggtgtccacgacaacagcaacggcagccaccgccgcaaacgcccgcctggcctggcacggcccggcctcgcctcacctcagctcaccggcgccgcgcctccagctccagcctccgcgcgcctccccggccgcacctctgcgcacgcgcagcgcccgcccgccccacccaggctctcgctccggtcccgcccctctggaaccggcggcgggcgcttttcctcccagcgcggccaccgtcgttcggaaagggagggcggcagggggcggggaaaggccgggaggtgggcgagcgcgcgcgccgcccgtctgtggtggtttcctggctgcgcgcggcggtggcggagccgctacggctgtagcagcagccgcgaagatggcggaagggctggagcgtgtgcggatctccgcgtcggagctgcgcgggatcctggctactctggccccgcaggccgggagcagaggtgagtcgcgccgcccagctcctgggccgggcctgcccgccccgcctccctctcctcctcctctgcctcctccccgctcggccctcggctccggagcccccgccccttcccccagcagtaggcgctggggccgcggcggaccctcgctgccctacctctctcgcgggttagtgcggggtcgggctcggccagtcctggccagctccgggagagcctggcccgaattcctgcctccaccctctttctcgccgcgaaggtgactgttccttttgccccagccctctcagacccgccccggattcccaggcatcgg

SEQ ID NO: 16940 - DNA, 2300 bp, Homo sapien
aatacaaaaaattagctgggcatggtggtgggcgcctgtaataccagctactcaggaggctgaggcaagagaattgcttgaaaccaggaggcaggttgcagtgagccaagattgtgccactgcactccagcctgggcaacaagagtgaaactccgtctcaaaaaaaacgaaaaacaaaaaatctcagcagctttcattgtgatactgacttaaatatggttgtctttcttgtcatttctttttacctggtatttcatgaattctttaaatctgataattcaaaaatttccaccaacgtagtaaattttcttctactatttgattattgctcttctgcagtcagctgtattatccccttctggaactcgtatttaattattaattttttgtaccccttctccatgtctcctatctttgtctctcagtttttatctattaccttttccttctgagttctggtaaattttcttgaactggtttaacttttggcatatctaatctgcagttcactgacactgttgcattaaatgggtggtgccatttgtcctaagaaagttttcttgttttccattatttttccagctgaaaaaagaaatcatgcaatggcctctcaaatttcaatatgaaacagattattttttaacgcttcttcctatttctctcaaatctggtggcaaaggctgtcttctgctctgaccactcaaatggttcctcttctgaactgttggatcttttcacccatcatctactgactttcttcttatgcttaaccttccggtgacaaagtgtcacgtaaaaggaactgaaggagttctgtcagaggttgtggcaatcccttcggctcagactaaggaataattggtaactattctgtgatgggtgtggggtaaaagcctatggggctgtggaggggcaacaggtggaggcaggaggccttggggaagggagcttcacctctgtacagttctccaaaaaaagattcaagtaccagccttctggtatagttcaattttaaagatgggaaattaaaaagtcaacctgagatccacagcagtaatttttttcaagaatccatagtgacacagaaattcccaaattgacttttttttttttttgaggcggagtctcgctctgttggagactcccgggctggagtgcagtggcgcgatctcggctcactgcagtctccgcctcccgggttcaagcgatccgcccgtctcagcgttccgagtcgccgggattacaggtcccaaatggacttatatgcctcctgatgtacttccttccacacgattccaactatatcgtatctagtttttaaaagtcagggggcggccgggcgcggtggctcacgcctgtaatcccagcactttgggaggccgacgcgggtggatcacctgaggtcaggagttcgagaccagcctagtgaaaccccgtctctacaaaaaatacaaaaattagccgggcttggtggcgtgcacctgtaatcccagctactagggaggctgaggcaggagaatcgcttgaatccaggaggcagaggttgcagtgagccgagaccgcgccactgcactccagcccgggagtctccaacagagcgagactccaactaaaaaaaaaagggaatagtaacaactactcttagcagatcttcaaggtcccaagtaatggcccgcggcgctaggccgggcctgtggcgggagagcctggcctaaggtgtccagaggagcccaggctgaggggtgtctctgtcaacccgagtcccagactagcagtgtccttggtgtccacgacaacagcaacggcagccaccgccgcaaacgcccgcctggcctggcacggcccggcctcgcctcacctcagctcaccggcgccgcgcctccagctccagcctccgcgcgcctccccggccgcacctctgcgcacgcgcagcgcccgcccgccccacccaggctctcgctccggtcccgcccctctggaaccggcggcgggcgcttttcctcccagcgcggccaccgtcgttcggaaagggagggcggcagggggcggggaaaggccgggaggtgggcgagcgcgcgcgccgcccgtctgtggtggtttcctggctgcgcgcggcggtggcggagccgctacggctgtagcagcagccgcgaagatggcggaagggctggagcgtgtgcggatctccgcgtcggagctgcgcgggatcctggctactctggccccgcaggccgggagcagaggtgagtcgcgccgcccagctcctgggccgggcctgcccgccccgcctccctctcctc

SEQ ID NO: 16941 - DNA, 2300 bp, Homo sapien
cgggcgtggtggctcacgcctgtaataccagcactttgggaggccgaggcgggcggatcacctaagatcaggagttcaagaccagcctggccaacatggtgaaaccccgcctctacgaaaaatataaaaattagctgggtgtggtggtgggcgcctgtaatgccagcaactcaggaggttgaggcaggagaattgcttgaacccaggaggcagaggttgcagtgagccacagtcatgccactgcacttcagtctgggtgacagtgaaactccatctcaaaaaaacaacaaaaaaaaaatgttgataaatgtactcacctatgagattcattgatattcataatactgtctgacaaaaaaagaagttaccaaacctaccaaagagttttgtctgcatatgtagttgggcctggaaaggtaaaccactggatagcaactgtctttaggtaggaaggtttcgtggctattttcatgttctttttgtatctctgtattttcagattaactcagttttctaatgaatatagattcttttgtaataaggaaaaatagagaaacttcatatttaactgctacaatagacacagtggaaagtggaagcttaatgtagttattgaaaattatgaaaattgtaaagaaactgagtcaaatgtaggagcaaataaaatgtttgctttaactgttacataatgtatattgagaatgcagaaggagccgggcgcagtgactcacgcctataatcccagcactttgggagtctgaggcaggcggatcacctgaggtcgggagttcgagaccagcctgcacaacatggagaaaccccgtctctattaaaaatacaaaattggccgggtttggtggctcacgcctgtaatcccagcactttgggaggccgaggcaggcggatcacgaggtcaggagattgagactatcctggctaacacggtgaaaccccgtctttactaaaaatacaaaaaattagccaggcatggtggcaggtgcctgtagtcccagctaccagggaggctgaggcaggagaatggcgtgaacccgggaggcggagcttgcagtgagccgagatcgcgccactgcactccagcctgggtgacagagcgagactctgtctcaaaaaaaaaaaaaaaaaaaaattagctgggcatggtggtgcatgcctgtaatctcagctactcgggaggctgaagcaggagaatcgcttgaacctgggatgtggaggttgtggtgagccaggactgcaccagtgcactccagccgggacaacaggagtgaaacaccatctcaaaaaacaaaaaaaaagaaaatgcagagggaaataaagaaaatgaacatagttatttaaatggaatagtctagctattttttctttatcaaataatttgttaaatttttattaaaaattaaaaatttaaatttataaattaaaaataatataaaaattgaatccaattcattcaagtagcttcacaacgatgattaaaagaaaggtggagctgggcacggtggcttacacctgtaatcccagcactttgggaggccgaggcaggcggatcacgaggtcagaagttcaagaccagcctggacaacatggtgaaaccccgtgtctactaaaaatataaaaattagctgggcacgatggcacattcctgtaatcccagctactcgggaggctgaggcaggagaattgcttgacccgggaggcggaggttgcagtgagccgagattgtgccactgcactccagcctgggctacagagcgagactccgtctcaaaaaaaaaaaaaaaaaaaggaagatggagaccagtggcagtgccaacagtgccaagagatgggtggtgtgggtggggagtgggctttagccttctgtaatcaccatcagttacttccctcaaagcttcaccagaaaaacttcgttcagcttttaagtcaactctcttttagggaaattctgacactccaataatggagaatttccacatgacaccacaggccccaggtctattctgttacgtattttcaaaatctcttcaataaacatactgtctcagactttgctttgacccctttcttattcctgggtttcagaaccatgtgtgctcagtattgcatctcctttgctgatgttgaaaaagctcatatcaacattcgagattctatccacctcacaccagtgctaacaagctccattttgaatcaactaacagggcgcaatcttttcttcaaatgtgaactcttccagaaaacaggatcttttaaggtaacaatcctttttctcagtgtatcat

SEQ ID NO: 16942 - DNA, 2300 bp, Homo sapien
gcgcctctcggctcagcgccccacgcgcaaggcggagcccccgcccgccgcgctcccggcccgccgccgccgccgccgccgcagccactgcccggtgctcggctccgcagccatcttccgagccccgcacagacgtcaggcggcaggcccggccccttcccacagccggaggggggttgcgcacagcgacgggggatcggggcggggagaggccgtgcgcgcctaggggcggcagacccgggcgcgcgccacgggggtcgctgtcatggcaacgcacccgctcccgcatggagggcgcgaagccgcattgtgagcgctggccctggagcccgcggccccgcggctgagagcgagcctcggtcccgctgaagctcccctgacttctgcctgctccctctcccgacgggacggaaagggccggggctcgggcatggggtcccctgcggtccgagcctgcccacggcgaagccggtgcagcctggccccgtgacccctctgaatccccgtccggccgtcgccgtgcagttgtcaagtttctgggaagattagtgggagcgcagccgcccgagcccgacggccggagggtcgcggccagtcccccttgccgggtcgccacgtcccacaaggtccttcccggccgctccgtgggaggcggggcgcaggttggagtaacagggacgggcttgagctggtacggaaccgggcaaggtgagagaagtgtcttccacgcgattcccaagcctcgctagggaatcgagggagaagaaaggttgctcagagtgataaagaacatgccgttgcaaacggaagagcaacgtgcccgaatctaggtgacaggaagggcttaggccttttcggcacgaatggagccttccagtcaacatgcttctacgtgatgcagctttatagcgcaaaaaaatgacaatgcaaggggtacaaacagccctgctagaccaacagcccgagcctcgacagtctacatccggcgccttcaagcccccaaccacacactgcgaagtgggaaaagttcccagcgcggcttggcgaacccgctaacacggcgctctcacgagctgctggaaaagaccttcgcgagagggcgcagggagtcccgctccctggagggcccgcccccttggaggggaccggaagcgcttgtcctggcccggaagcagtgctgactccgtacacgcgcgctgcggcatggcggcccaccgccccggcccgctcaagcagcagaataaagctcataaaggcggacggcatcggggtcggggatctgcacagcgggacggcaagggtaaggagataacgtagaaggaataagggctatttggccgttattaactctttttcctcatgcccagactgagcttctgtctcccgtctgggctccacgcgaaaggccctttctaaggtgggcggagaggagtcccttttcttgaccttgtggggccgatcacaccagccccttctaatctgccattcaggccgtctggcactgaaaaccctaagcaagaaggtgagaaaagaactcagcagagtcgaccagaggcatcgcgccagccagctccgaaagcagaagaaggaggcggtgagaggagcgggatttgggagaatgcggcttctctggtgttctaggtggctaatgcctcgaagtggaaaatgagaccgggaggagggtccagggacagagcatagccctagagcacgtgtcgagcgtgcaggtctagcattctttgctttggtcagaattcctgccaccccgctggcatacctgtggtcttttactagagagatgctggttttgggtagggggagcatctgtgggagtggaaatgcaatgctggagtgaagtactgagacactgagatgttctcggatatctttctattttcaggttctggcagagaagagacagctgggtggcaaggatggccctcctcatcaggtactggtggtgcccctgcacagcagaatttccctgccagaggccatgcagctgcttcaagatagggacactggaacagtacacttgaatgaattgggaaacacccagaactttatgctgctgtgcccccgcttgaaacatcggtggtttttcacctcagcaaggccaggttagagtatacaccaatattttgtattatgtttgagtagtggtattttttttttttttttttagaataatgtgctggtgccaaccacctcttcttactgtgtcttctatctgcaggggatctgcacgttgtgttagacatggctaaagtagctgataccatcctgttcctccttgatcc

SEQ ID NO: 16943 - DNA, 2300 bp, Homo sapien
taagaagaggtggttggcaccagcacattattctaaaaaaaaaaaaaaaaaataccactactcaaacataatacaaaatattggtgtatactctaacctggccttgctgaggtgaaaaaccaccgatgtttcaagcgggggcacagcagcataaagttctgggtgtttcccaattcattcaagtgtactgttccagtgtccctatcttgaagcagctgcatggcctctggcagggaaattctgctgtgcaggggcaccaccagtacctgatgaggagggccatccttgccacccagctgtctcttctctgccagaacctgaaaatagaaagatatccgagaacatctcagtgtctcagtacttcactccagcattgcatttccactcccacagatgctccccctacccaaaaccagcatctctctagtaaaagaccacaggtatgccagcggggtggcaggaattctgaccaaagcaaagaatgctagacctgcacgctcgacacgtgctctagggctatgctctgtccctggaccctcctcccggtctcattttccacttcgaggcattagccacctagaacaccagagaagccgcattctcccaaatcccgctcctctcaccgcctccttcttctgctttcggagctggctggcgcgatgcctctggtcgactctgctgagttcttttctcaccttcttgcttagggttttcagtgccagacggcctgaatggcagattagaaggggctggtgtgatcggccccacaaggtcaagaaaagggactcctctccgcccaccttagaaagggcctttcgcgtggagcccagacgggagacagaagctcagtctgggcatgaggaaaaagagttaataacggccaaatagcccttattccttctacgttatctccttacccttgccgtcccgctgtgcagatccccgaccccgatgccgtccgcctttatgagctttattctgctgcttgagcgggccggggcggtgggccgccatgccgcagcgcgcgtgtacggagtcagcactgcttccgggccaggacaagcgcttccggtcccctccaagggggcgggccctccagggagcgggactccctgcgccctctcgcgaaggtcttttccagcagctcgtgagagcgccgtgttagcgggttcgccaagccgcgctgggaacttttcccacttcgcagtgtgtggttgggggcttgaaggcgccggatgtagactgtcgaggctcgggctgttggtctagcagggctgtttgtaccccttgcattgtcatttttttgcgctataaagctgcatcacgtagaagcatgttgactggaaggctccattcgtgccgaaaaggcctaagcccttcctgtcacctagattcgggcacgttgctcttccgtttgcaacggcatgttctttatcactctgagcaacctttcttctccctcgattccctagcgaggcttgggaatcgcgtggaagacacttctctcaccttgcccggttccgtaccagctcaagcccgtccctgttactccaacctgcgccccgcctcccacggagcggccgggaaggaccttgtgggacgtggcgacccggcaagggggactggccgcgaccctccggccgtcgggctcgggcggctgcgctcccactaatcttcccagaaacttgacaactgcacggcgacggccggacggggattcagaggggtcacggggccaggctgcaccggcttcgccgtgggcaggctcggaccgcaggggaccccatgcccgagccccggccctttccgtcccgtcgggagagggagcaggcagaagtcaggggagcttcagcgggaccgaggctcgctctcagccgcggggccgcgggctccagggccagcgctcacaatgcggcttcgcgccctccatgcgggagcgggtgcgttgccatgacagcgacccccgtggcgcgcgcccgggtctgccgcccctaggcgcgcacggcctctccccgccccgatcccccgtcgctgtgcgcaacccccctccggctgtgggaaggggccgggcctgccgcctgacgtctgtgcggggctcggaagatggctgcggagccgagcaccgggcagtggctgcggcggcggcggcggcggcgggccgggagcgcggcgggcgggggctccgccttgcgcgtggggcgctgagccgagaggcgcggaggcggcgagggcgcgggggctctgaggaccgctcggcgccgcctcctgccacaccatgggcagcgcagaggacgcagtca

SEQ ID NO: 16944 - DNA, 2300 bp, Homo sapien
acagccacagaggcaggcaggggaaggaggcccaatgtattctaagctgcgctgtgggttggagctctccagctctcatatgggagtgagtcattcacatggtcactgccccccacccgaaatggaaatgggcttttgggcagggtcaaggtaaacggagttagtagagggaaggactacttctctttctgaagtaggggggcttccctcaaaagggaaaaacttccgagtgttaaaaaccattccaaacaagcccctggtccctggctaaggaggtgggcgtggagggagaaactgaggtgtgcggcgcacccctccggcagcgatcactccgtagctggaggcacagcggacgtcggacaagggggagctcagcccgcacgacacccacttaggacgtggggaagctcggcccgcacgacacccacctgcgccgcgggagctcgcgcggggccccgccccctcccctggcggcgcgggcactgaatgggcagctccggatccagccatccccgccatcgccgccacccctcccccggccttgggctcccagcgccgctgccgtcactgggcggggagctgcggggctgcgaagcaaacaagccgggagcgccggccgggtcccccgggcagaggggcgctgccctcccccatccgagaaaggggaaggaggcgcagcccgtccaggacccgccccgcccggcccaggttcggcccgggtgcccgcgccggggggtgggcgcggacctttctgccccctgggccgcgcgggccagggcgcgagccccccggggttcttgactcgactttacctccttcttcacgttccacagcagtttctctttgactgcgtcctctgcgctgcccatggtgtggcaggaggcggcgccgagcggtcctcagagcccccgcgccctcgccgcctccgcgcctctcggctcagcgccccacgcgcaaggcggagcccccgcccgccgcgctcccggcccgccgccgccgccgccgccgcagccactgcccggtgctcggctccgcagccatcttccgagccccgcacagacgtcaggcggcaggcccggccccttcccacagccggaggggggttgcgcacagcgacgggggatcggggcggggagaggccgtgcgcgcctaggggcggcagacccgggcgcgcgccacgggggtcgctgtcatggcaacgcacccgctcccgcatggagggcgcgaagccgcattgtgagcgctggccctggagcccgcggccccgcggctgagagcgagcctcggtcccgctgaagctcccctgacttctgcctgctccctctcccgacgggacggaaagggccggggctcgggcatggggtcccctgcggtccgagcctgcccacggcgaagccggtgcagcctggccccgtgacccctctgaatccccgtccggccgtcgccgtgcagttgtcaagtttctgggaagattagtgggagcgcagccgcccgagcccgacggccggagggtcgcggccagtcccccttgccgggtcgccacgtcccacaaggtccttcccggccgctccgtgggaggcggggcgcaggttggagtaacagggacgggcttgagctggtacggaaccgggcaaggtgagagaagtgtcttccacgcgattcccaagcctcgctagggaatcgagggagaagaaaggttgctcagagtgataaagaacatgccgttgcaaacggaagagcaacgtgcccgaatctaggtgacaggaagggcttaggccttttcggcacgaatggagccttccagtcaacatgcttctacgtgatgcagctttatagcgcaaaaaaatgacaatgcaaggggtacaaacagccctgctagaccaacagcccgagcctcgacagtctacatccggcgccttcaagcccccaaccacacactgcgaagtgggaaaagttcccagcgcggcttggcgaacccgctaacacggcgctctcacgagctgctggaaaagaccttcgcgagagggcgcagggagtcccgctccctggagggcccgcccccttggaggggaccggaagcgcttgtcctggcccggaagcagtgctgactccgtacacgcgcgctgcggcatggcggcccaccgccccggcccgctcaagcagcagaataaagctcataaaggcggacggcatcggggtcggggatctgcacagcgggacggcaagggtaaggagataacgtagaaggaataagggctatttggccgttattaactctttttcctcatgcccagactgag

SEQ ID NO: 16945 - DNA, 2300 bp, Homo sapien
caagtagctgggactacattcgcccgccaccacgcccagctaattttttgtagagagaggtttcaccgtgttagccaggatggtctcgatctcctgacctcgtgatccgcccgtcccagcctcccaaagtgctaggattacagtcgtgagccaccatgcccagctttcttttttagacggagagttgctctgtcgcccaggctagactgcagtggttcgatcttggctcactgcaaccacacctcctgggttcaagcgattctcctgccacagcctcccgagtagctgggattacaggtgcccaccactgtgcctggctaatttttgtattttttgtttttttcagtagagatggggtttcaccatcttggccaggctggtctggaactcctgacctcgtgatctacccgcctcagcctcccaaagtgctgggattacaggcgtaagccaccgcgcctgtccactttccaggatgttatgagagtccagacgcttccccaaccctgaaactctaattacggctcagctaaggtaaacttttttttttttgagacggagtctcactctgtcgcccaggctggagtgcagtggcacaatatcggctcactgcaatctccacctcccaggttccagcgattctcctgcctcagtctcccgggtagctgggattacaggcacgcaccaccacccctggcttattttggtatttttagtagagacggggtttcactatattggccaggctgatctcgaactcctgagctcaggtgatccacccacctaggcctcccaacgtgctgggattacaggcgtgaggttatatatatatatattagggagacggcatagagactcaaggtcacacagaattaggtccagactattccaaaatgtatgctttccaaacaccaggcctcgaagtctccaaaatcagcacatttatttaccaaacagtcacggagtgcctacagtatgccaggcactggatacaaggcagtggacaaaacagagggtctcctgccctggtggagtttacttaccaggcagacaacagccacagaggcaggcaggggaaggaggcccaatgtattctaagctgcgctgtgggttggagctctccagctctcatatgggagtgagtcattcacatggtcactgccccccacccgaaatggaaatgggcttttgggcagggtcaaggtaaacggagttagtagagggaaggactacttctctttctgaagtaggggggcttccctcaaaagggaaaaacttccgagtgttaaaaaccattccaaacaagcccctggtccctggctaaggaggtgggcgtggagggagaaactgaggtgtgcggcgcacccctccggcagcgatcactccgtagctggaggcacagcggacgtcggacaagggggagctcagcccgcacgacacccacttaggacgtggggaagctcggcccgcacgacacccacctgcgccgcgggagctcgcgcggggccccgccccctcccctggcggcgcgggcactgaatgggcagctccggatccagccatccccgccatcgccgccacccctcccccggccttgggctcccagcgccgctgccgtcactgggcggggagctgcggggctgcgaagcaaacaagccgggagcgccggccgggtcccccgggcagaggggcgctgccctcccccatccgagaaaggggaaggaggcgcagcccgtccaggacccgccccgcccggcccaggttcggcccgggtgcccgcgccggggggtgggcgcggacctttctgccccctgggccgcgcgggccagggcgcgagccccccggggttcttgactcgactttacctccttcttcacgttccacagcagtttctctttgactgcgtcctctgcgctgcccatggtgtggcaggaggcggcgccgagcggtcctcagagcccccgcgccctcgccgcctccgcgcctctcggctcagcgccccacgcgcaaggcggagcccccgcccgccgcgctcccggcccgccgccgccgccgccgccgcagccactgcccggtgctcggctccgcagccatcttccgagccccgcacagacgtcaggcggcaggcccggccccttcccacagccggaggggggttgcgcacagcgacgggggatcggggcggggagaggccgtgcgcgcctaggggcggcagacccgggcgcgcgccacgggggtcgctgtcatggcaacgcacccgctcccgcatggagggcgcgaagccgcattgtgagcgctggccc

SEQ ID NO: 16946 - DNA, 2300 bp, Homo sapien
tggcgggggagatttgccacaaggtacaggagctgcagcaacaagcagagggcaggtgagccctgggccagccccttcttccctcctttcagctcttcccacttggcaattgctacttcctaggacacccatcggaaagttggcatcctgggcctgttccttgcagggcctctgggtgagggatcagcttgagggaggggattggttccttgtgggcacaaggctctgtacccctccttcacctcccaaccccagtcagttctctgtgctcccatcttggggtaccaagccccactcccaatgccagcattctggggtttacccctagaccactgcactcctggagccctccccgcctttgcaggaaaccctcaggggtcagccaggaggccctgcggagacagggctcagccagcgggaaggccccggccctcagccctcaggccttgaaacacgtatgggtacgcacggcgctcatcgagaaagttctggacaaggtcgtgcaatacctggcggaaaactgcaggtgaccgccccgttccccaaaaactgcaggtgaccaccccgttccccccaaaactgcaggtgaccgccccgttccccaaaaactgcaggtgaccgccccgttccccaaaaactgcaggtgaccgccccgttccccccaaaactgcaggtgaccgccccgttcccaaaaactgcaggtgaccgccccgttccccaaaaactgcaggtgaccgccccgttccccaaaaactgcaggtgaccgccccgttccccaaaaactgcaggtgaccgcctcgttccccaagcagcccctcccttgacccgtctcccgacgtccctcagccccagccctcaggatgcttgcctgtccgtgacagcctgtaggcaaccctccatctccccgtccccttcggtgccctcaaggcattggccataccaggcacctcacgaagcccagtccctaaggactcactgtttcttgatgactgatctgaatctggtctttgtggggatgtccctacctggtgagcttgactgccctggaatgagccccggagcctcggcagtcacactgtctgtctcctggcagcaagtactacgagaaggaggcactgctggcagaccctgtgttcggcccgatcctggcctctcttctaggtgagcctgagagcacaggcacagtgggtacggggcaggtgctgagggagcatcgtctgggctggctgtctctgtctccacagtgggaccctgtgccttggaatacactaagctcaagacagccgatcactactggactgacccctctgctgatgagctggtccagcggcaccgcatccggggtccacctactcgccaggactcccctgcaaagcgcccagccctgggggtaggtgccccctccccaccctttgggctcatctgggctatgcccatgggcctgtagggacgggaaaccggcctctctacgggacaggccttggagatgccccaaggtagcggctgcctcagaagagccttctccgcacaataaaacttaacacaaatgccgggagcccatgctggtccgtggctggagagcagagggtggctgggagtaaaccggggcaggaaggacccctggggtcagctggagagggtcagcatggaagcgtgagggttcccaagccttgaggccagtttcccaaggctggaggctgagccccggccttccacacagatccggaaacggcactcaagcggcagcgcgtcggaggacaggctggctgcctgtgcccgcgagtgtgtggagtccctgcaccagaactcacggacgcggctgctctatggcaagaaccacgtgctggtgcagccggtaggaaagcttcatcctgccatccctccccgaaggtccccgaacgagacgactggaagcctctagccatggctattcctttcctgaggagcttgaccagagacgggggggagaatggccccagcctcccaactccctgtttcacacgactcacgcccagcctttagttggcaggggacaggaatggcagccagcaggcgaggggagtccgcagtgtgggtatggctggcctggaatggacctggcatccaggaggctggcaggagagagtcagtggcaccaggctgaccagggaaactgagtcctgttttcctgtgcttctgccccgtccctagtccaggaccccgtgactagcctagcttggcctcccctcctcccagcgggagctcatttctcataggccatccctgagagcctctcagcccttcatcgtcggtcttccggt

SEQ ID NO: 16947 - DNA, 2300 bp, Homo sapien
acccagcctgggggcactggccagcagggtgtgatagccgacgagagggcctcagccgcactctccacgttcacccccagagagcggtggcacgcttgtgctggtgagccaggatggcatccagaggccgccgctgcatttcccacagggaggacacctgctgtcctttctgtcctgtctggagaatgggctgctgcctcggggacagctagagcccccgctgtggacccagcaagggaaggtaactcgggtgggaggctttaggggaagggctgtgtgtggggttctctgcccgcctcccttccttccccacgtggagttcttaggagcggccttgtgtggaaccctggatgagactctgccctatacagcccgaccacctacccctccttccacaggggaaagtgttccccaagctacggaaacgaagcagcattcgctccgtggatatggaggagatgggcacggggcgggccaccgactatgtgttccggatcatctaccccggccacaggcacgagcacagtgagtgtcccgagcttcatcccgggggaggagaggaagacgctctgggaggcggggagcgcagcgtcacccaggagggcagcaggcagggcccactgaccaggccaggttaacaccagaggctcatcgcctagcctctcagctggaccttttacccacagatattgcctttgaaaaggtgcgtctcttctacccagctcccttccccacttctccacgccaggactcttggctcagcagacctaggcgtcactacacaagactcttagttatcctttcagaccctgtccaggggtaaaacacgtggagaaacgagaagtagaaggtggggaaccctccattgctcttcacctcctgctccccaacccctacaagacagcctgggtatgggaccagcgctactttttttttttttttttttttgagacgacgtctcgctcttttacccaggctggagtttaatggcgtgatctcagctcactgcaacctctgcccctgggttcaagcgatcctcctacctcagcctcctgagtagctgggattacaggcgcacacctccatgcccggctaatttttgtatttttagtagagatggggtttcaccatattggccaggctggtctcaaactcctgaccttgtgatctgcctgcctcagcctcccaaagtgctagggttacaggcgtgaccactgcgcccggcccagcgcttctttttggatggtgaatattgtctgctgactcccctagagccagagccctcctcaaaccaactactgatgagcgttagctgaagtagcaggttgcatcagaggcagactcggggctgcctgggggctttgggcactggcgggtagaaaggcggcttggcccttgtgggtcctgccccaccctggacacacacccctgggcccaagggggtctctctgtctatgtgcatctaccaacaccaaagttccctttctggtcagagtgctgctgctgcccataggcttctctgggcagacttgcttttcttacagataaggtcggggaatttgccagcccagagcgtttattgctaacaagaccacccgctccctaaatttccaacttgtgccaaaaagttgtcaacaagttgtctctgtattagggaccggactgcccagacggcacactcagccacagcacagatagctccaccaggctcagagggcacacggcacagggatgtccccccttcccagatgtacctgacaaagagacgcatctttggccagaatgtatttacacacttggcacttagtctcaggctgttgcttggtttagcttctccagtctctgcctcccctcttcgatctttgccatttcccagtcctggtcacttcacttccaggaccacctcgccaagggcaagccagggcacccagaggctgaaactccaccaagcgactccagctccttgaggacagctctgggaaaaccctttccttttcctgggagggaagaaggtggaatttatagtctgaaaaaggggatttggagtaatcttcagatttggtccagcctgagaggagctagagaacgatcaggacccatctgccagctgtcatgcgcagcctctgtgagggccgatgacctcctgggctgccagcccatcccagacagtcccggtctttcacatcctcccacctctgttctctctcttctgttcttcctagagaggctgcctccgaagagtgaggttctgcagctgccccagcccctcgcctccttccacactctcccaggaaaatcat

SEQ ID NO: 16948 - DNA, 2300 bp, Homo sapien
cagaaaatgtaagttgaagtaagttaaatataactggctgggtgtgatggctcatgcctgtaattccaacactttgggaggcagaggtgggaggattgcttcagttcaagagtttgagaccagcctgggtaacatggcgaaaccctgtctttacaaaaaatgcaaacctttgccgcatgtgttggggtgcgcctgtagtcccagcttctcgggaggctgaggtggggggaccacctgagccatggaggttgaggctgcagtgagccgtgataccaccactgtactctagcctgggccatagagtgagacaccctgcctcagaaataaaataaaaaaaaagaaatagaacaaacaaggcacattgtcatttcccacgtgctttgttcttaatcccctatccaggaacacattctccctctctctggctttgggttttgtaaaaatctgtctgtgccagtgcccagctgctgagctcatggacagcagtagctcctcgctggcgtattagattgccacagaaccgtggccttacccagcacttcatgcttcctgcccaaagtagaaactacttttagcattgctttccctacgtggtgaaaacagagagagaaaaatcccaaacagtctctgtatgtgtctcttcttttcctcgtgccttgtccatggtggtggactgtatctaggaggcagaatgtttgcttttccttcctacatctccccaccttgcctgagggctaatggaactgactaggtgcttgctacagaacgttcctgtcttgtcctgctgaacactcagtactgaaaataaggcaaaacttgtttttcctaaaacctctaggcttctctccacccagccacaccaaaacactaaggccattctcccggtctcatgacttcaggcgtttctagaatgagactgagttcaaactggccattgagcgttcagccccctggctcccctacttcccttcagtagccacaggaagacctggggctgttccttcaagcagggctgaagacgtgtcttcatgtttggccagaggcttgtttctctccgcctggctggctgggtcagaagctggcttggtgccccgtggccacagtgttggaggctgtggtgggagagggggtgtgaagagttttgcattccagctcccttctggcccgaggaggcggtgggctgcgggaaggtgctggagtgcaggtggagccgccctgtgttcaccccccaggtgtttatctcagtggatgatctggaacccccggagccccaggaccctgaagattccagaccaaaacctgagcaggaagcaggacccgggactccgggcaccgccgtggtggagcagcagcattccgtggagttcgactctccagactcaggactgccctcctctcgcaattactccgtggcctcgggcatccagtcaagcctagatgaggggcagagcgtgggcttcgaagaggaggacggcggtggggaggaaggctccagtgggcccggccctgcagctcacactttgagggagccccaggatcccagccaggagaagcctcaggccggagaactggaggccggagaggagcttgcggctgtgtgtgcggctgcctacactgtgcgtacatgctccccaggctgttcccagccgccccagaggccctcctgacatcccagagctggggaagcgctggtggggtggaaggcggggcgccctgactgccctggaagggagttctgagcccatttctcagcatccccacaggactcgctctggtctctgggttccgttttgctgcatttcttggggcgtcacctcctgcccccagcctgggaagggctgcccggtctcatgcctgagggccctccactcttccagatagaattactggacactgtggccttaaacctgcaccgcatagacaaggatgtgcagaggtgtgaccgcaactactggtacttcacgccccccaacctcgagaggctcagagacgtcatgtgcaggtgccttgtggggcggggctcagggtgggaggcgggaccctgccgccagttactctgtgaagatgaggtccggaaggtgccctgctcctctctcctgctcctgaatcacacttggctccccctgcctggaacgcttttttcctgcacacccctcccccgcgcctcttcattcttaggggcctaccagacctccacttcagccacacctcttcaggaagctttccctcatccccgcacccccgccccacataccaagcgtgacggccttggctctccctaagtcggagtgccttggggg

SEQ ID NO: 16949 - DNA, 2300 bp, Homo sapien
accggcgctcgcccctctcttcaggagggcccatctgaaagagtgctttgagaccctgaagcggaacatccccaacgtggatgacaagaagacgtccaatctgagcgtgctgcggacggcgctgcggtacatccaggtatggggcccggaggccggcgtcgcgcagcttcccccgccctccctccgccgcccctcccccggccgcgccccgccccgccctcacgccccggcggctcccccgcgcctccctcccacctccacgcgggcgctgagcacatggcccggctgacgtcagcggggctccctgcccgggagggcgcgcgtgcgcagaggagggcgcggctcccctcccgcgccgctcccgagcccctgcagcctcggcgtccccggggccgtgaggcgcgcgccgtgacgcctggtgcgagtcccgatggcggctcccgttcgcgcgtgttggtgcagccgcgggagggaagggcatggggcggcccggcgcctcctccccggccgcagagcctgggcgggagcccagattccgcccgaatgtctgtagctatctgcggggagggttgggcgtggtccccgtccacgctgcggcgcgggccgagccccgtttaccccaaaggaggaaggtcttttcggagcgcgcgtggaggcgccacggcccgagtgtggggttacgcctggggcggggaaaactccgatttgactgggcggcaaacagccccggggccgccgagcctgaaacacgtcacgctttccttcctcctgggctaggaagagggggtgtctcttttttcggggccctcccggctgcgcgtcccctccctttgggcgtcgctccctctgcagtgctcgggccgggggcgccgccacgtcaggcggttgccatggcggcctgagcttcggtttccctggaaaccggcggggcttccgcgcgccgggccggaggctgtgggggatgggccggcagccgcggagacgcggagccgtaggggatggagggacgtggggctcccagcccgcgttggggggggggtgggcggcgagccgggactctccctgtccatcctctgaggaagctccgggggcggcgcggcgtcacgggccccgtgggaggggtggcgaggagggtccagcgcgcgaggagccagccgctgggcgccgcccctcccccggcctcgaccgcggggtcacagccctgaggtaaccggagcctgacttgctgagggaggggctgaggcgctgcttcgcgactgctccaggggggcagctctctcccagcctcccgccaacgcgcccttccgcccgccctcccggccagggggcggggctggcgcgcctccaggccgcttccgggcagccgggaggggcggggccgggctcgcggattggctgcagcgggcgggggcggtgctctcgagtcgcggagggcggtgcagccggcgagggtgacgcagggaagccgcggccgcgtgggtgcgcgcgtgcttcggggtggggcctcggggcgccgagcgggagagggctccggaggccgcggcaggccggtggcttatttctggaatcgttttgcagaacctgggcttggttgtagtttagtcgcagggctggctgagggtgttcatgcagacacttcgctgcactcccgacatttgcttagctattatttttgagaaataggaaggacggcatggcgagttcctctttgcagatactacttgcagagggcgccttgcgtaacgtgtgggtttggaaatgaatcggaagaagactcagcagcagccgcagaaggaagctcttgaggagctgggcccggtgaagtaggagccggggtaggcctcactcaggctgtgcagaagggacacccattctggtgctggtcacagaagcaggaacctcaaaggcctgtctacaaaccatttattcatttattcattgaggtgcttttagcgaagtctctgcttctgggcgaatggtggcgagcaagtaaaaaagcctgggtcttgtggcagatgacgaacaagtcattctacagaaggcggccgtatgggcataatagggaccgggcggcgggatctgttctggggagggaggatagctgttcctgaggaaaggacctttgagctgagacctgcaggataagtctgggtggcacggagcaaagtggaggccaagagcccaggggcagcccagtttctccagcaggagggaacaggatgctttttggaaataaaagtgaggcacggtggcttgcacctgagtcccagctacgctactcgggaggccaaggcagtaag

SEQ ID NO: 16950 - DNA, 2300 bp, Homo sapien
tagactagtactggcaaacagcccccttcctctggttcacgaagttcttgatttccaggatctgtgcagatttttcccccctaggatgcatgacgatgccctcaaaggaaaggagtaaagccagcaaacattttgcctgctttctatgtttctagctgtcttccaaccagtccctaaaataggaacgctccgagggtgccatgtgatggaatgtattggcagggcggcctgcctctcagcctcatgaaggtttgctttctggttgtgtgtgatgttgaagccgcggctgaggagttctaaacccactggcactgactgcccccccacttcttggaccggttagcaaagaatggagcctggggccagaactgaggggtactccccctgcactggcacagcacaatcgacatgctccgggacgctccaaataagctttcagccgcctggggtctatcgctgccgctgtaccagtggggttcgtgtggcttccaccgaggaagcagaacagcggagttgggtctcaggtgaagatttttgttgccccaatcacagtgtgttaagtggtcagggttgctattcctccctggcatttttctaattgggggccctcctccagaactggcttcagagtcgtccctggggtcagggaagagtgcccccgcttcgggagagaggagcaggtggaatacggaacgaccttaggcgagtccttggccgtcacggcctcagtttccttatgtgtgaagtgagaggatttaagggcagccggcctcaaagagctaactctccgattgcacccgagctcccctaaacactcgagcccggaagacgcgggcgggcgggcgggcgacggggggtccctccctctggggagcgcggttccagccggccgcagcggaccccgcccccgcgccccgcccaccgccggtcgccaggcgcggggagggccgggcttccgccctccacgttgttgttcccgatttgggccacgccccccggtctgggctgcgggcgcttcgtgttccccgccctggccccggccccagaggaaagggtggcccatggggtggcacagtccgtatctccacccacatcgaatacgcgtggacaaagactggagttcaggggaaggaaagataaaggcctggttttaaatggaaggtggtgaaaaggaatggagaggccagggcacgactgcgggattccccttacggcatcccaccctgggttcgcccagtggccccatccgcacccgcgaatgtgacctgcagacactggccctttaaaccgaaggctggcggcgcggggtgtccatgtggagctgctccatgccgtgttgtcctgcccgcccattggctcgcggcccggtgacgtcccctaataggatgcgaacgcactgcggggggaggaacggagacaaaacgcggagccggactgccgctccgctccctccgctggttctcttgacagtctccagtcgccggcagctccgcccaggggcggatcccgggggaattgcgacagcccggcgattgcgggatttaggtcgcgagtgggtggagcgtggagacccagggtcaggccagtctctgccattcccaaggtttccctgacccggaatatcctggttggaactctgttaaatcttgaattgttcaccctaccctccctccagcaggacagatttcgtcgtgaacgacccaaacgcaccgccccggcccaacttgtggcttgcagccggggcggggccagcaggaaagcggaaccgcggcgcgcacaccccgctcggacctctccctccctgcccgggccacgtgtgcgcgcgccggatccggggggcggggccagcagcgcaggacccgcccctcccttcgcgagacgccgcggccctgcgggcgggggctccggtccgggctttggctgtggccccggtgtagtagcgggggcggcggccgggggcagcgcggctccttcccttgttgtgtgtgtcggtgcctcctcgccatcttgttgcaaagccctttcttgtcggcgggactcccgggggccgcggggcgggaggcatcggaagggaggtagagagggaggggaagaagggaggcagtgccgccttttttttttttttgcatcccatttttttaaatttgcaattttatattttgcaaatattttgagagacattgatttttctccccgtgctcccccgttcttccctgcggagtgcgctgcgccgcccagccctgtcgccccccggaggtgatccctccctcctgcctgcccgccagcctgacctgtgcccg

SEQ ID NO: 16951 - DNA, 2300 bp, Homo sapien
tggcctttaagcctgtgtcgtagggatttccagagaatgctctgtgtattgaagcacagaaggtgtttctgtgtctcagtgtgtttctgtccctaggtttaaggcttcatgtcatggaggagattttatagatgtcaagctaatgaccttagagttttaaaaaatccgtgaccgtggccaggcgcagtggctcacgcctgtaatcccagcactgtgaggctgagatgggcgcatcgcatgaggtcgggagtttgagaccagcctggccaacatggcgaaaccccgtctctactcaaaatacaaaaattagccgggcatgatagcacgtgcctgtaatcccagctactcgggaggctgaggcaggagactcgcttgaacctgggaggtggaggttgcagtgagccgagaatgccactgcactacagcctgggcgacaaagtgggactgtctcaaaaaaaaaaaaaaaaaaaaaaaaaaaggaacccatgagcaggccagctttcagtctggagccgagtgccttctgtgcatttggatgtttccatttccttccctgagaagattttcttaggctacctagtgagagaacattgaaaatatttttaaaggacatctaagcattgttttggtcatgcatatgctttataattgtgtgttgtttcatagcatatacctctggtacaggtgggcaagtttttctttgaagaaatgggttattgactcatatgtcataaccttgagtgttactctcccggtgtccagaggtcacattcatgttgcggggttggtatgaaattaaatcttggtgatgtgaccctacattctcttctggtccctagaatcggcttctggtctcctgataactgaagtggagacagaagttgagcctgttgcccaggcaaactaaagctgcttttgttcttcggaatctgctttgcctccgtcagcctgcttccttccccacacatgctggccgcactgtccccactccagacctctgctgtgtgtcctgggcagggccgcgttttggcagtaccctttcaactcatcctaagcttcgtgtagattactttagtatatattttttataaaacataaagcctttcctctcgatggaaatcaaagcttaccatgtgagcactcgaacttctaagttgtgacaggaataacaaaactgcaaggagtggaaaagatggaaaagcctgtgggaaatccgaggccttttgaaagaagggagctgatgacttcacgaccagctcctggagcccctcctttctgctgaagccgcggcatttccctccgtggccacacgagggcacccttggcccttttatcaaagcgccttcacttccccgtgggaatggagacaagtctgtccacggtgttttcttgaaatacccagttgctacccagatttgtatttttatgtaaacaaatacattttcacagaaataaaatttgaaaaataaaagtagaaagagaaaaaaacactagccatggtctctttacctggtataatccctttcgactttttaatgtttttttaatggtcccagctgactgttttttctgttctttccagctgtccttctactctagaatatatccaggttgggccagtcctttggatccagtttttcttgatatctagttaatgaagatactggaggggaaatgctgagtgatcttcaaacagtaactttccaaaagccaggagtaataccaagatctccaagaaagcagctgggttcagaaggccgggtgcggtggctcacgcctgtcatcccagcactttgggaggcagaggcaggcagatcacaaggtcaggagttcaagaccagcctgaccaacatggtgaaaccctgtttctactaaaaatacaaaaatgagctgggcgtggtggtgcatgcctgtaatcccagctactcaggaggctgaggtaggagaatcgcttgaacccgggaggcagaggttgcagtgagccaagatcgtgccactgcactccagcccaggcaacagagtaagactcagtctcaaaaaaaaaaaaaaaaaaaaaaaaaaaaagcagctgggttcagtgttctgttgttgacccttgtttggggttcctctggttggctggctaccatgcatgtcgtgtgttgcttatatcagaaggtgagggttctgtgtggtgtagatgctgtcggttagccggccttgcttctcacaaggggcgtttctggggagaacgctggggtctgtgtgggctcaaggaggatcccgtctccccttatgtttctggtacaggatcagatgtg

SEQ ID NO: 16952 - DNA, 2300 bp, Homo sapien
ggagagagggttcccagaaccctcagacacagacaaaggggtcaataacccactaaggattaagaatcattattctagtccaagcattcatgtgtcaggctgcaaaaaacaatacccagggtcacacagagccaagactcaattcaggaccgtggattcccctggtctagaaattttctgctgtgccagcccacaccaccccactgtccttacctcgagtgaatattacatttgagtcatttgctgggcccaaacctagtttccttggtataattttaggataattgtttaagtggcaactattcattcagtaagtagtaagtacttattgtttgcttgtttcattatgaaagagtggcacatgctcattaaagatttggaaaaatgaaagtcaaaacaacaaaatcaccccgagtcccaaccttctgtaacataaccactcttggcattggcgtgttcctttctagtctctctgtagacggggtgtgtgagtgtgtgggtttaactttggttgtcctcatgctgcgtattcagttttgtattctggtcctttgttcatttaacatcttacaagtatttgtccatgttgtaacagtagtgtattagcttacactccttgcctgttcaaaatgtctttcaggcacagcactggcctttaagcctgtgtcgtagggatttccagagaatgctctgtgtattgaagcacagaaggtgtttctgtgtctcagtgtgtttctgtccctaggtttaaggcttcatgtcatggaggagattttatagatgtcaagctaatgaccttagagttttaaaaaatccgtgaccgtggccaggcgcagtggctcacgcctgtaatcccagcactgtgaggctgagatgggcgcatcgcatgaggtcgggagtttgagaccagcctggccaacatggcgaaaccccgtctctactcaaaatacaaaaattagccgggcatgatagcacgtgcctgtaatcccagctactcgggaggctgaggcaggagactcgcttgaacctgggaggtggaggttgcagtgagccgagaatgccactgcactacagcctgggcgacaaagtgggactgtctcaaaaaaaaaaaaaaaaaaaaaaaaaaaggaacccatgagcaggccagctttcagtctggagccgagtgccttctgtgcatttggatgtttccatttccttccctgagaagattttcttaggctacctagtgagagaacattgaaaatatttttaaaggacatctaagcattgttttggtcatgcatatgctttataattgtgtgttgtttcatagcatatacctctggtacaggtgggcaagtttttctttgaagaaatgggttattgactcatatgtcataaccttgagtgttactctcccggtgtccagaggtcacattcatgttgcggggttggtatgaaattaaatcttggtgatgtgaccctacattctcttctggtccctagaatcggcttctggtctcctgataactgaagtggagacagaagttgagcctgttgcccaggcaaactaaagctgcttttgttcttcggaatctgctttgcctccgtcagcctgcttccttccccacacatgctggccgcactgtccccactccagacctctgctgtgtgtcctgggcagggccgcgttttggcagtaccctttcaactcatcctaagcttcgtgtagattactttagtatatattttttataaaacataaagcctttcctctcgatggaaatcaaagcttaccatgtgagcactcgaacttctaagttgtgacaggaataacaaaactgcaaggagtggaaaagatggaaaagcctgtgggaaatccgaggccttttgaaagaagggagctgatgacttcacgaccagctcctggagcccctcctttctgctgaagccgcggcatttccctccgtggccacacgagggcacccttggcccttttatcaaagcgccttcacttccccgtgggaatggagacaagtctgtccacggtgttttcttgaaatacccagttgctacccagatttgtatttttatgtaaacaaatacattttcacagaaataaaatttgaaaaataaaagtagaaagagaaaaaaacactagccatggtctctttacctggtataatccctttcgactttttaatgtttttttaatggtcccagctgactgttttttctgttctttccagctgtccttctactctagaatatatccaggttgggccagtcctttggatccagtttttcttgatatctag

SEQ ID NO: 16953 - DNA, 2300 bp, Homo sapien
aaaaaaactgaccagagaagttataaggaacaatattattattattaggaactcactatatactagacattctgctgttttatatgcattatctgatttaattctcacaaccccatgagattattatcctattttgtaatattgagcaaactaagccttcaagtgtttaagcaaattgcccatactcacagggttagtaaatggtgggggcaggattaaaggccaggtttcccagctgcagtgctactagggtctctctggcccgacctacaggtaaactgggttgctctttggagctaacagaaagttaccaatatcttaaatacaatcacttcaaccccaccagtcctatctccgaggccatcttttcttttacctttccagcagcatgcactaaataaaatgccataactagtatcaaagccactaccaaccaaagatggaaaactttctgtggtaatatgttacattggttgctgaaatgaaccatgccttccagtattggaagggaccctggcatagtcccctccccttgaattggggctagcccttctacttgctttaaccaagaatatagccaaggtgctagttctgcacctacgctttaagaaggcctggcagcttccacttttgcccttttgggagccccgagccaacatgtaagaagtattctggcggggcacgatggctcatgcctgtaatctcagtactttgggaggccgaggcgggtggatcatctgaggtcaggagtttgagaccagcctggccaacaggatgaaaccccgtctctactaaaaatacaaaaaattagctgggcatggtggcgggcgcctgtaatctcagctactcagctacttgggaggctgaggcaagaaaatcgcttgaacccaggaggcagaggttgcatgcagtgagccgagatggcgccattgcactccagcctgggcaataagaaactccatctcgggggaaaaaaaaaatgtcatcctactctgctagacaaattacatggaaaggccacgtggacagggagagaacttggactacagggagagagacccagttctttcagcggaaccagcccccacttgttgctatgaccactggcaagaccagcagaacgggtgggctaatcccagcccagattgcagaactgtgagcaagtaaaatggtggttgttttaagtcttacgttttggggcggtttgttacacaacagattatgaaaacacctcctcagctttccttgggtgactactggtactcacttgtgtataagtctccattccttaatccttactatctcccaattttatggtaatagtttgccagaagcgttcacattaacgacgaggacgtaggcaggcccccccttttttttttttttttgagacagagtcttgctctttcgctcaggctggagtgcagtggtgcgatcttggctcactgcaacctccgcttcccggattcaagcgattctcctgcctcagcctcccgagtagctgggattacaggcgcccgccaccacgcccggctaatttttgtatttttagtagagacggggtttcaccatgttgtccaggctggtcttgaactcctgacctcaggtgatctgcccgcctcagcctcccaaagtgctgggattacaagcgtgagccgccgcgtccggccggatcctcagttctttcgctgtaaacgagagtactcttccccaacccacaggcttatatctcttacaattcagtgagtgagacatcggctgaggacacacctgttgcacaaaaagggctcactgcacgccatcacacccaagtctcgtaccctcatcttcataacctgcccaatcccagtgagtgtgagaggtaagtctgcagcagggcccggaaaacttgtttctttttcttttaaataagttttctcgcgaattcgaacgcatgtcctcctcctgccatacctcaaaggactccgctcgtcaccacgcccccgcgccttctgttaggagcagcaaaccccaggtgtcgcgagggtttcttctttcttcaagatcagccacaggtcgcgcgagagggatgtgtccaatcacgaggctagatggcttcacaagatggcggcgcgctgggagcgtatcatctgcgtttctaggagcttcgctatgcggctgctttaagattctagggttgtacaggcccacgccagacacgacgtctggcaggaacctcggcctcagaggtgggtcacttatatctctcacgcagatttactatcatgggtcacttaacccgtggatcacacgggttcctc

SEQ ID NO: 16954 - DNA, 2300 bp, Homo sapien
gtgagtccccgcgcccggctgtttttcttttctttttttgtttttagagatgagatcttgctttgttgccctggctggtctggatctccagggcttgagcaatcctcccatctcatcctccccagtagctgggactacaggcatgtgccaccacacttagctaatttttaaaatttttttgtagagatgaggtttcactatgttgcacctgctggtctccaactccttggctcaggtgatccacggcccccctcccaacctccccatccctgccttggcctcccaaattgctgggattacaggggttagcaacctgtgcctggcagagataacctttcttgaacaaaggaaacttgttttggtatcaagcaacagtaatgtttacatgagttacctataagtccccacgaaactaagatactttacacaggctgcacctcctctgtaattctcacaaaagccgggttagttattaggtgtcttttattgagaaactgaggccaaagagaggtatggtaatttgccccaggtcgcgcttctggcaagtgcggggtccaggatttacacctaagttgtctctttcgttaactctgctgcttctcaaatgcagtatatatatatatatttacctacataaagtgacgcaataaaatcagtacacataagcttaagcctgtttcaagaaaaaagcttccttggacaatacaaatgaatgataagataatctcatttaaacctgttattaaaataatagcccatattgaattattcagaaccccaaatctcgctttttaaaaatcaagggtcggctgagcacggtggctcacgcctgtaatcccagcactttgggaggcagaggcgggcggatcacgaggtcaagggatcgagaccatccgggccaacatgatgaaaccccgtctctactaaaaataccaaaaaaattagccgggcgtggtggtgggcgcctgtggtcccagctactcgggaggctgaggcaggagaatggcgtgaacccgggaggcggagcctgcagtgagtggagattgcaccactgcactccagcctgggcgacagagcgagactccatctcaaaaacaaaaacaaaaacaaaaaacaaaaattagctgggcgtggtggcaagtgcctgtactcccagctactcgggaggctgatgcagagaatcgcttgaactcgggaggcggaggttgcagtgagccgagatcgcgccactgcactccagcctgggcgacacagcgagactccgtctcaaaaaaaaaaaaaaaaaaaaaaggaaaagaaaagaaaaatcataggtatctgtgtggaataaattaactacaaatccccaagacgactcttgtcatcaatatttcaatccataatttagcaaacacacacagacatcccttatagggatacagttccaggcctttctttgggcatccgtttcgagacctggagagactctgatgtctgtgtgtgactaaggagaagaatagctgaatcatatccaaaagcgagtcctcccaattaagaatctataatacaaatcaagacaatgacagcattccatctgccttttaacctcaacagctcctcctcccaagccagccagcctactcccctccctcattcccccccaaactgggaaatcatctcggaggccggaggcagaaaggggcggtaggtggccgggccccgctgcctctcgcgcctcccggggcccgccacacacggtgccaacgggacgccgcggtcggccgcatgagcgcaaaagcagggcagcgaggtgagcagagccagagttcagaaggggccgcaagtcagacgaggggctgggaaaaaagagcctctcccaaggttaacagaagcgtgcggagcgtgagaagcagcacctcgcacgcagactcgcccgccggccgggtggcaccgctcagccgcccgcccgctagaaggcagcgcggccccggcccggcccagcccggcgcatgcgccgcagcccctcctccgctcccggcgcccgcccctccctcttcctggcgggtctggggcggcggcggcggcggcggcggcggcgcggtgacgtcagggcgttggggcagctcctgtgacagacggagctggagcggcggggcggcggcggagtccggcggccgggagagcgagtgagcgagcggaggagcagcgacacgggagtctagggagcgagaaggagaaggaggggagcgctcgggcgcgagcgagagaaaccgcgagcgccgagcttggactcgagccccggaacggctgaggagcccgcc

SEQ ID NO: 16955 - DNA, 2300 bp, Homo sapien
atgaagttcgggaccagaagcagctgctgaaggacgcggctgccttcctgctctcctgccagatccctggcttggtgagggaggggctgcggggctgggtggggcttgtgtggagggtgctggtccctcatctgtctccgacttggaggcccatgaacacaggctcgcaggagtgactttttcagctttccctgagtgggcatccccgtttgacagatggggagcctgacccccagaggtcaagggcacaggccctgctgagcccaccgtgtgggctggcagctggtaatccagtcttctgagccctggatggtggcatggctgggggacggggccagagctcagtgggggctgcccatcctcctcctcctcccgcaggctctgtgtctggttccaggatgctgggtgctcccccaacaccgtggcctccaagcctcaggacacggggctgggggtcaagtagtgcccccaagcgggcacctctgcttctcccacatggttagagggggcctgtaccaccaccgggctcttggttcttggcctgcgctcctgccagaggctgggcacattctgacatcctgactgggagctggagccttcggggtccttctccagggcctcccaggatagctgtgctcccccagaaggactcagttgggtggaggcagaggagctgggtgggggcctgagctgctgcagcccgcaggtgaaggactgcatggagcacgcggtcctgcccgtggacggggcaacgctggcagaggtgatgcgccagcggggcatcaacatgcgctacctgggcaaggtgctggagctggtgctgcggagcccggcccgccaccagctggaccacgtctttgtgagtgctgcccggggtggggcggaacgggagctgtgggactgggatggaggccgggggcctgaccaagacctcccttctgaatccttccagaaaatcggcattggagaactcatcacccgctcggccaagcacatcttcaagacgtacttacaggtgccacccgtccgctctgcggctggccatggcctcccagggtggtgtggggcgtcgggaaagagcctgaggtggggctgagggccctcatgactcggatccaacctgcctcgcagggagtcgagctctccggcctctcagccgccatcagccacttcctgaactgcttcctgagctcctacccaaaccccgtggcccacctgcccgccgacgagctggtctccaagaagcggaataagaggaggaaaaaccggcccccgggggctgcagataacacagcctgggctgtcatgaccccccaggagctctggaagaacatctgccaggaggccaagaactactttgacttcgacctcgagtggtgcgtgcggggcaggggcggtggggtgggtgggattgggcagatgaggcggccaccacctgctcccagatggcgtctaaggcctgtggtcataggccagggagtcagagagaagagggagcagctgtggagatcactgggtgctggagggtgagggcagccgggaggctcccgggggccgggtggggcagtgttgggggcccgggctggacagcgttggggagctgggtggggcggtgttgggggggcccggcggtgcttgggctgctcaggccccctgctccctcctcagtgagaccgtggaccaggctgtggagacctacggcctgcagaagataacgctcctgcgggagatctcgctgaaaacagggatccaggtgggcatggctcacagcatccccgctgtgtccccgctgtgtccccgctgcgtccctgctgcaggctcccactcctggccagggccacaggggaagtggctttttcacggtagccgtctgtgcgcaagcgttggtgggttgggaggtgccaacccgctgaacctgggcctgaggcttcctgtggtgggggggctgccccccaggtcctgctgaaggagtacagcttcgacagtcgccacaagcccgcgttcaccgaggaggacgtgctcaacatcttccccgtggtcaagcacgtcaaccccaaggcctcggatgccttccatttcttccagagcgggcaggccaaagtgcagcagggtgtgtggccaggtggggctgggtggaggtgggggttccccatggcccgtcctgaccttgccacccctgggggtgccctgcaggcttcctgaaggagggctgtgagctcatcaatgaggccctgaacctgtttaacaacgtctacggagccatgcacgtggagacctgcgcctgcctgcgcctcctcgcc

SEQ ID NO: 16956 - DNA, 2300 bp, Homo sapien
cctgctctgccctgtttcctctgctccaggtacctcctctttatgaagctggccgccttgcagctgatgcagcagaacgccagccagctggagaccccctcctccctggaaaatggtggtccttcctccttggagtccaagtctgaggatcctccaggacaggaggcgggaagtgaggaggagggtagcagcgccagcggcctggccaaggtgaaggagctggcagagaccatcgccgcagacgacggcacaggtggggctgctgcagatggccgggagagagcccgggctggccctgccagggtggcttatgacccccacctgggagaggctggcagacatctctgcaaggagctagggggcgaggcttggcgcagcccagctccaccggtggcagaggggacccgtgtctcatggagccatgtctccacagcagaccctcggagccgggaggtgatccgcaacgcgtgcaaggcggtcggctccatcagcagcaccgccttcgacattcgcttcaatcctgacatcttctcaccaggcaggtggtgggggccggccagcgcaggagccctccagggccagagcttcgctggggggcctgggcccttggggctggtgggtttgtcccccatctgagcgcttcccccgccagcgccaggcggcatttgtcttgccactgcctggctcagcctctctgctctccctcctccaggggttcgtttccctgagtcctgccaggatgaagttcgggaccagaagcagctgctgaaggacgcggctgccttcctgctctcctgccagatccctggcttggtgagggaggggctgcggggctgggtggggcttgtgtggagggtgctggtccctcatctgtctccgacttggaggcccatgaacacaggctcgcaggagtgactttttcagctttccctgagtgggcatccccgtttgacagatggggagcctgacccccagaggtcaagggcacaggccctgctgagcccaccgtgtgggctggcagctggtaatccagtcttctgagccctggatggtggcatggctgggggacggggccagagctcagtgggggctgcccatcctcctcctcctcccgcaggctctgtgtctggttccaggatgctgggtgctcccccaacaccgtggcctccaagcctcaggacacggggctgggggtcaagtagtgcccccaagcgggcacctctgcttctcccacatggttagagggggcctgtaccaccaccgggctcttggttcttggcctgcgctcctgccagaggctgggcacattctgacatcctgactgggagctggagccttcggggtccttctccagggcctcccaggatagctgtgctcccccagaaggactcagttgggtggaggcagaggagctgggtgggggcctgagctgctgcagcccgcaggtgaaggactgcatggagcacgcggtcctgcccgtggacggggcaacgctggcagaggtgatgcgccagcggggcatcaacatgcgctacctgggcaaggtgctggagctggtgctgcggagcccggcccgccaccagctggaccacgtctttgtgagtgctgcccggggtggggcggaacgggagctgtgggactgggatggaggccgggggcctgaccaagacctcccttctgaatccttccagaaaatcggcattggagaactcatcacccgctcggccaagcacatcttcaagacgtacttacaggtgccacccgtccgctctgcggctggccatggcctcccagggtggtgtggggcgtcgggaaagagcctgaggtggggctgagggccctcatgactcggatccaacctgcctcgcagggagtcgagctctccggcctctcagccgccatcagccacttcctgaactgcttcctgagctcctacccaaaccccgtggcccacctgcccgccgacgagctggtctccaagaagcggaataagaggaggaaaaaccggcccccgggggctgcagataacacagcctgggctgtcatgaccccccaggagctctggaagaacatctgccaggaggccaagaactactttgacttcgacctcgagtggtgcgtgcggggcaggggcggtggggtgggtgggattgggcagatgaggcggccaccacctgctcccagatggcgtctaaggcctgtggtcataggccagggagtcagagagaagagggagcagctgtggagatcactgggtgctggagggtgagggcagccgggaggctcccgggggccgggtg

SEQ ID NO: 16957 - DNA, 2300 bp, Homo sapien
caacgaccgtgacgaggaggtggagctctgctcctcggtcgagtgcaagggcatcattggcaacgacgggcgccactacatcctcgacctgctgcgcaccttccccccggacctcaacttcctgcccgtgcctggcgaggagctgcctgaggaatgcgcccgcgccggcttcccccgcgcccaccggcacaagctctgctgcctgcgccaggagctggtggacgccttcgtggagcacaggtgaggggcggccctgccggaccagggccggggccagctgcagggagtgcgggcgccctgggtggatccggggttgggtccttgaagggagaagcgctggagagtgaagaagggctccgtctagccacagtcattggagacccgtccccacctgccctgctgtcaggctcccgagcgcagaaacccgggctgcagactcgcgagcagccaggcgggtaatgtggctgtggcggacactgttctcttaaggagcacttggaagtctgggtggctgtgactgtccccgtgctggggcgggcaggtggggcaccgggggtccccgccgctggtgtttagtgcttaggaaatggggaaatggccatgtcagaggtcccacagcatgagtaactctcaaatgccagtggcttcctgtcactgttgagagccctgacctggatggggagctcctcttttcccataccctccagaacgcagctgcctttttttttttttttctgagacggagtttcactcttgtcgcctaggctggagtgcaatggcacgatcccggctcaccgcaacctctgcctcccgggttcaagtgattctcctgtctgagcctcccgaatagctggtattacaggcgtgcaccaccacgcccagctaattttttgtatttttagtagagacggggtttctccatggtggtcaggctggtctcgaactcccaacctcaagtgatctgcctgcctcgtcctcaaagtgctgggattacaggcgtgagccaccacgcccggccgcctttttcttcctgtcttgggagatcttggtttttctgcgttgactcatgcacaccggccaggaggtgccctatgcctgcggggtgtggagccccagctgccgggagccgtgggccagcagagctcctctccccgatgtccagctcctgctctgccctgtttcctctgctccaggtacctcctctttatgaagctggccgccttgcagctgatgcagcagaacgccagccagctggagaccccctcctccctggaaaatggtggtccttcctccttggagtccaagtctgaggatcctccaggacaggaggcgggaagtgaggaggagggtagcagcgccagcggcctggccaaggtgaaggagctggcagagaccatcgccgcagacgacggcacaggtggggctgctgcagatggccgggagagagcccgggctggccctgccagggtggcttatgacccccacctgggagaggctggcagacatctctgcaaggagctagggggcgaggcttggcgcagcccagctccaccggtggcagaggggacccgtgtctcatggagccatgtctccacagcagaccctcggagccgggaggtgatccgcaacgcgtgcaaggcggtcggctccatcagcagcaccgccttcgacattcgcttcaatcctgacatcttctcaccaggcaggtggtgggggccggccagcgcaggagccctccagggccagagcttcgctggggggcctgggcccttggggctggtgggtttgtcccccatctgagcgcttcccccgccagcgccaggcggcatttgtcttgccactgcctggctcagcctctctgctctccctcctccaggggttcgtttccctgagtcctgccaggatgaagttcgggaccagaagcagctgctgaaggacgcggctgccttcctgctctcctgccagatccctggcttggtgagggaggggctgcggggctgggtggggcttgtgtggagggtgctggtccctcatctgtctccgacttggaggcccatgaacacaggctcgcaggagtgactttttcagctttccctgagtgggcatccccgtttgacagatggggagcctgacccccagaggtcaagggcacaggccctgctgagcccaccgtgtgggctggcagctggtaatccagtcttctgagccctggatggtggcatggctgggggacggggccagagctcagtgggggctgcccatcctcctcctcctcccgcaggctctgtgtctggttccag

SEQ ID NO: 16958 - DNA, 2300 bp, Homo sapien
agcgcccacagttgatcacggaacctctcccctccaccaaaagaactgccattaaaatcccatgaaaccacataggggcagtgttgacattgggggccttggaaagtcctcaggccacccctacatgaggctgcctcgggagagcagggcaaggctgtggtgtggaagtcccacagctccaaaagccctgcccagccgacacactggcgcacaaaagcaggcagccttgtggacgcctgaggcctgtgtgtgcttcagaggcatttggcagaaagttctttataaacaaagatccctgctcaccagtaggcagagtgtgtgtgtgtgtgtgtttgtggtgtcaaaaccagaactccagcttatgtgttcacagtggaatttgaaaacggaaacctaaagttgaaaattaaaaccactgtgttagcacctccaaaacctgttttgtgctgggcaggttgttcagggtgcagggccctggtaacgccataccctccctgccttcctgacagagccgtacacggtgcgtgaggcccgcatccacgtgcgccatgtccgagacctgctcaagagcctggacccatccgatgccttcaacggggttgactgcaactccttgtccttcctgagtgtcttcaccgacggcgacctgggaggtgcgggaggcactggggccggggattgggccaaagggcggggagcacggaggtggggggctggagaaggggccgaggggcctgggcctgaggcacccggaccacggccatcaggaggtagggagacagctggccctgggtggccctgtgctgaccaccagcctcgggtccctcagacagcgggaagcggaagaagggcttggagatggaccccatcgactgcacaccacccgagtacatcctgccagggagccgggagcggccactgtgtcccctgcagccccaaaaccgtgactggaaggtaggatcctgggggagggaggaagagggtccctggcggggtggaggccccacaccagaggcctggcccctcagactcggccgctcccgaagcccttgcagtgcctgaaagtactcaccatgagcggatggaacccgcccccggggaaccggaagatgcacggggacctcatgtacctgtttgtgatcacagccgaggaccggcaagtcagcatcaccgcgtccacacggggcttttacctgaatcagtgagtccctgccagcccaccacacccccctgccgtgccagccgtcctgggtctgggcagacacctgggcccccgctcagtgcccgccctctccctgcaggtccacagcttatcacttcaaccccaagcccgccagcccccgcttcctaagccattccctagtggagctgctcaaccagatcagcccgaccttcaagaagaacttcgctgtgctgcagaagaaaaggtagtgcctttgtcccctcccgccttgtctcatggcacacgggggcatggggtgagccggcccacctgcactccagtgcttctgtctgaagaaaccgccctgggcccccagtgttggagtccccgctctagggagctgtcggccagtgccgagacagcagccgcaggagaggcgcccgtgcacttccatctggctccagggcagtgtctcagggtgggagatgccggagcaggcgggggcctcagaaaaggggcccgtggaagggctctgagcttggtgggctgccccatctccccctcccctgcctgccacagggtccagcgccacccgttcgagaggatcgccaccccattccaggtgtacagctggacagccccccaggcggagcatgccatggattgcgtgcgtgcagaggacgcctacacctcgaggctgggctatgaggagcacattcctggacaggtgcctgcaacctggccctgccctcgctgggcacccctgccctcctgggtgctgggctggttccgtgcacttccctggaggccccatgcttgacttcatttgggagtctggggctcttctcaggaaggtagaaggagcgacttccgggagcaggtcacagggcacaggctgagctcgtttttccctccctgatctctctgcagacccgagactggaatgaggagctgcagacgacgagggagctgcctcgcaagaacctgcctgagcggctgctccgagaaagggccatattcaaggtgcctgcagcctctgctgaccggcagtctgaggcccgctgtccacctgctgacgggttttctcatggagaggaggaaagcaagggaggcaggggcagccctaaccctgtcaggt

SEQ ID NO: 16959 - DNA, 2300 bp, Homo sapien
tggtctggaagttggacagcctgcccgggggagggcccacggaggcagaggcaggcagcaccatccatgccagggtccctgtgtcacggatgagctcatggaggcaggattggagcacagatctgcttctcaggccagcacacctatatctgccaacttcacggcccatgggttaaagaacagagccgtgggctgggcatggtggctcacgcctgtaatcccaacactttgggaggccaaggcgtgtggatcacctgaggtcaggagttggagacttgcctggccaacatggtgaaaccccatctctactaaaaatacaaaaagttagctgcgcgtggtggcaggtgcctgtaatcccagctactcgggaggctgaggcaggagaatcacttgaacctgggaggcagaggttgcagtgtgcccggatcgtgccactgcactccagcatgggcaacaagaacgaaactccgtctcaaaaaaaaaaacaaaacaaaagaacagagccgtgattctaaaaaaaaaaaatcaggcagtaccatcccagggcgtgaagtcagcgcagttcagttctgtagagatccatgagaagtcccaaacgtttcctagccctagagtggggaggtcgggcacggggaggtgccatccggttggtctgtggcctcgagttttctgggtagaagctgcttgggttccaccccagggcctgtccgcctgttgagagcagtgacggaaaaggtctgtagctcaacagcgcccacagttgatcacggaacctctcccctccaccaaaagaactgccattaaaatcccatgaaaccacataggggcagtgttgacattgggggccttggaaagtcctcaggccacccctacatgaggctgcctcgggagagcagggcaaggctgtggtgtggaagtcccacagctccaaaagccctgcccagccgacacactggcgcacaaaagcaggcagccttgtggacgcctgaggcctgtgtgtgcttcagaggcatttggcagaaagttctttataaacaaagatccctgctcaccagtaggcagagtgtgtgtgtgtgtgtgtttgtggtgtcaaaaccagaactccagcttatgtgttcacagtggaatttgaaaacggaaacctaaagttgaaaattaaaaccactgtgttagcacctccaaaacctgttttgtgctgggcaggttgttcagggtgcagggccctggtaacgccataccctccctgccttcctgacagagccgtacacggtgcgtgaggcccgcatccacgtgcgccatgtccgagacctgctcaagagcctggacccatccgatgccttcaacggggttgactgcaactccttgtccttcctgagtgtcttcaccgacggcgacctgggaggtgcgggaggcactggggccggggattgggccaaagggcggggagcacggaggtggggggctggagaaggggccgaggggcctgggcctgaggcacccggaccacggccatcaggaggtagggagacagctggccctgggtggccctgtgctgaccaccagcctcgggtccctcagacagcgggaagcggaagaagggcttggagatggaccccatcgactgcacaccacccgagtacatcctgccagggagccgggagcggccactgtgtcccctgcagccccaaaaccgtgactggaaggtaggatcctgggggagggaggaagagggtccctggcggggtggaggccccacaccagaggcctggcccctcagactcggccgctcccgaagcccttgcagtgcctgaaagtactcaccatgagcggatggaacccgcccccggggaaccggaagatgcacggggacctcatgtacctgtttgtgatcacagccgaggaccggcaagtcagcatcaccgcgtccacacggggcttttacctgaatcagtgagtccctgccagcccaccacacccccctgccgtgccagccgtcctgggtctgggcagacacctgggcccccgctcagtgcccgccctctccctgcaggtccacagcttatcacttcaaccccaagcccgccagcccccgcttcctaagccattccctagtggagctgctcaaccagatcagcccgaccttcaagaagaacttcgctgtgctgcagaagaaaaggtagtgcctttgtcccctcccgccttgtctcatggcacacgggggcatggggtgagccggcccacctgcactccagtgcttctgtctgaagaaaccgccctgggcccccagtgttggagtcccc

SEQ ID NO: 16960 - DNA, 2300 bp, Homo sapien
ctgagctcatacaatctgctctcctcggcctctcaaagtgttggcattacaggcgtgagccgccgcactcggctggatgatgctttttatacgtgtctgtttctctaaccccaggcttgctgctcttccccaacccccagggttaaaactgagcttcctattatgagtagcattagcaacatgcacgggcttccaacttcagctgcactgggccactaggcacaattctcaaaaaccctggagtttcatgaatacaaactaagtacccatcagtcaggtgaccggctaaaagaattatggtacaaccaaacaatacaacattatccagcgtaaatggaatgagaacacctactgaaagcgtgtaaaaaaaaaatcagagtgaagaatagcaggtacaattttctgcacatttgtgtaacaaaagaggaacgagtgtgtgtatacacatacgtatatacacacgcacacataagtatgtatgtgtatatatacacacatatatacacacttttatatatattgattataaatatatatattttatatatacacttatatatatacacactatatatatacacacactatatatatacacactatatatacacactatatatatatacacacactatatatatatatgcacactttttttttctttttttgagacggagtttctctcttgttgcccaagctggagtgcaatggcgcgatctcggctcaccgcaacctccacctcctgggttcaagcgattcttctgcctcagccacccgagtagctgggactacaggcgcacaccaccatgcgcagctaatttttgtatttttagtagagacggggtttcaccatcttggccaggctggtctctaattcctgacctcgtgatccgcccgcctctgcctcccaaagtgctggaattacaggcgtgagccaccgcgcccggctttttttttttttttttttttgagacggtgtctgtgtcacccaggcaggagtgcagtggtgcgatcatagctcactgcagcttggaactcctgggctcaatctgagccgtcctgagtgatactcccagctcagctcccaagtagctgggactacaggcgcgtgccactacacctggctttttttaaacaatattttttgtagagacgggggttttgaaatgttgcccaggttggtctcaaacttccgaatcctgaactcaagtcatccgcctggcttcggcctcccaaagtgctaggattacaggcgtgagccgctgcaccgcccggccgagaagaatcttaccagttctcatcttccttcctcccgtttaaatgctcacatcaagtcgctggctttcctcaccacgtgctctccagaacaaggtcggctttccttcgcaatttgtgcgaggccctacctaaggccctcccagcccacctcgggaagctgaagctttccagttctcattagagcttgacaaacgctccgaaggttataggcctcgggtgcttcccaaaggccccctgcggcctggccaggaaagacccaccggcgctctctgcctggagcacttcaactcactgcaagacctggtcccaatgtcccctctgcagcattctctgacctcaccgttccgtccccgccaagcccctgccaagtgaaaaatacgagttaaagcgtcctggctgtggatggagtcagacccggctctaccccttgctctctgtgtgaccttggtctcggcctcctccactgtaaaatgaggacaccagcctggaggtgaggacccatgggtcgaggacgcgggtagggagcccgttctggctcggggcaaagtttggcgggtccattctgactcttgatccccattagccacgtctcgccctcgcctctcgtgcccgtgccctaagcgaccctccactccctcaataatccagccgcacccattcggcgggaaagggcctgccgggtggggagggcgctgagggtcacgcgaacaccgcagatgacagactgcgcggtcatttagcaaatctgcaagagaaaacaggggatccttggagaggggaggattagccatggcagaaccagaccagtctccacccaaggtcacagtgcccgcccgacgggcagcgagcagcagggagtctccccgaggccccgccccgcgagggcgcccagcctccctgggccttgagtcagagtgcgttgcctttaagacgttctggaaagtcaccgcgtccgtgggcggggaaccaggcgcggcgcgttttgtccctcgcgggccgccgtgggctgggccgggcgcgag

SEQ ID NO: 16961 - DNA, 2300 bp, Homo sapien
gattacaggcatgcgccaatatgccctgctaaattttttttttttttgtatttttagtagagacagtggtttcaccatgttgaccaggttggccttgaactcctgaccttaaatgatccacccgcctcagcctcccaaagcgctaggattacaggtgtgaggcaccgcgcccggccagccaccctgcccagcctccctgctatcctttctttctcccacaactatccattgtgatcctgctctgggtcaggccctcaaggaagaccagggtactgcctccatgggccacacattctagtgggagagacagacgataaacatgtaaacgcagagacaagagaatttcccaatatgaccagcgtgctgaagaaactcacacagggcatcgagatcatgagcagccagtgggtgtgtggggactctggaagaggtggaagtcctctccaagaaagtgacatgtgagctgagtcctgaagggcacaggggcgaccacataaagaagctgctggtgagaggtgttaagtgggtggtggggagggggcacggggcatggggtggaagagtccttctgcagggggagcagcaagtgcaaggctgttctagaagcagaaggccattgtagctagagcagagtcatgatccacagggtcaggaggccatgacccacagacagaagcgaaaacttctgtgcaattaaaggaacggctttctagcacttagagctgcctgaggatggagtgggctgccccgagggagagaacttcccatcactaagccatagtcaaaggccgctgtccacggaggttactgaggatgagactcaagcatcccaaaggttggctagaggacccttcgttccttctacgccttcacgttcaggagcatccttggtttggcggaagctggggggatgtctatggagtgcatgaatgaaagttccaggccgagcgcggtggctcatgcctgtcatctcagcactttgggaggccgaggcgggtggatcacctaaggccaggagtttgagaccagcctggccaacatggcgaaaccccgtctctactaaaaatacaaaaagtagccgggtatggtggcgggtgcctgtaatcccagctactcggcaggctgaggcacaagaatcgcttgaacccgggaggcggaggttgcagtgagccgagatcgcgccactgcactccagcctgggggacagagcaagactctgtctcataaaagtccagcctccagatcccaggcagcggggagtttcaggggtctgagcagccctggagactcgcagcatagcgttctgtaccccgtcccgggtcccgcgcaacgcagagctagagggagccccagagtatcttcctcagtagatcaggagcccccaggcctcaccgcacctcggttccccattgcccccattgcccccattgcatcttccaggaacccctggcgggcaggctgctccttctctccccgggtcctctgggtgcacctgccccgccccgcgcctttgttccggaggagccgccttgggcagcccccagggagctcaggacccgctgtaccccctgccaccgcctcccggtgcccgcccctccgccccctctccgcggctgcgccaggcgatccgcaggcagcggcacagggaccagggcgcgccccgggtggcggaggcgcggcgagggcgggagcacgaggaccccggaccctggatcggcgcgggctccggctgcgcgtgcgcggcggcggcggcgaggggcgccaggtgtgcgggcggtggcggctgcggagggcgcggctttgtgcgctggggccggccggggtgcgcgcgtgcgcggcaggactgctgcgagggaccccgccgccccggaggaggaggaggaggaggaggaggaggaggagggggctgggccgagggagggggcgaccgcggggactgaggtgcccttcgctccgggtccagaggcagccgcgcgccaggcggcgcagaaggtcagtggccccggggctgggattccgcagccagcctggatcgggacgtgagtcctggtgtgactgacggggaatcggagcgtgtgtggagtgtgaacgcgtgtgtttgcagacagacatcggcacgtatggacggcgcgagccggtactgcgttccggaggagccatccggcgtcacaggctgtgctggggaggtggggtgaccgtcctcagaaacccccgcgggcggggcgctgcacacacgtccacctatagggtgtgtgtgcgtgcgtgaggtgtgcagcccctgtcaggatctggcgagagaa

SEQ ID NO: 16962 - DNA, 2300 bp, Homo sapien
agtgcagagggttcttctcagatggaggcagggcaggcaggacccaagttgtccacggtacctgttgagcacttcctgggtgtgggtgggtgcctctggggagagaggcgcttgtggcactctgcagtggccatcctgtgggaagccagcagcctgaagccaccccagagcatgaaccacacaatcctaactttcctggggcagaggtgagggttgggggaagcctccgggctcctgctggggactagctgccttggaggtagagagtcagcccccagccctgctctggcccaggaccctgaagctgctcccccagcccactcagggcttgaggcccctgtgctgtcccctgctgtgaaggagtcaagaaaatagaaatccttgtacccttcgtccacaagctggggttggcccctggcacctcagcacggagtctaggaccttcacagtggcagcaggtgccagagaggaaatttcagggagggttggccagagagagaggccaatggcaccagctagggccgtttttttcctttttttttttttttttttttttgagatggagttttgctctttgttgcacaggctggagtacaacagcatgatcttggctcactgcaacctctgcctcccaggttcaaacgattctcctgcctcagcctccagagtagctgggattataggtacctgccatcatgcctggctcatttttgtatttttagtagagatggggtttcaccatgttggccaggctggtctcgaactcctgacctcaggtgatccacccgcgttggcctcccaaagtgctgggattacaggtgtgagccgccacacccggcctttcttcttcttctttttttttttttgagacgttttcttccctttctccactgcttgggggtagggtggggcctggggccctatctgtgcccactccccccagtgtctgttgtagtgtacgtgccacatccctttgaggggctgccattagtaagtgcctgctgtgtaccaggtgtggtcagcaccagtgcgtgcagagatgagcactggccctgtggtgtgcagactgggatgcgtgcaggacacgctagccctgtggcatgaggaccagcacctgagcatgcagagatgaggacgaaccctgcggttcagctgggaagacaaatccacccgcacatgggtaccgcccccccaccccacacagccagcgtgaagcatgccactgctctgacctctgtctagacacttggcggcgggggtggggggcggctgacaggtacagctctgtgcccatgtgtgtgtacatgcgaatgccccttgcagtgtgatgtggtctgagtatgtggatgagtgcctgcgggcacatgtgtatgcgttcatgtctgtgcacgtgtccaatggggctttgtcagtatgtgagaagcgtgtgcaggtgtgtctactgatgcctgtgtgaagtggtgtgtggatgtgcacgggagcgtgtgtgccgcgctgtgctcaggtgtgtacaggtgtctaatgatacgtatgtctgcgtgcatgtatctgtgtgtacctgggtatcctgggcgtgtgtgtgtccatgtgtgcatcccacgtgcccctgtgcccatgcgtgtgcatgtatacttacatccacgtgtgctagtggaatgacatgtgtgtggctggttcctctggcgtgtgccgagccatggtggggcaggcaggcaaaggtccctgtctcaggcagccctcgggagtgggtgtgaaggtccccagtgctcaggcgtccctgaggcttccagctgaatctttctgtccctcctaggcgtggctgtgggaatccttggggcgcctttgggttccaggaagctggggctgtgtgggccgggctgctaactggggctgtggagcaatctgccagccgagccccttccggagctgtgggttcctctgggtgtggggaagctgccctccacaacctcctcggcctatcttggtgcctcctggagtgcaggacacacctcccagctctgcagcctcacccacaggaagctcgggttgggggcaggcgaagagggaggtgccacgctgggctccccgccctgcaccggcactgaccccgctgtaccacggccctcttgcggacagccccggggacgtcgttgggacatcgctgggaccccgggctctgcagccacaaccatgtttggccggaagcgcagtgtctcctttgggggcttcggatggtgggtgacaggtgggagggtgggggaatgatgggagagaacttagaagtgaagtcttgttaagtg

SEQ ID NO: 16963 - DNA, 2300 bp, Homo sapien
ttatatccaaacttgaaacagaagaaatctacacaggctcattgtctccaaactgtgggtagattcttcttggctactctcatggcacacacaggctgttagaatacttagatcttagactggagagctgcttgttataaatttgggacatccgttaaaaaatccagaagcctatggggaatgaggaagaagtttggacagtagtcaccgccagcaggggaatttcatctctggataatttcttctttgtgtctggcaaagctgctaaaccgtggagccaatttcttatgtctggtttccaatttggcctggcaatcactccaagtacatgatgtgactgcccaacttccgagctggggtacggcttctcgtcaccaccctacctactagctttccatctgggagagccacatttgagcttgctgggcttcctggggcattgatttcaatgctgttgacccacaacaacaaaaataattctatgtggaaagatccctgtctattccagggctcactctcactcctaaagaggacaggattcttctagatctccaacttcatatattcccatacgacattgctttttgttgttgtcgtcgttgttgttgtcatcgttgttgttgttgagacagagtctcactctgtcgcccaggctggagtgcagtggtgcgatccttgctcactgcaacctctgcttcctgggttcaggtgattctcctgcctcagcctcctgagtagctgggactacaggcacccgccaccacgcccagctaatttttttttgtatttttagtagagacggggtttcaccgtgttagccaggatggtctcgatctcctgacctcgtgatccacccgccttgacctcccaaagtcctgggattacaggcgtgagccaccgtgcctggccacaacactgctttctaaggaagagaatctggggttcaactctcaatattcacctacttttagtcctaactgcccccatagattacaaaacaaaaacaaaaaaccatcaaagtgcgtgttgcgtgcccggcatttttcttagctttcagccccgaagcagcatttccagtcctaatggaggatacagtattagaaaaagggggttagatctttgtattccattgtcatcttattcaaaaatgctacccagtctcggtctgatttttattaaggtagcaattttcttcacagaggttcacctagctggaaatcctatttggagatggagatccaggtattaacctctcagaaaattggctcttgctatttaattgactcttctatgccttgcaaatatgatttccagccaagtgaacctctgtagagaaaattgcttcctttcttgataagaaacaaactaagattggatgggtgctgacgacatcctgaaaccacggacccccacctttcccaaagtggggttatatgtccttattccctccaatatttatctcaaaatttgggcaggaaaaaaaaatgtgattgctcttttccaaatacctttatgaatcttcaattagactccacaaataaggattgagagcctgacaggttcacagcattctgctaagcaccacccaaccagggacagagataaataagacacagattccttcgtgcccccatagcaacctgtgcatattgctaaaatcatacccgtgacacacattaaattcatgaaaccatatgcctttcagagaacagggaccaagtctcagccatcatggtatctctaacacctatcgcagttcctggtacagaggaggttttacaaaacatgttagctaaaccaaacagaaaccagttccagctcctgcccttgagaaggtcacaatccagagagaggtgccctggcttccgctataaatcagtgctcctgttgtgaacatcagtgcatctcagggaacccagcccatacaacaaacacacagggcactatctttcctggcaagatgtataccacaggcagcactctggcgaaccctctcccaggactcggagctgtgtctcagcaggatgagtcacactgaaccatccctacttttcttcccgtcttcctcagagccatggacttgtaagaaagaggggcaggaaggggtacagtctgggtgaccttgagacctggatgcccctctgactgtcagctaactggtggagcgcgtgggtctccctgctaggcaacttcagacacagccccaggattccagcaggcctgtccccgtcagccagtgcacccagaccagactggtcagtctggtatttctgagtcccatcccagcccccacaccaccg

SEQ ID NO: 16964 - DNA, 2300 bp, Homo sapien
tcctcctcggggccagccctgcagtgtggtcctggggtgtgttttgctgctcaggggctcgggacccatgactgtgagaggggtgtccttgctttgttattattaatggcagcagtagccaccccagcttactgtgtaccaggcactgagctgagtaacctgtagacacaatctcacctgcttcccatagcagctgcccgagatgggtgctgatgtgttctcctgttcccatttgaggaaaaggaggcccgctggggctcagtaacttgctagaggccactcagctaagcttaagagctgggatttgaggccgggcgtggtggctcatgcctggaatcccagcactttgggaggctgaggcaggtggaccacaaggtcaggagttcaagaccagcctggccaacttggtgaaaccccgtctctactaaaaatacaaaaattaactgggcgtggtggcgggtgcctgtaatcccagctactcaggaggctgaggcagagaattgcttgaacctgggaggtggaacttgcagtgagccgagatcatgccactgcactccagcctgggtgacagcgagactgtctcaaaaaaacaaaacaaaacaaaacacaaaatcaactgaatttgaatgcgattctgctggatccaaagtctgtgctgttcatcaccatgtgtacagttcccaagggaagggtcctgcaggcctgtgagtttgggcctgattgactcgtaccaggggctgggaaggggagggaatcatgtagttgggcctttcataaagcaaagtgggccgggcatggtggctgaggagggtggatcccttgagtccaggaattcgagaccagcttggggaacaaagtgagaccccatctctacaaaaaaatgcaaaaattagctgagcatggtggcacgcaccagtagtcttagctacttgggagactgaggtgggaggatcacctgtgcctggggaggttgaggctctagcgagccgtaattgggccactgcactccagcctggatgtcagagtgagaccctgtctccaaatctaagtaactaaagcaaagtggctttggatttgtatagactaggattttcctttcttttccttcaaaatagcagaacatactcaccatggaactaattatgagtattataaatggcctcgcataattaatttaattgactaaatattttcctagctattatcttgcttccccctgaaggtgcatggcgtgagcagagcagggcctcatctccatcctgtggatgaggagactcaggtcgggtctcattgctctcctgaggtgccataacatgtgcatggcaggagctggggcctgagttggaggcttggtggcctctagaggttggttccaggctcccatctgccctcctcaaacccccaccactcattgtccactgtgaggccaggcagctttccaaagcagaaggcgtcttggctgccgccaaccgcccattggtgcctgtggccctggctctgcggctctcagcctgtcttgttattggaacgcctgcgcggctccatttgtttgcgaggaatgaaggagagtcaggagtcctcaccctgccagtgatttgctggaagacctttggtcttcagcttccttgccggtaaagtgagaggttgaaccaggtccctccagggcctccctggctctgtgcctctcagcctgtgtcccccggaattgttctgaccttctcaatttggtgggcctggccctgtgttcctccaacagttgtggtctttggtggatcatgacctgggaccacaaggtttggcttaacacagggaaggaggctgtgactggcctgagtctccaggtctcagcttcagttacatagatctcaaccttcctagctgtcttgctattttctggggtctcttccagaccaggagccatttgtagaccagggaggaggatgaggggataggagatcggtgtttgggccgggagcactcattttggcaatttcatcgacagcctccagtggtggcggcaacggtgaagaaccagtcacggagtcccatcaagcgacgctcggggctcttcccccgcctgcacacgggctcagaaggccagggcgacagccgggcacgatggtaactgttgggaaacccctaccccagcctgacttgcggggtctgtcaaccccctccactgctacagctgttcagtgccctaccttgcagggaggagctttgctcagctttaggagatggctctgccttcaggcacctgtgtgtcccctgtcactcactcagctctttatccaaagagg

SEQ ID NO: 16965 - DNA, 2300 bp, Homo sapien
aggcagatgccaaaaaagaccgtagacaaacttcacgaataattgtgactacaaaagtctaaataaaatattagcaaattgattcagtggttcataatgggcatacaagtatgcttccatattaagaaggctattcacataatgtatcttgagtgacactgaaaaagtgttttattaaaaatgcaacagccatacctgattttttaaatactgttgataaactatgaagaaaaacaatagttgctaaatatgcacagccacttctgctttatagttcattactggccattgcacaacatcctgtctcaccaatatcctctttgctcccagacatgctggcctatatttacttccttaaacacaagaatgacctttccctgctcaggggctctgctcagggtggctgtttttctgcaaagctctttgcctattgtgttacaagactggctttttgtggtccttcatgtctcggctaaaaagacattagccatggttatctaactctacatgctggaatttgatacaatttttattatctcctttataacttttcagatttttaatgttttattccatatacattcagtttttcaaaaggaaaaaataattttttaatctttagtatattttgataaaatatactagtatgtttggtatgttttagtatgtttgataaaatacaaaacattgatgtaacttttcccaaaaaataagtagacagttgtcctaatgtcatttattgcataatgcaacctttccctggtgaattaaagtgtcacattccacatgaacttggctgtttcttaagtttctagacagttctactgatctgttcattctagcaccagtacccccactattttaaagttcttaatagagcaagtgtctccttgtcttcaacattttcctagcttattttcattcctattttataggaaatttaaactagctcttgtttctttaaaaccctgttacaattttgactttcaaataggttaaattttagaacaactcagaatatgcacctttgcaacatctcatcttttttatctagaatcttggttatatctgtccatttaataaatttttactttatgcctcaatagagattcttattaataccttaatgcatagattgtttgctgataatgtgtttcatattttaatcttagtattcttatcattcatatataataacaggtactatttattgagtgctctccacatgtcagctctttgtgttaagtactttattccttaattttctcctcaccccaacccatttttcacatttaaaaaacctgagtcttaaagaacacaagtgacctgcctgaggcattacagccaagaagaggcagtgctttgacttgaatttaagagttcgggatcaatagatgcccaaacatcagcatctctcaatatatccttgtaacaaatctgcacatgcacccccgaatctaaaattaaaattaaaaaaaaaaaaaaaaaagagttcccacagaacggtctttagcactgcactacgtggcttacggggaccatgaaagctgagagcctgttcattttgtcatgggtcacttcactgactaatcacagacatcttttttttctaatgatgtttccattcattttcttagatttcccagagagatcattatatcaacaagtaataataattcttctttctcctttccaatattttatttctccacttcctccaattggacaataatcttttcttgtaatgcatatacctgtattaaataccacttaaaaccctgtataaaatcataacataacacactaaactttaaacacttcaagactattggaagatggcaggattaaaaataaggcttagacattgtttttataatattcattatgtcaggtgagaagttgctggaataaataagttgcatactttccatattctatttttgtgcctataatgacctgttgcttttgttatttttaaagtttagtccaagatattttaattctaagaaaagagttgattttgcttatcttcgtgtccttattcaaatgagggcacttaataaacatttgttggtgttaatgttacagaaagttgggggaatggatggagataaccagagtgagaactcacagttccttctcctggggatctcagagagtcctgagcagcagcggatcctgttttggatgttcctgtccatgtacctggtcacggtgctgggaaatgtgctcatcatcctggccatcagctctgattcccacctgcacacccccatgtacttcttcctggccaacctctc

SEQ ID NO: 16966 - DNA, 2300 bp, Homo sapien
attttttttctgatttttctctctcctgtccttcagcacttgcattccatgtgtgctggtatgcttaatggtgctccacacttttctgagtctctgttcatttttcttcattttttctcttcctctatttttcagcttgatatcaatctatcttaaagaatgctattttttctgctagttcaatactactattcagcctgactaataaaatcttcatttcagttactgtacattttgactgcaggatttccatttggctctcttttatccattctttttattgatattccccatttgtcatgacattctcactgtaccttcctttacttccctaatcatgctttctcttagttttgtgaaaatattttcaatggctactttgaggtcttttcaaagaaggctgacatcacattgtgctcacaggtagtttctgttgcctgattttttcctcatatgtggatcatactttgtttcttttcatggttcataaattttgttggaatatggacattttagataatttattgtaacaattcagggtactagtctcccctaatggggctggttattggtatttacctatttgcttagttcccacagtcactgagaactgtcagtagtattggaagagatcttactctttccctgaccgcattcagctgttttatatatactacatttttttatatttttacatatacatgtttcttttttcttttttgattttttaaacattttattctatacacattaggctttcgaaggaaaaaaaggcacactatagtattttaatctttagtatgttttaaatgtgtttgataagatacaaaatattgttcgaactagtcctccgaaattaattacacagttatctcaatgtgccatttcttgaataatgcaggctttacttgctaatatagagtgtacccatgcagaatttaccggctaatatacagtgcacccaaattaatctgccaaattccacgtttttgtgtctatctgtgaagtttctactgatctgttcattccaacattactatcatattgctttagaattcttaatatttgatgtgcaagcatcaccctgttattcttttattcaatgtttttctagcttatctacatgcttatatttagatgaaatttagaccagtttcatttctccaaaaccctgttataattttgatatccagtaaactttcaattaattcaaaagagtatatagcttggtgacacttctcttcatattagaaaccttgatatgtttatcaatttatttaatttttactttacccctcactggagaatttgaaggtttcgcctgattcttgttaacatctgagtgccatgatttatttgttgacagtggggatgagatagtttttcattataacatttttcctgattctcgttaaatataacaataataggcaacatttctgagtgctaattgcctaccaactccttgtgttaagcactttactacttaattttcccccaccctataactcatgattcgcatgaagaaactgagtcttaaggaactctggaaccctacctgaggtttcacagcaagtaagtggcagtgcgtactatcttactagcagggaaagacttgatttcaagtattctaaactctatttctagtagtctttcagtggatagtcccacttttttcagatagatcatcatatcaacaaataataattgttcctactcctttcaaatacttttattttcttccttttttgaactacttatactgcatgtatctatattaattattttaacacatatacatatcataacacactaatcaccaaacacttcaagaatagtgtaagatgacaggattgaaaataagaattacacattattcctttaacattgagtttcccagctttgaagtagctgaaataattatatcgcataaaaactttgttatatttttcactttcttattttcaaaaattataaaattgggtgtaagacattcttaattctaagaaaatgttgattttgcttatcttcatgtttttattcaattaaggacttttggtaaacatttgctggtgttaatgttaaaagagagttggggaaatggatggaggcaaccagagtgaaggttcagagttccttctcctggggatgtcagagagtcctgagcagcagcggatcctgttttggatgttcctgtccatgtacctggtcacggtggtgggaaatgtgctcatcatcctggccatcagctctgattcccgcctgcacacccccgtgtacttcttcctggccaacctctc

SEQ ID NO: 16967 - DNA, 2300 bp, Homo sapien
gaggttgcagtgagccaagattctgccacggcactccagcctgggtgacagagtgagactccgtctcaaaaataaataaataagaaatatccatggtcagagagagaataagacataagatgccactattgcctagtaagtagtaattttagtgtacgtaactaaggcttacaaatccataggttatattaaactctgaaggtaaaaaaaagcggcacagggaaactgattccgtgggttaatcactcagctgaaacactgttccatcccaagaatttcacctagaaagaatgcatttgtttggaacacttatctctctgtaaccgtagtgtttccctacatattcctatggccaggactccattaactcaaagctaccactgaacctactaacaaaaaggttggctgggtgtggtggctcatgcctgtaatcccagcactttgggaggccgaggcaggtgggtcacctgaggtcaggagttcaagtccagcctggccaatgtgatgaaaccccatctctactaaaaatacaaaaaaaaaaaaaaaaaaaatagccaggtgtggtagcagtggcctgtaatcccagctactcaggaggctgagacaagggaatcacttgagcccagcaggtggagactgcagtgagctgagttcgtgctactgcactccagcctgggtgacagagtgagactccatctcaaaaatcataacaataataataaaggttcaggctaattcttatgcctgatattacctctatagcaaagcccctttccattcttcccactctttccattctctggggtttatgtatttacatgatagattcatactgagcatctgtgttgtaccagcctcaaggctaatgctagatttcaaagctgagccaattaggcaccatctctgcctactcccagtgatgctcacagcagaatgagggacactcatataaacagacactcagaatccaaggtgacacgtgctgtgatgggggaggcactgcattaggaaggtcacgaacctgagtttctggtgagaggatgagttgggaaagacttcccagaagaggtgacatctaaggtgagacctgaagcttagctcgtctgataaatgggatgggaaaaactatttcagcctgagaaagcctaaaggtgagggagtatctgggcctttaaaataattgaaactatgattagtgcataaagtgtggagtggaggagggagtttcatgaggaactggggatgtctgtaataaatgacggtaagatccaggacattcagccgtgttcagtttagagtttatcctgggagtaatgaggagtgtatgaaggatttttcaagcagaaagacaagagtcgaatttgatttttagcaagcctattctctgtgtatttagaacagcaggtggcaggtgggcatacctgggggcatggagatcaactgcccaaatccaagtgagaaatcacagtgccctgaatgacatgagctgcagctgggactgatggtgaccagtaaacagagagacgtcagtaaattgtagccatattgagaaggtaaaattgccaggctttggtggtggttggatgtaggcagggagggagaaacgtgggtcaataatgacgctcaggtttctggccagacccgctgtgtagataacagtgataatgatttccatgttagccatgcttttcccaattccaaaacccctttccaggagctgtctttttaattattggtacaatgggctcatttgacctgtaaaatcttgggttgtataaatgtcatagtttctacatgaacactaccagagcaaagccagcaagcccctccagcccagccccaaaatacacatattggcttaatgcttatggaataaatttaaaagcctctcattgcattacaaacaaatctgtggtttctcatagcaccaagcacaggaatttgcaaatatttagtcgaaccctatgaaatggccatttttgcaggtcccaaagagtcaaatagtggagatttcctatgatccaacctcacactagaagatcaacactggaatattgcataattttcagagttcacaatccagggcttaccaacgtcacccaattaacccaactttcttcctacagacaaatggaggggaaaaatctgaccagcatctcagaatgtttcctcctggggttctctgagcagctggaggagcagaagcccctctttgggtccttcctgttcatgtacttggtcacggtggcaggcaacctcctcatcattctagtcatcattactgacactcaactccatac

SEQ ID NO: 16968 - DNA, 2300 bp, Homo sapien
aatacttaagttgaaaatgatgatggtctaagctaaattagtaaagggtaatttagcttaggtaagtaaagagaaaagttgagttatataacaattttttcaaatgaagattcaacaaggtcagacgtacaggcagaagataaactggatgagtgtttctgtgagaatcccacatgtggggaaccatgaaataaacctgggttcaactcaataattgagtgcaaattaattggtgcacaaaatgaatgatattttacaaaaatcaatttggaagacataaacataaacaagttatgattttcctcttcaaaaacatcttgcacctgtaatcccagcactttgggaggccgaggtgggcaggtcacaaggtcaggagatcgagaccatcctggctaacacgtgaaaccccgtctctactaaaaacacaaaaaattagccaggcatggtggcgcgtgcctgtagtcccagctactcgggaggctgaggcaggagaatggcgtgaacccaggaggtggagcttgcagtgagctgagatctcgccactgcactccagcctgggcaacagagtgagactctgtctcaaaaaaaaaaaaaaaaaaagaaaagaaacatcttgcaaactacttaggttttaagtgcagagtgtggggtttggtcagacatgttagcaggatgactgaatatggaaatatgggaaaaagaaatcgagaccacagatacagacatgacagtttactaaagaatagttgaatccactgtggacttggattactacaaaaagaaataaggaagacaaggaagagaagactgctatggattgagtttgccctcaccaaaactcatgttgaaatgtgatccccagtgtgggaggtgttgggaggtaaagcctagtgggaagcgtttgagtcaagggggtggatccctcatgagtggtctggtgctgttctcatggtagtaagtgtgttctcattctctcaagactggattaatcttaagggaatgttcctacaggagtgggttgtgataaaaccagtatacttctcgggttttctctcttcccctgtatccacttccctgttgaccttctctgacaggttatgatgcagcaagaaagcccttgccagaagccagggccacgctcttgaatgtcccagcctacagatccatgagacaattcaacctcttttcttataaattccccagtctcaagtattctgttatagcaacacaaaatgaaccaagacaaaggccagtggaaaaagcactgtgattatgtatagttatgggctttgaaaagagagaaaagctgtcaaaaagatagggaatatctttgaaaatcgaacacctgtggagtaagttcactgagcttgtttttctaggacctaatgccagttgtctttctgttttagaatctgatggcagtgtagacacctctgacttcctgggctctgggctcaccccgagactggttggaggaacaactttaaattgttcactgcattcctactatgatacatcctttgcactggaggattttttgtttgtttttttcacaaggactccaagaggctatccttttcttaccatgtgtaataaaattattgtgtgagtctggctttcctattcaattataaggtccttgagaacagatgctatgtcttgtgtaacaaataagtggatgaataactgtattttcacatatttattgtttctctacaaagtaaaaaaaaatctaagacatgaaacatgaaattaggtttttgttatgtgattaaattatagatattaaggtggtggtgctacatttggaaggacaaccatctttacttcacagatcgctaacttctttgacatgagtgtccaggaggtcaatgagagttcgtcccattgaccaacagagattttacccaaaagtgctggctatatttatgattgtaaaaaccaggtatagccatggctaatgaaaagtggtggataagtttgacagcaggtgaatttgtaaaataattaaaaacgtttaagtggtagataaggcagactataacacacactaactgcgctaataattctgggttcctctcccctttcatgctgaagaagccatgaagaaagaaaatcaatcctttaacctggattttattctcctgggagttactagtcagcaagaacagaataatgtcttctttgtgatttttttgtgcatttaccccatcacactgactggaaatctgctcatcatcttggccatctgtgctgacattcgccttcacaaccccatgtattttctccttgccaacctc

SEQ ID NO: 16969 - DNA, 2300 bp, Homo sapien
gctagatattctgcagaactgtcacaagttgatcacaaaatgtaaaatggcttaaacaaagtaaaggtttatttctctcctacataatggttacaataaatgtttttgtttgggggaggttctcctgagtgtggagtactggggatacaggttcattccatcatgtgtctccatcatcctgttcagcctcctctccatttgcatccaactggcacaagggtaagaaggtgtggaggagcccagaactgggacacgtgtggaatggctagaactcagtcacatgagcacacctcactgcaagggagtctgggaaatgtagtctaattgaacgtccaagaagaagagaacaacacggatttgactaagcagctgatcgttgccgctgtaatttaagtcttagagtacaagacggatcaaagaggaggaaacctggagtcaagcagttgagttagcattacaatacttcagggagaaaacaatgatggagctgaagcactgggacatttagtagaaaggctgaattatgtaataattattttaaaggaagaatcaacaagattagatgtagaggtgagagagaaactgagtcattaagcttgtgagcatcccacatatggggagtacaagaaatatacctggatttgactcaaaaaatattaagagaaaacttattgatacatacaatagaaaatatttggctgggcacggtggctcacgcctgtaatcccagcactttgggaggccgacacgggcggatcacctgaggtcaggagtttgagaccagcctggccaatgtgatgaaacctccatctctactaaaaatacaaacaataacaacaacaacaacaaaaaactagccaggcgtagtggcacatgcctgtaatcccagctactcaggaggctgaggcaggagaatcacttgaacctgggaggcggaggttgcggtgagccgagatcacaccactgcactccagcctgggcaagatgcagtgagactccatctcaaaaaaaaaagaaaaaaaaaaaaaaagaaaatattccataatagtctatctgaaggaggtaaaaataaacaagatatggttttccttcccctaaaatcttgccctcatcttaggttggatgtgcagtttggtcacgttggcagtatgagtgaagtggaaatacggagggaaaagttcacacctacagatgtaaacctcacagtttactaagcaatggttgaagccactaagcagttgcttgagtcacccaaagaaataattaagaacaggaagagaaggctgagagaaaggcattgtgattgtatatacttgagggcttgccaaagagagaaaaaaaaccaacaactcttttttcctttcttttaaaggaaatggtgaaaatttactttgaaaatgagacacctggggagaaaattctccagactgttttagtaggatctaaatgcactggtccctgtgatttacaatcttccgacacagtgtagatacatgttacctcctgggctctgggatccctctgagttttttcaatggaaaaattcctaatttctgggctggccctttcaccagcagaccttttgcactggaatattttgtcaaagacttcaaaatgctgtcctctccttatcatgggtaataaaattagtgtgtgattttggcttctccactaagttgtaaggtccttgagaacagagaccacgtcttgaataaatagatgaataaactgtatttgtcacatatttataacttctccatgaggtctaacaaagtgactagaccatgggacatgacaattatttgttatatgattaatttctaggcgtttagtggtggtgcttggaacaggaaggatgggcacttctgattcagagattgctcactttttagacatgactataaaggggtgaatgacaattagtcctattgacctacagggatgtttccccaaaatactggatatctctataatttaataaactcaggtgtatacacagctgaatcacttaagtcagaagtgatggagaaggattatcactacacacagtaactatgctaatataatgatattcctctcccctttcatgttaaagaagccatgagggaaaataaccagtcctctacactggaattcatcctcctgggagttactggtcagcaggaacaggaagatttcttctacatcctcttcttgttcatttaccccatcacattgattggaaacctgctcatcgtcctagccatttgctctgatgttcgccttcacaaccccatgtattttctccttgccaacctctc

SEQ ID NO: 16970 - DNA, 2300 bp, Homo sapien
tttgactaggctatccatttttttaatcattgatattcagtgatactccagtggtatgtaacaatgctggcgttctgtatgaatgtttcctgggacaaagtgtacacttttgaattgtaaagtcaagtgtttctgtaattttttaattaaaattgagttttaaataattgttcttttccacttttttgatttcctcctttggtaactcgaatgtacatagattggatctcctttgtcttttctcatatctgtcattttctctcttttctcattgcatcttgtcatcttttaaaatactgttcctgcatctgtctaatttttttccatgtattgtttctaatattggtttttttggtatagtaattttacatttctttaacatcttttctttcttcttccagctcatatttcttatctttcttgcaatcccttccctcagctcttatatttttactctgttttcttattttataccagaaaatgcctccttaagttttttttttattttatttttagagaggccgaaatgttgggtaacaattttcttttttattgttattattttatttttttaagttctggggtacatgtgcaggacatgcaggtttgtcacataggtaaacatgtgccatggtggtttgctgcacctatcaccccatcacctaggtattaagcccagcatgcattagctcttttccctaatgttctcgccctggccaccctcccatgacaggccccagtgtgtgttgtttccctgtctgtgtacatgtattctcattgttcagctcccacttataagtgagggcatgcagtgtttggtttcctgttcctgcattagtttgctgaggataatggcttccagcttcatccacatccctgcaaaggacatgatctcattctttttcatggctgcatagtattccgtggtgtatatgtaccacattttctttatccagtctgtcattgatgggcatttgggttgattccatgtctttgccaggtaacagttttcatatgttcattggcaacattctttgatggagtgaattttgtcatccatttgtctttcttgtttatttacctcttttttcttgtagaatccttgtttatatgatgtgcaggtttgttttaatccttaaatgacatgagtttttgccaaactagatattcacaagatgcttgtatcttgcaagtctaagacatgtttcagactagcaggaacctaccttgtgattcagaattggaggtaaattattttagcttttatttgtgtgtaatgaatgcagacaggtaaatagaactgttagaactgatgtatttttttctaccttttgcctccagttttatgctttatctatagcctgtgtacctaagtcttcatttagccttttctctgcttcttgagtccaattcagggtcacagaggattatggtgccatactttacaccatatacccattattgcaaacaagagctttggttttgttttttgttgattgcctccccctacccaccctttttttttttttaagagaattatactcatttaactcttatacagtcatggatttcctctctctgcttcttgtcactctcctatttgatctttactgttcttgaatccatccaatctagtttatggattggggttgtggacacttactagtttctttgaagatagaatctgtatgtttatttttctgcttgttttggaaagagataagttctgagaagagaacattttggatttactcggccatgttcaaaccagaagtacactttttgcttatttttcccaagggtttgtctttcataatctttacaaataggttcttgcagctggggggcgggttggaggagggaggtccagagtggtaatgttacctgtgcttacgcctgcaaataaagttattcaggtaaatgtagcgacagagtaaacaagtgtagtgtggcctaaggagcgcaaaattccttacttgtacagagggaacgtggcagagggccgggcaagtagaagggggtctgtttctttttcttgagtaaataaattattgggaggagtgattcttttcctccctggatgtttctttgcaggaactcatgcagccagaatctggggccaatggaacagtcattgctgagttcatcctgctgggcttgctggaggcgccagggctgcagccagttgtctttgtgctcttcctctttgcctacctggtcacggtcaggggcaacctcagcatcctggcagctgtcttggtggagcccaaactccacacccccatgtacttcttcctggg

SEQ ID NO: 16971 - DNA, 2300 bp, Homo sapien
ctctcctctcctgtccccacccaagatgatgggctggattaaatcagaaacccaaaatctcaacaccgtccccaacacaaggtgactttcaggattttaagtctttgagatgttcattttaactctataaaatgttgattacaagagtgccgtttcaccagtgctcaaaaatatttttgttaaataaatgaatgaattttgccatattgaagaaggctgtacttggaaacattttgacaagtccataacattttaaaaatatttgaggtcattatgtctttggcaaaggcaggtgtctttacctggttctggctccccctggaaggtgctaatttctgaggcctccaggggaacaatgaggaggagaaaaatcccagtgtgaaaatgatgtcagcggagttgcttgtccctttgtctgtctgtcctttataagccatcccctctgcagaggctgctgggccggcgggactgtccctcctcctctttgcccatctctttggccgggtgagtctcatctcaagactcctcactgtactctcacagcttggtctccatacaaatgaagttcaccctctgggctctgaaacagcttctcactccacccaaaaagatccagtgggatttgggtgcttcaatgtgcagggttagagagagggaagaatcagtaatgactaagctttcaagcgctactcacggggaggatggcaatgctgctaccaaaatacttagtccaaagcagattgagattgaagaaggacggttctgatttggagagactgagtttgaggtaatggtaagagcatgtccatgcagaaaaggccatactattagatggtaattgaccctctggagacctgaggacggcattctccacatttaatcattgggaaatatcttcctctgctcatgccttttgccccctagtggtctccaactccaccccttccctggatgagttagcctccatgtgagagacttaaatatctatccctcagccagaggttgaggtggatcactgagtattttattttattttttgagactgagtctcgctctgtcacccaggctagagtacagtggcgctgtctcagctcactgcaacctccacctcccaggttcaagcaattcttctgccccagcctcccgagtagctgggattacaggcacctgcaaccacacccagctaatttttgtatttttagtagagacggggtttcaccatattggctaggctggtctcgaactcctgacctcaggtgatccacccaccgcggcctcccaaagtgctaggattacaggtgtgagtcaccacgcccggccgagtattttattagcagtgattagggctgggaaaagaaaagcattacctaagtgatcatatatgtgggcagttcatggcactgtaaaagactttggccctatctggtgatcagataaatagcatgtgtgttggatgatgcgtaattagaaccaggagacagaagagtgaaaagctcagtgatggtggagttggaggcatggggaattcagggtgtgggtatctgcttacctaagactctatttgtgtgagagttcacctgtatattcaatgaaacagcgttacttggtatccaccaaacccacctgggagcctaagcctggagactcaccctactcaaaagccctttttacattcttcatatttggtaaacggtcagtacttttgagcccaaatttcccagactctatacggagaaatgcaatgtaatattactacttggaaaatctaaaaggctggtagtcaccagctatggagctggaaatgtcctcggtgatgtttcctcgtttagtttcactgtttttcatctcatttcgctttttttctgaaatgtccggaccaaatctcatggcctcgcatgttaatcttttaatagtctgggccacgacaggcatctcactactgccatggtgtatgacagcacgtgtatgcggggggtgcagggacacaggttgtggggagcatgctttcctgcttccccgaagcttccctttcatcctctgggatcttgtgtacctcaactatggccatgccaccatctgtagacttggggtttcctcccagaactttggcctcaggaaaataatttttccctttacctttctaatgtaacatttgttcccctttctacatcaattcatggatctctgtttgagtctgtccaatgccactcttgttacccattaagagtcagatatcaagtcttttcatactacatctaaatcttcaacttccttccccttacatttcatgcgttcttcca

SEQ ID NO: 16972 - DNA, 2300 bp, Homo sapien
aatttttaaaaagaggcttgatcagaaaaaataaataaagctacagttattgaaacattgtggtatactaacacggactgctgtaacagaatataaagttcagaagaaaatacaagtgtgtgtatatatatctatatacatttaaaatttgataaaaagagatacttaaaacatttagaacaggcagggtggggtggctcactcctgtaatcccagcactttgggaggccaaggtgggtggatcacctgaggtcaggagtttgagaccagcctggccaacctggtgaaaccgcatctctactaaaagtataaaaattagccaggtgtgatggtatgcacctgtaatcccagctactcaggaggctgaggcaggagaattgcttgaacctgggaggtggaggttgcagtgagttgagattgcaccactgcactcccagtctgggcgacagagcgagaccctgtctcaaaaaaaaaaaaaaaaaaaaaaattggaaggatctttgaacacaagctgtagagttaaaataaagttgtacccctttatcacaacatttactaaaatgaattttgaatatgaaagtataaaacataagatataaaaaacaaaatcataaaaatagtaaaaaaaatagatgacaatatgaacttgagatggggaaatagtttcaagcataacagcaaagacagaagtcataaagtaaaatgtgcatatgcttgactgtgtaaaagtctgtatgtcaaaaacatcattagcatgagtaggacagatttaataaggaaaatatttgcagcatctatgacaaatacttaatacatgcattcacataagaagaaaatctcagcttgagatctgagaacgggcagactgcctcctcaagtgggtctctgacccccaagtagcctaactgggaggcacccccgagtaggggcggactgacacctcacacggccgggtactcctctgagacaaaacttccaaaggaacgatcaggcagcagcatttgcggttcaccaaatctgctgttctgcagccaccactgctgatacccaggcaaacagggtctggagtggacctctagcaaactccaacagacctgcagctgatggtcctgtctgttagaaggaaaactaacaaacaggaaggacatccgcaccaaaaacccatctgtatgtcaccatcatcaaagaccaaaggtagattaaaccacaaagatggggagaaaacagagcagaaaaactggagactctaaaaatcagagtgcctctcctcctccaaaggaatgcagttcctcaccagcaatggaacaaagctggacggagaatgactttgatgagttgagaaaagaaggcttcagacgatcaaattactccaagctacaggaggaagttcgaaccaatggcaaagaagttaaaaactgtgaaaaaaaatcaagacgaatggataactagaacaaccaatgcagagaagtccttaaaagacctgatggagctgaaaaccaaggcacgagaactacgtgacgaatgcagaagcctcagtagccgatgcgatcaactggaagaaagggtatcagtgatggaagatgaaatgaatgaaaggaagggagaagagaagtttagagaaaaaagaacaaaaagaaatgaacaaagcctccaagaaatatgggactacgtgaaaagaccaaatctatgtctgattggtgtacctgaaaatgacggggagaatggaaccaagttggaaaacactgtgcaggatattatccaggagaacttcccccatctagcaaggcaggccgacattcaaattcaggaaatacagagaacaccacaaagatactcctcgagaagagcaactccaaaacacataattgtcagattcaccaaagttgaaatgaaggaaaaaatgttaagggcagccagagagaaaggtcgggttacccacaaagggaagcccatcagactaacagctgatctctcagcagaaactctacaagccagaagagagtgggggcaaatattcaacattcttaaggaaaagaattttcaacccagaatttcatatccagccaaactaagcttcataagtgaaggagaaataaaaccctttacagacaagcaaatgctgagagattttgtcaccaccaggcctgcactaaaagagctcctgaaggaagtgctaaacatggaaaggaacaaccggtaccagccactgcaaaaacgtgccaaattataaagaccatcgaggttaggaagaaactgcatcaagtaatgggcaaaatagccagctgacatcataatgacaa

SEQ ID NO: 16973 - DNA, 2300 bp, Homo sapien
attttttttgagacagagtctcactctgtcgcctaggctggaatgcagtggtacaatctcggttcactgcaacctccaccaccttgcgggttgaagtgattctcctgcctcaacctccccagtagctgggattacaggcgcccttcaccacactcagctaatttttgtatttttagtagagacagggtttcaccatgttggccaggctgctcttgaacttctgacctcaggtgatccacctgcctcggcctcccaaagttctgggattacaggcgtgagccaccatgcccgaccagcttttattatttttattgcaagaatttccattacaaccttgcaatagtgaaaaattagaaaaacataaatatttattaataagggagtgattaaactgtggaagatccacagtataggattgtatagcatgaagttaagaatgaaggcattctatttgtggtaataagacaagatcttctagatgtattgtttcataaaaaaaggaaactgaagaataatagatataaatagaatgacactatttatgtttcaagatcagaataatatatataaatagaatgacactatttgtttcaaaatcagagcgagagagcaagagtgaaggtgagagcaagagtgaaggtgagagcaagagattcaactgataattgggatggcggtagaggttgatttgggtggtagtcaaacagaacttcaactctgaatttttacattaaaaatggttgatacagtatctaggaaaagaatttaaattattttaagccacttaaaaaataactggatcttgaagtttctccaggaggagtctgcaggggcatccaacaacaaacacctctttaagatcctcccctgggctggatgcggaggctcacgcctgtaatcccagcactttggcaggcccaggcagggggatcacttgaggccaggagttcgagaccagcctggtcaacatagtgaaaccctgtctctagtaaagaaaacacaaaaaaaattagccgggtgcggtggcaggtgcctgtaatcctggctacttgggagactgaggcaggagaatagcttgaacccgggaggcggaagttgtagtgagccgagatggcaccactgcactcagcgtgggcgccagagggaggcactatctcaaaaaaaaaaaaaaattatccattgcttcacaggcttcccgtccacccaccgggttcctgctagtcacactctttcttctccctcttcacaaactatttgtctacctccatttgctgtcttttcatttacccaaaatttaaaagtagaatctatctcacacattcagataacacacgaattcaacctactatgtatctatcactacagtaaacactttgtcatatttacttcgggtctaatttcttatttaacagaaataagacagggtagatcgaaattaatagtgctttagaaagccaaaaaacaaggtttttttttctgtaactgttatcatgaaaatgccagtgagccagatttgccctcacgcctcttggggtgcagccctccatctgagcccccttttcagggcgcccttgacctctttgttgcgaaggctgttgatgaaagggttcaaggtcggcgtgatgacagcgtagaccacgctggccaggcggtcgtagcgggctgagtaggcagacgacggcgggaaatacacggagaggacagagccaaagaaaagcgccaccgccaccgccactaggtgggccccgcaggtggagaaggcgcggcgccggccgccggcaagccgagcaccgcgaccaggatgcgcgcgtaggaaaaggaacacgaggagcagcggggccaacaccacggccaggccctcggagaagatggccgtctccgcggcggacgtgtccgaggtcgccaagctcagcatcaccgtcatgtcgcaaaagaaggggcgcacgggggtggggtaggggtaggagagcgcggagaggagcagcgtgtgcagcagcgagtgcaggtgcgtcacggcccacgacgcacgcaccagcgaggcgcagcgccatggcgtcaccagcgcgccgtagcgcaggggccggcacgccgccgtcgggcggtcgtaggacatggccgccaggaggtagctctcggtgatgcccagagccacgaagaagtacatctcggcaaagcacgcctggaaggatatggcctggcccgggtggagcaggccggccagcagcctggggaccgtgacggtggtaaagcagacgtccacgaggctcaggtgacccaagaagtaatacatgggggagcgg

SEQ ID NO: 16974 - DNA, 2300 bp, Homo sapien
acaatcagcttgcctgggtggcttctcattcagtcctgtctcctctgcttctcagatccaaactgagaccaaagaagaccatgccaccaaccatttccacttttataaacaaaggattttaaagaatattttggtgaccatcccccaaagcagtcacatcaaccatactactacagcactctgatttctgagatatgattttcttaaccgctcctggccctgaatttcactgccccagttcaggcaatcatcatgcttccctttctgttagagttatcagactccaaccccttcccatcttctgatttcagatacaagggtatgatattgctcttaaggaagctcaagccctacttgtctctagtcaataaagacattgatatttttttgattcagagtttgacataattcagtatggctttccaagtacatgccttcttcatttgaagacatagccttagagtcattggtcaatctaccatgcctgaatgaaggacaagtagaagaccagtgtctgtgcaatgtagaaccctaactgcacctggcagcaaccaacccacaggacatgattacaactttggttttagaggggagtagctgacaatgtacacagaaaaaataattttaaattaacttgttagtcaaagtccagtgtaaggatttaagtaacaataataacactagcaattaattgaacaaggagtgttgaattgacacttcatagtgtggtccctctctttgaagaaatgtgctgggctggtctttctgacattcagaatcatgagtatcttctctctgattcctggcataccttcacttgatcttcactatttccagaagccttgaaacctaggcaacagtttcaatattttctagtttctctgaaactctcatgaatttttctattttgaagtctgcttattggtctctgattctatgacattgactttttagattccacatgtaagtgaaattgtcaaatatttatctttctgtgtctagtttatttcacttagcataatgtcatccagtttgtataaaaggatatattttaacattctcaccacaaaaatgagttgttgaagggatggctatgttaattaccttgatttaatcattttacaaagcatatgccaatcaatatcacactgtaccccataaatatacacaattattattcatcaattaaaaataaattattaaaatgtaatctgcttattagtttgggttgatccctcagagaaaaatgggaaaattctatcttttttttttttttttttttttgagacggagtctcactctgtcgcccaggctggagtgcagtggcgcgatctcggctcactgcaagctccacctcctgggttcacaccattctcccgcctcagcctcccaggttcacgccattctcctgcctcagcctcccgagtagctgggactacaggcgcctgccaccaagcccggctgattttttttgtatttttagtagagacggggtttcgctgtgttagccaggatggtctcaatctcctgacctcgtgatccgcctgccttggcctcccaaagtgctgggattacaggcatgagccactgcgcccggggaaaattctatcttaatctcactatattcaaaaaggaagtcttttgccttttttttaacaaattttattgcgtatatttaaggttcaccacatgaagttacgagatacacgtagacagtaaaatgattagtatagtgaaacaaattaacatatccatcatctcacacagttacccattttcccccttccggcaagagcaactataatctactcatttagcaaaaatcttgaatacaatacactttattaactataatcctcatgttataaattagatcttttatcttagcttattttcccaagtattctgaccttttcagctagcagaggatgagagggacaaggtggtggtggcattcggcatctcaaccaagagcaaggtaaaggcattgaggtgttggaggagtgagggatggcctggggactcgccacggggctttgaacataaatggtttaaaatgttaatgtgaactgagtgaactgatacctcccctgctgggacatgtccttacagaaactcatggagccagaagctgggaccaataggaccgctgttgctgagttcattctactgggcctagtgcaaacagaagagatgcagccagttgtctttgtgctcctcctctttgcctatctggtcacaactgggggcaacctcagcatcctggcagccgtcttggtggagcccaaactccacgcccc

SEQ ID NO: 16975 - DNA, 2300 bp, Homo sapien
agtacttaaaagagtaagcataacttccagcattacaaatgttttgtgggatagagttgcctgatgtattaataaaataatgtagtttaaaacaaaaggatgccaggtgtggtctcatgcttgtaatcccagcactttgggaggccgaggtgggcggatcacctaaggtcaggagttcgagaccatcctggccaacatggtgaaaccccgtctctactaaaaatacaaaattacctgggcgtggtggcgggtgcctgtaatcctagttactcaggaggctgaggcaggagaatcacttgaacctagaaggcggaggttgcagtgagctgagattgtgccattgcactccaacctggggaacaagagcgaaactccgtctcaaaaacaaaacaaaacaaaacaaaaggagagcagagttttacttcacagtcatggctgtccagtagatccctgccagaaattttgtaggagacaaatttaaggtgggttgtttcccaaatggtatgactgggggataagaagggttttttgttaaatattatacataagatgtctcatacataatgtgatgttcagtagttatgtaatcaaactacttttactactttagttttctccttccctgtgatccatcctgaccaactttccaggtggaaataaataagcagaaaaagacaagtataaaacagattaagtttataaactgctagcaaatattctatattgctcatgtctgcagtccctacagaagtaatcggcttaaggtggttttttttttttttttttaatgaaaaatctatttttggggtgggtgggtgtgtgttgtaaatgtatgcacatccgtatgtagatatcaagtcaaaatctgcttccctgaagcttctattcatgttttgggtaactcctctctggaaccatgataaataacaagttttatttttattgttcaagtcttcttcttcccaaaataaaagatggccctattccttgaaagctgttccttactctggcattcaaggtctgctattatctggtctcagtctacatctaatattattttctaacactcttctttacttgagatagttttaaagcaactactaaaatgtctgtggtcttataggcctaggcctttactaacaatcttcctttcatctctaagcccttccctatcccagtcttcaaatggttagaagatacggtaacaacaaaacatgggctttgaactcagacagctctagaatccactacctggcccatagtaagttccggataaatggcagctactgttactcaaattaaataagggctaacagttactgggcatttactgtgtgccaggattgtctatttcatcttctagtatttttagggcgattgttgttattgttcttttactggtaggtccagagggtgttcagtaagtaacttgcccaaggtcacagggccaggaatccacagtcctctttgccaggaagcctggagctcaacgcccagggtcgcacaccacgcggcttcccctgcagagcgtctctgcggctcacgggcgcttccctcccgcaagctcccgcagccccggcgctgcctcgctgacggctctccgccttccatggccgccatctgaacctgggcttcagctctgtccccagcctcccggggactcagattccctgaccctgatccgacccagaaattgagccagacacctcgggtggccttcgagtcaatctctgggcacactctgggtggccaccagcatctaacaaacggatgtctggaccctaagggccagggggtgaggggaagtggggcacactttttagacgatggtggggctgaggccggttgggcaggagatctgcctctgtctctccagtcacaggacagtctcctttcctctctgggcaaaactctaaggagctggagccatccctgggtccacagtgtgagaacgccaaggaagagcgttaacgtcatcgcgcccggccaagggcggccaggcaggcagcgaagatgccatcgcgccgaggtggcggccactgcgcctgcgcggtccacggcgcctgcgaacagcctgattcccgcgctttcttcgcgggcgggaagggcggcggttgctgacggggccgcctggacgacggttgacggaggcgagggaaactgagggcgaaagttgtgtgtcgtgttggcaggagggcctagaagggaaagactgtgcgttgataccaaactgcccccactccgtgggcgggtcaggagaggcctttggaagagcgtctcaactcggactggagcctctt

SEQ ID NO: 16976 - DNA, 2300 bp, Homo sapien
tattatatattcaacttaataatgagatagtgacaattcgaaagggtttcacttcgtatactatcagttcgctgagaactaataaaaaagtgtggttttttgggtcatcccaaaaatcaagtacactttgggaaacagggagttaaaaatctttcggaagttaacttggtataagagtatgaaaagcctctgttgctctacttctgaggaaatgctctcctttttcctaataaagctttccacagaagacaaactctgtacacaaaaaacaaggtaagtatgggaaataattgctgcaattcattaactctcaaaaaagttattcattttgacatgtaagagaaactttatttatgaatgtgaaatgtgcttcaaagtgctgatctgttaaaattccataaaacaagcttcaaaatgcaagtcatttgtgccagctacgagtaaataactgaagcagcatttccagagagactagggcaaaggacagaacaaactacaaatcagcagaaaagaaaccaagcatagtagagtgttaataattcaccatggttactgctcttaaaaccaaagcaactaaacaactgtcatctgtttacttttacgtgtgttttcatcatctctacaccgtctgaagtgttcagtgtacatggatgtggacagacagtcaaagcctacaggagctttttttttctattagaacagtcattttaatgcatagatttgatgtggttattttgctttctctatctctgcattataagctcttaaaggaagaacattcagtgggtttattaaatattaggaagcattcatattttatttttccaccatgtatttggtttgtatgcatgtttgtttcctgagcacactgtaatggctgtttatgtgaattctgaaagagcaaaactagaactgtgaagaagaccaaaaataacagagaggcaccctattgtcctgtgaaaaacactagacttgggatgagaaacatgggtctcaggcctaggttctcctacatccctgcagaaccttaactgagttacttaacctctctttcgtttacccctgcagtggggatgtcaacacctaacccaccctatcgtataaaattaatgtatgaataaactgagtgaaaggacattataaattaaactctgcaattgtaataaattactcttattgtaccctctatcaaacaacctggcgttactagtacatggtattcccagtacttgaacatatgtgactttctgggtgactgagcatgaaatcaaatcagatttggctcagagtcatttctccaaagggatgtaatcatcttagtattctggaaaatttcccctaataagacccctttttgagtaacacagtccagtggagagtccccgctgacagtgaataaggctgtgtctatgtaagttcacatgatgtggttagcacatgcagtgtgtcccaagacattttcaggcatcacaaaaacttgaaaagtactaacagttgtctttcctttggtatttaggcaaaaaatgaggaagattcataagtaagttaacacagaattaccaaaaacctcatgagaaagaaatgaagggatgtttcagggtagcttttcgagtcccaagtgatcattgatttggcccttctgtttctgattgtgaaaaagcattctgaaagaatgggcgccggttcaagaggaggtctctgagggtcagcctttggctgtttatagaggtgagattcaaatgccctcagatcatgaaaagtgcttgaactcatttcagagaagaaatgttttgaaatgcccgtggaaatactgagtgggccacttttttattttgtgaaattagaaacgtataaactatttttattattacagataattgtgaaagcctcactggatgacatcctagctgaggaaaagaatggaatttttgtattagtatgaaatgctaatttattactgtatttagatctactgaccatctgagggagttagaagttaaagtaaacagctgtatctctagttgatctttgcatattttaatccaaatatggcaaagggcagggctaaagaagggagtgtccataaacggggctcagaacttgtaacagaaaattaaaatatactccactcaagggaattctgtactttgccctttgggtaaagtctcatttacatttctaaacctttcttaagaaaatcgaatttcctttgatctctcttctgaattgcagaaatcagataaaaactacttggtgaaatgacttcttgtcacattgctgaagaacatatacaaaaggtt

SEQ ID NO: 16977 - DNA, 2300 bp, Homo sapien
cagatgtcaaaatggcaaagtgcatggcggccttggcaacaattagaccaactaccagtggggcacttgccatgcttggcattttccaagcattacctttatatatatacatatatattttattatactttaagttctagggtacatgtgcacaacatgcaggtttgttacatatgtatacatgtgccatgttggtatgctgcacccattaactcgtcatttacattaggtatatctcctaatcaagcattacctttttacttctctcaacaacttgatcaagtgggaatcatcaccccgatcataaggtaactgaggcttagagactccaggattcaaaccaggccagccactcataatccaacttcaccatgtggtatatacctctggctttcccattcattgcttacgtggccctcacgacctaagataggttctgcaagtgttttcagccccattttaacagatgcggaaactaaagtccacagaaactcaactgatggtctttgcaaagtaggagcaaactaataccctgaggtgatttcctttggatttcacatcacgttactctcacagtttgctttagatacaactgtgagagcctctctggtctgctgggaccaggaaggagccccctcttaaaatctctccatttacaacagagggaacagcacgatctggttgtatttctaacctctgcatagagagatatcattttcccccacgtaccagttgcttttttttcttttcttcagtgaccattgacatttgaaattaagtagctgtttccatctgtctggtaccttttctgggtcacaatttgcttatttatttgctccttcacctgcttgtttattcatccatctatttactctctcatttaatttgctcatccacctgtctatccgtccatccatccatccatccatccatccatccatccatccaatcattcatccatcgatccatccattgatctatccatctatccatccatccatccatccatccatccatctaatcatccatccaatcatccatccatccatccatccatccatccatccatccagtcatccatccattcatccatttaatcatccatccatcgatcaatcggtccatccatccagctatccatccatccatccatccatctaatcattcatccatcaatccatccatccatccatccatccatccatccatccatccatctatccatccatccaatcatccatccatccatcgatcaatcagtccatccatccatctaatcatccatctaatcatccatccatccatccatccatccatccagtcatccatccattcatccatttaatcatccatccatccatcgatcaattggtccatccatccatctatccatccatccatccatccatctaatcacccatccatccatccatccatccaatcatctatccatccatccatctaatcatctatccatccatccatccatccatccatccaatcatccatccatccatccatccatccctccatctaatcatccatccctccatccatccctccatatccatccatccatccatccatccatccatccaaccattcagcagtgaacctctactgtggtgtgttggaaagaagggaagtgtgagcctggtcttgctcacagggaactcaaaacagagcattaggaggagactcaggatcttacagccttgagggaggtgacccaggctagaggaagtcaggagctcaaagactagctggggagccagggacacacacatggattataattagtggctctgcaaggctgcaagtgatcaagggcagactgcggggtaaaggaaggagagaagactctgggctttgttaggtggaagggctttctgcaggaggccaggccagagaagccagcctgatgaggctttgagaggacctgaaactggagatgggatttaatggccagagagaaggaggcagcaggcttgtcatgtaggcaaatacacgcaagcttgtagagtaattaccaggcagagagctgaggagagcaccctgttatgttcccttagccttggcctcgctgatcgagaagtgtcccaaagacaacaaggactgcagctcctacggcagcttcagcgacgcagtgctggaactcttcaagctcaccataggcctgggtgacctgaacatccagcagaactccaagtatcccattctctttctgttcctgctcatcacctatgtcatcctcacctttgttctcctcctcaacatgctcattgctctgatgggcgaga

SEQ ID NO: 16978 - DNA, 2300 bp, Homo sapien
ggattacagacgtgcaccatcacacctggctcctttttgtatttttagtagagacagggtttcgccatgttggtcaggctggtcttgaactcctgacctcaagtgatctgcccacctcagccttgcagagtgctgggattccaggtgtgagctcctgcgccggcctcttctgcttcttatttgttttgttagtgtggagggagacattcttcatttcagtctaaaatgcagttgatgaattagatggtttttcttacaatcgtgcctgtgttgtgactttggttagctattttataattttggaaactgtctgatgttataagacagtgtttttatccagatgtctgcataatggatgttatgcagatgtctgcatgtgactgtgtaggagtagatattgattttgtatgtttgcgatatattatacttaaaaacattttaactgtgggccgggcacgatgggtcatgcttgtaatcccagcactttggtgggccaaggtgggcctatcatctgaggtcaggagtttgagaccagtctggtgaaatcccctctctctacaaaaaatacaaaaattagccttgtgtgtggtggcatgcacctgtaatcccagctactctggaggctgaggcaggagaattgcttgaaccagggaggcggaggctgcagtgagccgagatcatgccactgtactccagcctgggcgacagagtgagactacatctcaaaaaaaaaaaaaaaattaattgtggtaaaatacacatagcataaaagttagcattgcacccattttttaagcgtagaaatcaatactgtgaagtacattcatgttgttgggcaatcagtctttagaactgttttcgtcctgtaaaactcaaactccataccccttaaacaacagcccctattcctctcctttcccggccccctgtaaccaccattcttccatctttctctgtgaattggactattttaggtacagtcatatagtggagtcacctatcttatttcacttagcatacatcatactttaaaaagatttaatgctgggcgcgttggctcacgcctgtaatcccagcactttgggaggccgaggtgggtggatcacctgaggtcagaagttcgagaccagcctggccaacatggtgaaaccccatctctactaaaaatacaaaaatgagcctggtgtggtggcgggtgcctgtaatcccagctactagggaggctgaggcaggagaatcacttgagcctgggaggcggaggttgcagtgagcagagttcatgccactgtactccagcctaggtgacagagcaagaccctgtctctgcccccctgacccccccaaaaaacaccacgatttaaaaagtagggtttgggggacttttgctatgattggcttttaagtatagatattggcagtttttgtcattttggttaaaaatacaatcatttaccacatctttggtctactccagtagttctcaaatcgatgcaggagtcagaaattatgtgggtgatttagattatttttcttttctttttttttttttttttgtagagacaaggtctcactatgtcactcaggctggtcctgaactcctggcctgaagcgtttctcctatctcagccccccaaagtgttgggattacaggcgaaagccactacaccaggcccgtgtgggtaatttaaaaaatatatggcctcccgggcagtaccctagaatcttctgcggccctgtggatgtgtgttttttctttttttaaagtccccaccagctgcaatcagcttaccacaggctgtgagtggcatctggtgatgtctctacaggctgaattctatggtagccaaatggatctgaggcagcgtgattctggtctcttcagcatccgtcaccggggtgactgttcagggggtttaagggaggtttgggggatttgcatatctttgccctgatgctgagaagtaagtaaggcccgtgtctcctgtgtctcctgaacagttttatccaagctgtgcttgtgatactgtctgtcttcttgtacttgtttgcctacaaagagtacctcgcctgcctcgtgctggccatggccctgggctgggcgaacatgctctactatacgcggggtttccagtccatgggcatgtacagcgtcatgatccagaaggtgcgttgagagctgcgccggcgggagggccctcggaggatggccatttttcagatggggaaactgagatctggagaggaagaggggtttaccaaggggcaggtcactgctctttctcccaaatgccatgcactcc

SEQ ID NO: 16979 - DNA, 2300 bp, Homo sapien
ggtttctccatgtgggccaggctggtctcgaactcctgacctcaagtgatccacccgcctcggcttcccaaagtgctgggattacaggtgtgagctaccgcgcccggccctaaaacacattgcctttttatatatctcaaatattttccccagcctatcacttgtctttaactttcattaggatgcattcggaaatacagaaatctccgaggtagggggattgcttgagcccaggaattcaagaccagcctgggcaacacagcaagatcctgtctctacaaaaaattttaaaaataagccgggagtggtggtgcaggcctgtagtccacacgtgtgtgtgtatatatgtacacagaaatagttttatttacttatctaacataaaataggaccatcacgtctgtattctacaagttgctttgtttgattaactgtatgtcttagagcatttcttatgccaaatatgaaagtctagcttttggggggctgagacaggaggatcgtttgagcccaggagttcaaggttgcagtgagctatgctcacgccactgcactccagcctgggtgacacagcaagatcctatgtcaaacatacaaacaaacaaacaaaaaaccaaaaacccccaaaaccaaaaacctttatgtaagcaaatatgtcagccttttctttatggtttctgccttttggatcctgcttaagaaggtcttccctaccaaaaggttagctataaacaaactttctaatgtgtcttaaagcttggttctttaatccaccaagactatgtttgtttatgacacagcggcagctctttggaaactgctgtttctgttggtgcatttcgagacccttcccccactccagccttctggtcccttccatctggaagttctctggtctccagcaggcttagtgtctctcccgctacccttctttcctcttgctgtgtcaccagcgtatcattcacccaccgccagggctgaatacctagatcttacctgagacacccttcttcccagccgggcatcctgaaggctctttctccagagggtctttgggcttcctcctttctccacccttcatgtgccctccaactccccttagtccaggcctcatcatttttttgtttgtttgtttgttttttgagatggagtttcactcttcttgcccaggctggagtgcaatggaccaatctcggctcactgcaacctctgcctcctgggttcaagcgattctcctgcctcagcctcccaagtagctgggattacaggcatgcgcccccacggccggctaattttgtatttttagtacagaccatgtttcaccatgttggtcaggctgctctcgaactcctgacctcaggtgatccacctgctttggcctcccagtgtgctgggattacaggcctcatcatttccttcactggtctcggctgcttctaacgcatcctccacttttgcagccagagaggtctgaaaacacccatgcaccgagccctacattctcgtcctgccagtttcctaattcaaggccgtctgtgactctggcccttagcacaagctctgccctcttgccctggctgatgagctggccccacaccgcctcgctaaacttctgaggtcccaggttagagagctctgggaagccccctgacgctctctggctgtgaagggcccttgctctgggtaccgcagctcctgcacccctctgaatcgtagcacctcgttctcagtgacactgcgggcttcttgaggaaaataatcgagattgcgtcttgggcacccactgacccccagcgcctggggccggagcccggagcaggcgctccacaaacatttcttgggtccgcgcaggcatgaaggaagcaaagaacaaagctgggattcctggtagctggcgacacagaccagggttctgatctccccgtgggttcggggagggtatggaggccagagcgggtgggcaagaggcccctgtgcccggcgctgaggctcccgcgcgtccccgcccgctccgcagggcagacggcgctgaacatcgccatcgagcggcggcagggggacatcgcagccctgctcatcgccgccggcgccgacgtcaacgcgcacgccaagggggccttcttcaaccccaagtaccaacacgaaggcttctacttcggtgggtgccgcccccgcccggtgcggagtctgggaggagggaggagggagacgggagaggaagggagggaaggggaaggagggaagaagggaggaggggggaagaaagagggaaggaggaaggaagtgaggagggagaggga

SEQ ID NO: 16980 - DNA, 2300 bp, Homo sapien
agtatgaagtggtcattttatcttttatctttttttctgtttctctctgtgtgtgtgtgtgtgtttaatttaaacttaatagcattgaccaatgtgttgtatgcatttacactatagcatgttatatttttgttctgatcatattccttttcacttttccattctttttcttttttctttctttcttttttttttttttttttggaaacggagtctcgctctgttgcccaggctgtacagtggtgcagtctcggctcactgcaacctctgcctcctaggttcaagcaattctcctgcctcagcctcccgaatagctgggactacagtgtgcagcacctcaccccgctaattttgtatttttagtagagacggggtttcaccatgttgtggcctcttccctccttccaagtccaggcagatgctccctctttcccgaactcatcccctacaccccatcacagggacttcctcccgccttgggggtctcagcccattttgtcctgatgacccacatggtgggtcatggttcctgcctgagcctgtgtcccctgtggcccacgagggtggacacggccttctccagttctgaatccctcgttgtccacctgcgcccttgccacggcctctcccgtgggctctcaccatgtgctgggttaaatggggttgaatatagaccatctaaggggctgaagctgctgcttctgtgtgtttggggtgggattaggatgggctcgggcttcctaagtagtgactgtgactccactgggtgacctggctcctgctgcctctcatagcagagcgggggtccccttcttccttgctgggcacagggcacacctctgggtgggagacaggggcctttttcaccagctcccacctgccctctgagaaaagttatgaacacgagcaaaatggaagcactgacatttggcagcagcttcctccccaggcgtctgagccgccagaggcaaacagggagggcgcggggctgggtcgggagagggtgagtaagctagtggccggaggccgtgctcaaccccagatcgggcttttccggtcgagtttcaggcacagtcatgagatttcagattgtgagtgggaacttcaggaccccctgacttcaacggcagaagcggtctcctgcttcacccacaccctcaagtctggtctgccccttaccggccataggtcctgctctcccgtggcctagaagcctcacctgcctcctgcctcctccccaggccaggcaggttgtgatgatgagggattgagaggctcacagctggggatttccctgcccatcaggcgccagctgcggccgcgtcagcagagacttcctgctctgtcccagctgtgtcttgtccacatctcgccccggggagcaggtgtgcagttcctgagtgacgcgagacacacacggccatcctgactcactccacccacttcacagctgcagcctgggccaggagagagggcaccgattccttctatgacgccctggccttggagaagggcaacctgggcagttgctgggagaatacattgagatgacaaaagcaatcatagctaagagctgacattgtttattgagttcttgccgtgccctgggccttgttctggccctttctacttgtacttgttgaagccccacgataaccttgcaaagtgggtttatgaagcacgtttcacagatgaggagactgaggctcggagaaatgacctgctaaggtcattcagccaggaaggggtgaggctgacactaagggccatgatgcgtgactgctggtggacagcattaaatggggacttccgtccccgagagacctgatcccaggaaccgacttttgagaacaagtgccgagtcttggggctggccaccctgaggtcaaccaggctaggcctgggctgcggtcttccctcccaggggacagagcagagcgcttgactcttcactaggccctcccacctctgtgatctctttggctcttcacggctcccttggaaagtagatgttatcattcccatttcctagttggaaaaataggcctgagatgggcagtccctgcccagcatggaatgccagagagggaggagttggacccacaacttcgatcttggcacctgcggcctcccctgccttttctccggtggggatgaggctgctgtgtgggtgtgggggtgactcacacgggccacgtgggtgggcgggtgctgcagctgtggctggtgggcgtggcctgcctggcgccgagggcaggtggctcagccagttctgcctctgacgcctcattccagccatc

SEQ ID NO: 16981 - DNA, 2300 bp, Homo sapien
tgacggccatctggttctaacccggcctcctgtcttcctgtcccactgacttcccgttcttcagctgctctaggcttccctgtctgtctccagaccctagcccacctctgttcccttcccaggctcagctcatccatcaccaactgccatggacccctcttcagcaccctgccccctcctgcagtccctccgcccagccagtacctggtttctgtctcagcggggagctgactcctctctgtgcccccagcgcagggctggactctgaggaggaggactcagtagataggtattgagtgatgagatgagggaatcggctttctgtggccgggaacactcctgctgcagggggtccacctgatgggtgagtcagagaaagactcaggcctgttgaaagtggatcaacaggcaggcagggagatggccagtagccagccgtccgtcctgttcacagcctgcggagtggtgaggctgcctctgtgttttcatggatctgagattcagaacgtagctggtttacagccatggcccagttgtgtgctctggagtttcactgcctgaattttaacttgaaaatgtaggacttgggagtctctctgagccattctggcttgggagattgcctgattatatatttcaaaaaaaaaaaaaaagaaaatgcaggacttgagaagcctctcatttcttctgcggctgttttccggaatgtagccactgctggaacagtaatctccctaacttcctatggaaatggcaattagaagggtctgattgctcttatttccccatgtgtgcagctgctgctgctgctgctgctgctgcttctttttttttttttttttttttttttgagacagagtttcactctgttgcccaggctggagtgcagtggcacagtctcagctcactgtaacctctacatcctgggttcaagcgattctcctgcctcagcctcccgagtagctgggattacaggcgcccgacaccacgcccggctaatttttgtattttttttagtagagatgggatttcaccatgttggccaggctggtctcgaactcctgacctcaggtgatccacctgccttggcctcccaaagtgctgggattacaggcgtgagccacgcgcccaggccagtacagcttcttcataaggagatggaccaggaaaggtccctgcccaggaggaggtcacagggtgcgggagagataaatcagtgacagatagcaattgctggaccacatggtaggctgtgtgggacaggcggtcagtgggctgggccactgtgtggaggacagcggggagcatgagcagggcagggatctgggggcttcatggaggaggcggcatcagtgctggatcctgaggggaagtagcatctgagtggtgataggacttgtgcaagggtagacagaggaaaaagcccttaggtggagacccgatgggaatagaggctatgggagggatgtatgggccacccctgggtgccagggagtggggatgcccagccagagggaggggaagcatggggatggggcaggatgggagtggaaaatagcatcagctcatgtgtccaactacacatgctgctgccagcggccagctgatctctaggtgtttaggcctagaagaccaaccagctccaaatcacttaaagcctaaacgttccctgtctctactaaaaatacaaacattagccacgcatggtggcgggcgcctgtaatcccagctacttgggaggctgagggaggagaatcgcttgaacctgggaggtggaggttgcagtgagcagagattgccccattgcactctagtctgggcgacagagtgagacacacagacacacacacacacacacacacacacacacacacacacacacacacacacacacacgcctaaacattcaaggccaggatgcttgacagatgttgattcataaaaatgacaaaaagcacaaaatccaaaatctcgtataagctcagtggctgtggcagcgaggttgaagagcaaaggcaggccgggcacctggctgatgatgtgtggacccgttgcacagcagggccccgcagtgcggtgtgggtgtgggtgggccagtctctgccgctcaccctattccagggacacagtctgcttggctcttctggactgagccatcctcatcaccgagatcctccctgaattcagcccacgacagccaccccggccgttttccttgttctgtgtggggagggaggcagcgcggtggttatcaacctcaccctgcagaggaggcacctgaggcccagagacgaggaggg

SEQ ID NO: 16982 - DNA, 2300 bp, Homo sapien
gggaggccgaggcaggtggatgacgaggtcaggagttcaagaccggcctggccaacatggcgaaaccctgactctactaaaaatacaacaattagctgggcgcaatggcaggtgcctgcaattgcagctattcgggaggctgaggcaggagaatcgcttaaacctgggaggtggaggttgcagtgagctgagatcgcgccattgcactccagcctggacgacagagtaagactctgtctcaaaaaaaaaaaaaaaaaaaggaaatgacactgatagttatctgtgttttgtggttccctgaggaacccccagttgagaagaaaggctgggacctggctgacccagaagaccccctcgacgccaacccctactccaggtttggggacccaggaacgagaggcctaagagagttagggactagttcaaggttgctcggactctcaaaacaagtccctaatgccaggccagtactgtgtggcgggcagcacgaccctccattccctctttattttgaaaacggaacagttacaggacgctagttttgacgtcgctggttgtgaatgtcatttgtggagccgtttcccagacctccgggggcaggagccacaggtttgagaggccgagcagcgccctcctttcctgagagctgaggttgcagctctggctggctctggtaagtgctctgcagccctggcatggctggaggaggggcagcagctaagtggtttctgaaaaagggcaaaaatgatgggaaaagctttgggatcctctgggaatcagagccgcagcaaaggcagctgcttgcatcgctggaagcgttttttccttgagtgccgaagggcgtccacagcgactcctgctagtgcagggcagctgctgccagggccgggcccgggaccccacggaggcggggagaccactcttctcccacacgagcccagctctcccttcgagtagcaaccgccttcaagctcacaagcacccgtgggcctggggtgtgcctgcgtctagctggtgagtccctttctttgtctgatggccaatgcagacattagcttttaagatggcatagtgagtggccaaaagccgggccctgtcacttcccagctgtgcgactgtgggcaggtccactcacctctctgtgccccagttaccttatctgaaaacggggggtagtaagagtggctgcctcaaaggtggtcgtgaggctgaagcgaacttgtggtgccctcagcctggctccttggaagcacctgggaggtgagagtggaggttgttgttactggggtttgttcttgttgctcctgcatcagccgtcctcgggggaggaggctgcagctgctgctgagattgctggtgtgtggccggaggttttcagcgtgtcgccctctctgtggagtggacgagcgcagggctgggaagcaggcacactgggtccttgtgctgctgtcctatctctttgttcttcacccctgggttgggaagcccgcagcctactgcctccctttgacagaagggactactgagaataatctggctgggtcctgggccagcgttctcccagcttccagaaagtccccagtggcgagcgggaggtgctcccaagaacttggatggatggatggatggatggatgctttgggcagagagaggagcaggggagccacaccccatgttgtctcacttgcattggggagagaagggatccttcccccagagggtaggcagtatctgttctggctttggagttgagaaagactcagatcataccacgtctctgtgggcagaatcgattcttttaggattgtcctttagtccagattgatgagtttgtgagtcttgtgtaaaccagaatcaccatctccatcacacagccaacactcgtttgcctaaatcacggtagaagttcccctgatcactgtagaatgttttgcggtgacaggtgcatcaccacgggcttaggtgcagggtacactccaggcctggcagtggagggctgtcctgaccctgttccccggcccagcccagggcacatgacccctcagttcctgtcccaccccgttccctggaagaagcttggtttccagtagggaatcaggtgcagagtgtgcagtatagattcagcgtttgtcgactgactgaatgatagcacaatcccggctgcttcctgttggctgggtttggttggactgggacccgtcagaggaaaaggcaacgccgctgacaaagaacattgccgaaaggttcatgggaggctccggctaacaggtgctctcttgctgggctgcctaacgagcagc

SEQ ID NO: 16983 - DNA, 2300 bp, Homo sapien
ggtgtgatcttggttcactgcaacctccacctcccgggttcaagtgattctcctgcctcagtctcccgaatagctgggactacaggtgcccacaaccacgcccagctaattctgtatttttagtagagatggggtttcaccatgttggtcaggcctggtctcaaactcctgacctcaggtgatccacctgcctcggcctcccaaagtgctggggttacaggcatgagccaccgcgcccggccttttgccacaatttataaacaagaatgaattctaacgttcatattaattgaagccaacatgacacacatagcataaacaggtgtctaagcggccaggcgcggtggctcacgcctatgatcccagcactttgggaggccgaggcaggtggatcacttgaggtcaggagtttgagaccaggcctgaccaacatggtgaaacccagcctctactgaaaacacaaaaattagccaggcgtggtggcacgtgcctgtaatcccagctacttgggaggctaaggccggagaattgcttgaacctgggaggcagaggttgcagtgagccgagattgcgccattgcattccagcctgggagacagagcgagacaccatctaaaaaaaaaaaaaaaaaaaaagtgactaagcgaggggtatggtggggtgtggcgtggtgggatgggcctggcttttatgcctagaccaacgtgcggcctgggcaattatctaattatcggttgtctaattgcccagcgtcacacatttctcacctgtaaaatgggtatgacagtctctgccctcccactgcccggggttgctgtacggcctgcgagagcgggtttgggaaagctctttgtcaactgctgtgcggaattgatggggtggccacacttcaatgccttgactcaggggtcagagctttcaagcgaccccaggcagggttacgagggcctccctggcagtggctgcttattccaggctggacctgccctacggcttgttggcgtcccgcaggcagctgctaggatggtttttgcagggcatttgggccgcagcctggatgcatacctagacctcactgtttttctcagccagggtctgggagagaatgaaacctattgttctagttatctgctgtatgtgactctctcctgtgcgtttctctcttgtgggtcttctctcctgtgcatttagggtggtatgaagtgaagagagaaaatagacacttgtggccgggcgcagtggctcacgcctggaatcccagcactttgggaggccgaggcaggtggatgacgaggtcaggagttcaagaccggcctggccaacatggcgaaaccctgactctactaaaaatacaacaattagctgggcgcaatggcaggtgcctgcaattgcagctattcgggaggctgaggcaggagaatcgcttaaacctgggaggtggaggttgcagtgagctgagatcgcgccattgcactccagcctggacgacagagtaagactctgtctcaaaaaaaaaaaaaaaaaaaggaaatgacactgatagttatctgtgttttgtggttccctgaggaacccccagttgagaagaaaggctgggacctggctgacccagaagaccccctcgacgccaacccctactccaggtttggggacccaggaacgagaggcctaagagagttagggactagttcaaggttgctcggactctcaaaacaagtccctaatgccaggccagtactgtgtggcgggcagcacgaccctccattccctctttattttgaaaacggaacagttacaggacgctagttttgacgtcgctggttgtgaatgtcatttgtggagccgtttcccagacctccgggggcaggagccacaggtttgagaggccgagcagcgccctcctttcctgagagctgaggttgcagctctggctggctctggtaagtgctctgcagccctggcatggctggaggaggggcagcagctaagtggtttctgaaaaagggcaaaaatgatgggaaaagctttgggatcctctgggaatcagagccgcagcaaaggcagctgcttgcatcgctggaagcgttttttccttgagtgccgaagggcgtccacagcgactcctgctagtgcagggcagctgctgccagggccgggcccgggaccccacggaggcggggagaccactcttctcccacacgagcccagctctcccttcgagtagcaaccgccttcaagctcacaagcacccgtgggcctggggtgtgcctgcgtctagctggtgagtccctttctttgtc

SEQ ID NO: 16984 - DNA, 2300 bp, Homo sapien
ctgcaacctctgcctcccaggttcaagtgattctcctgcctcagcctcctgagtagctgggattacaggtgcctgccaccacgcccggttaatttttgtacttttagtagagacagggtttcaccacgttggccaggctggtcttgaactcctgacctcaggtgatctgcccgccttggcctcccaaagtgctgggattacaggcgtgagccaccacgcccagccaatgatagttattagtctgtatatgcatttggtccccttggttaagaagcctgtgttaggggtagggctcatggcagcacttaatgagacctcaccctgatgtctggctggggtctgcactgagacagcgggcggggatccagggcagagtgtagctagcctggctatagcagtccctgagcccagaaccaccagctgcagcgggaggagaagcagcaagtagcgctgttcccaccctgtgggaattctctgccatgtcagcctgcactgagggggacgcatgagcttacacagatcttctctgtctctggcaggcctggaggttgaagaatccactgtgtattcacgcatgattcaggcagctgtgcagcagagagatacccacctgaccatcaccccgacagtgctgggggagaggcacctgccggaccagctggcctcagtgaccagaatctcctcctccgacctctccctggggcacgtgacccgggctctgtgccgaggcattgttcagaacctgcactccatgcttccgattcagcagctccaggactggggcgtggagagggtgatgggcagtgggagtgcgctgtccaggaatgacgtgctgaagcaggaggtgcagagggctttccctttgcccatgtcctttgggcaggatgtggatgcagctgtcggggcagctctggtcatgctccggagacacctcaaccagaaggaatcttagacagcaaactctttcgccaaacgactgctgtgaattttacctgattaacattcctgacaccatctgtgggtcatcctttccctggaccgttcagtggacagctttcaagcagtgcttgttgtgaggtcccatctcggccaagaacttaccttcagaacatactctaataatgcagccaggagccgtcagccagatcccaaatgagtgccttccgaaattgacccacctgggagctatttacaaatgtccatgtgggagagagagagcatgagagcacagtagcccagcctgctggtcagcaggctcatctgtggttcacctgtagacagagagcagatcaatgtgtacttcagacaccagaaagtctggtggctttggtcccaagtgggaaaagagaactgccccatgcccagcttgtgattatcgtttttggagacctgaagcccacactcgggtcgtatggacttctggaaaagttcttgtctcctggactgaaccatgtgaccggaggcccctttcctagtctcatcctcccctggctgcagatgcttagctgggccagggattgacccaagcgcgatgcagcaggcaggctcagaagacgatgcggggctgtgtgccggccttcttgctgcatgtactcagcctcaggagagcttgctgcacccaggccgcccaggtcttcacagcacaactgcctggaaggcaggttgcgagaaggagaggcggatggcatgagcagcaagggggaccgatgctgtgcagctcacaccactccagaacctgacaaggcaccagcaggaccccttgccaggagcatgtctgtgcagcagtgtttttgcccctgcacattccagaagccctcatgggaagggatgcagccaggcagactcctgccagatggggcaggtagtttattcaaagagaactctgtatcccataggcccaggctctcctttcgcttggcgtgggctttgctggcccagtgtgtgctcctggctcagcagaaacatccatttgagttggcatccctgtagggatcccagagcgttgtaagccttcttgtgattggtagggatggctgtggggtggcttccaggagggggccaccattgccgcatctacttctagactcccaaaggagcccaggctcaggcaggcctggcccagagtcacgctggcaaccacgagtttgggaagcagtcgtattctctctctctctctctctctctctctcagtatccatgacaggtatgaaacatattgtctctttataaatgtcattttacaaattatgtgattatctggaagctctaagatgagagcaaatgcctgatcactctggcca

SEQ ID NO: 16985 - DNA, 2300 bp, Homo sapien
tgccaacatggtgaaaccccatctctaccaaaaatacaaaaaaattctccaagcatggtggcgcacacctgtaatcccagctactcgggaaactgaggcacgaaaatcacttgaacccgggaggcagaggtttcagtgagcagagattgcaccactgcactccagcctgggtgacagagcgagaccctgtctcaaaaaaaaaaaaaaaaaaaaaagaagtgctctatttcaggagaaactggcactttctgagcctactctcccctaatgccagctctcctgctcaccccaccagggtcagagccaactttgcctccaattcatagtcctttaagtaagaatccttttaatatgccctaatgtcccaaccaaactaatcttgaaagcttctatgtagatacaaagtgctcctgaaatccctatcctcagaaatgcttctgagccaaatgggctctgaaccctaaacaaccgtgtccatgtatgtggcaagagcttgtgaaaaacaaagctgggccaggcgcagtgactcacaactgtaatcctagcactttgggaggctgaagtgggcagatcacttgaggtcaggagttcaagaccagtctggcgaacatggcgaaaccctgtctctactaaaaatacaaaaagtagccgggcgcggtggctcacacctgtagtcccagctactcgggaggctgaagcaggagaatcacttgaatccagttggcggaggttgcagtgagcccagatcacgccactgtactccagcctgggcaacagagcgagacttggtaagaaagagaaagaaaggaaagaatgaaggaaggaaggaaggaaggaaggaaggaaggaaggaaggaaggaaggaagggaaggaagggaaggagtctcgctctgtcacccaggctggagtgcaacggagcgatctcgactcactgcaagctccgcctcccgggttcgcgccattctcctgcctcagcctcccgagtagctgggactacaggcgcccgccaccacgccccgctaattttttgtatttttagtacagacggggtttcaccgtgttagccaggatggtctcgatctcctgacctcgtgatccgcccgcctcggcctcccaaagcgctgggattacaggcgtgagccaccgcgcccggctgaccaaaggtttcttggtccgcattctgcttctgtggaatgagccaggagccagttaggcctgatttgacatctgatttccggaggaaaacccagactctgccctgggcaacaaactgaatcctgaacttgaggtcacagggcaggtgtgaggagcggagagcagcaagagtgaaagggaggcctgtggtcattccatacacacaagagatcagttcctccaaggtcaggggacagagagcacagggatccagcgccaagcgcaaggcccccagaagaagccagagagtcggggagggggcgggggggaatcggtcccagcaggtgggaaggattctgggaccagacctaagggatcatgagcacagctgctgcaggcagacgggcccctggagaagctggggacaagctggaatagagacttcattgcgggaagggctgtcagggaggcctcctggggtggaaaagggtggtcaggaggctcctggaggcggcgcggccccgggggtccaactcacctggggcccggccaccgcgctctcgaccgccgcctctgcccgcgcagcacgggcacagctcgccagcactgcgaacccggatgggtcgtcgggcgcggccctcagcagagctgccttcacagatgtggtgcccaggtcaatgccgagggtgatcggccgcgcagccattatctccctgacccgcgcagctccagtctgcagccagcggccccacaagtccgcgctcttcgcccaggggggcggggcaggggcggggagtcgcctgccaatctttcagccacacccaacatggaggcttctcgtcttcccactggccggggaaggcgagcttccacgcaacctctcggcgggccccggctataggcggagaggcggcggaaggcgggacctaaagggggccccgccccacgggctctgatttccgcccaatggagggcggtctgagcttcgctcacgaaaggagccgggaggcgctggcggctccaagagtctctgtgtccctggcagcggacctcatcttccctcacgccggagccccgatctctgcgccccggcccgacccagctgcgctctgtccgtctaagacgcgcggaaactacaactcccagagctcatctcgccgagatc

SEQ ID NO: 16986 - DNA, 2300 bp, Homo sapien
actttctgagcctactctcccctaatgccagctctcctgctcaccccaccagggtcagagccaactttgcctccaattcatagtcctttaagtaagaatccttttaatatgccctaatgtcccaaccaaactaatcttgaaagcttctatgtagatacaaagtgctcctgaaatccctatcctcagaaatgcttctgagccaaatgggctctgaaccctaaacaaccgtgtccatgtatgtggcaagagcttgtgaaaaacaaagctgggccaggcgcagtgactcacaactgtaatcctagcactttgggaggctgaagtgggcagatcacttgaggtcaggagttcaagaccagtctggcgaacatggcgaaaccctgtctctactaaaaatacaaaaagtagccgggcgcggtggctcacacctgtagtcccagctactcgggaggctgaagcaggagaatcacttgaatccagttggcggaggttgcagtgagcccagatcacgccactgtactccagcctgggcaacagagcgagacttggtaagaaagagaaagaaaggaaagaatgaaggaaggaaggaaggaaggaaggaaggaaggaaggaaggaaggaaggaagggaaggaagggaaggagtctcgctctgtcacccaggctggagtgcaacggagcgatctcgactcactgcaagctccgcctcccgggttcgcgccattctcctgcctcagcctcccgagtagctgggactacaggcgcccgccaccacgccccgctaattttttgtatttttagtacagacggggtttcaccgtgttagccaggatggtctcgatctcctgacctcgtgatccgcccgcctcggcctcccaaagcgctgggattacaggcgtgagccaccgcgcccggctgaccaaaggtttcttggtccgcattctgcttctgtggaatgagccaggagccagttaggcctgatttgacatctgatttccggaggaaaacccagactctgccctgggcaacaaactgaatcctgaacttgaggtcacagggcaggtgtgaggagcggagagcagcaagagtgaaagggaggcctgtggtcattccatacacacaagagatcagttcctccaaggtcaggggacagagagcacagggatccagcgccaagcgcaaggcccccagaagaagccagagagtcggggagggggcgggggggaatcggtcccagcaggtgggaaggattctgggaccagacctaagggatcatgagcacagctgctgcaggcagacgggcccctggagaagctggggacaagctggaatagagacttcattgcgggaagggctgtcagggaggcctcctggggtggaaaagggtggtcaggaggctcctggaggcggcgcggccccgggggtccaactcacctggggcccggccaccgcgctctcgaccgccgcctctgcccgcgcagcacgggcacagctcgccagcactgcgaacccggatgggtcgtcgggcgcggccctcagcagagctgccttcacagatgtggtgcccaggtcaatgccgagggtgatcggccgcgcagccattatctccctgacccgcgcagctccagtctgcagccagcggccccacaagtccgcgctcttcgcccaggggggcggggcaggggcggggagtcgcctgccaatctttcagccacacccaacatggaggcttctcgtcttcccactggccggggaaggcgagcttccacgcaacctctcggcgggccccggctataggcggagaggcggcggaaggcgggacctaaagggggccccgccccacgggctctgatttccgcccaatggagggcggtctgagcttcgctcacgaaaggagccgggaggcgctggcggctccaagagtctctgtgtccctggcagcggacctcatcttccctcacgccggagccccgatctctgcgccccggcccgacccagctgcgctctgtccgtctaagacgcgcggaaactacaactcccagagctcatctcgccgagatccggccccacgagtcaggtggcggaggtcaggtgacagcggacccgcctctcccaaagtctagccgggcaggggaacgcggtgcattcctgaccggcacctggcgaggctcatgcgtcccgtgagggcggttcctcgagcctgggggcgctcaggtgagagcggacgcggcctcccctgtttcccaggcggaccccttgaggcacagcaggtcagcggggcagcctgccgggggtccagcgccc
